United States Patent Application Publication US 2007/0054278 A1 - sequence listing, part 94

SEQ ID NO: 97187 - DNA, 25726 bp, Homo sapiens
cacaaacagattttcagcgaattggctttcagcaaattgattatttggcaaagtggtcattaggcaaatgggtcatttggcgaagaggtcatttagtaaatcggctttcaatgacttgccctatgagatttctccagagtgagcattttcttgggttcaatgtgcacttcatttccataatgaatactcactggcggctagatgggaaacttcccaggaaagcaggagcagcaagaacagcctcttaataatcaggcaattaaaaaccctctggtttcttaacaggagggaggtacacagggcatctgctctgcaaggcacagtgattgggctcagcattgtcacaggagctcttgcggatctgtttgctgctagtgtgacatacacagccattcgtcggaaaaaggactgagtggtctttgggtctcccgtaggtgatcatcatatgtcgtgataacccatgacaactccttgccacatgccacgggaggtccagcacccgaagaacccagcagccagggccggcttcatgggcttgcaacctggacagtcccacagggacacagaagagtccccactgtggtttaataatcttccatcaccatcttgaaattctttattttttaacaagggtggccagggatagtggctcatgcctgtaatcctagcactttgggaggccaaggcaggcagacggcttgagcccaaggagtttgagaccagcctgggccacatagaaagaccccatctctacagaaaatacaaaaattagccaagcgtgtagtcccagctacttggaggctgagatgggaaaattacctgagcccagggaggtcgaggctgtaggagctgagattgtaccactgcactccagccatgatgacacagcgggatcttgtctaaaaaaataactgcaagaccgggcacggtggcttatgcctgtaatcccagcactttggggggctgaggcaagcggatcacttgaggtcaggattttgagatcagccaggccaatgtggtgaaatcccatctctactaaaaatacaaaaattagctggacaaggtggtgcatgcctgtaatcccagctattcaggaagctgaggcaggagaatagcttcaacctgggaggaggaagttggagagagccgagatagcgccattgtactctggcctggggcacaagagtgaaagtccatctccagaaaaaaaaaaaaaaaaaaaaaacccacaacaacaacgaggtccccgcatgtggctgaaaacaacagaaatgtattgtctcgcaggcctggatgctagaagcccaaaatcaaggtgtcggccggacttcacttcctctgaaacatttaagagagaaacttccttgcctcttctcgcttctggtggccgctggcaatgcttggtgttccttgtagatgcatcgctccaatctctcctccctcatcacatggctgccttctccctgtgtctctgtcttcacctgacattctcctctattatttttttgagatggagtttccctctgtcacccaggctgaagtgcaatggcacaatcttggctcactgcaacctccgcctcctaggttccagtgattcttccacctcagcctactgagtagctgggattacaggcgcccgccaccacgcagtgctaattttgtgttgttagtagagatggagtttcaccatgttggccaggctggtctcaaactcctgacctcaagtgatccgcccacctcaccctcccaaagtgtgctgagattacaggcatgagccaccatgcccggccctcattctctccttttataaggacaccagtcgttgcatctgcctcctcaccagcagcccccaatccagcatgactcatcattacttgattacatctacaaataccctatttccaaataaggtcacattcctgggtacggaggattaagatttccaattttttccctgactcaattgtttttgagtcagggcctcaccctatcacccaggctggagtacagttatgtgattatagctcactgcagcctcaaactcctgggctcaagggatcccctgacgtcagccttccaagtggctgagactacaggcgcacaccaccatgcccaaataattatttttttttttttgtacagattaggtctcactctgttgaccaggctggtctcctgacctcaagttatcgtcttgccttggtctcccaaagcactgagattaaaggcgttatcccatgcctggccctctttctatacctcagtcattgtatcattagcctgagctgcccatattctttattctgcccatccctgaccaatctcctcctttaacataacttccacctcaatatcatggggcctactgggcactgcaaacagcctaaggaaagtggaaactttacttgaccttaaactattacaaagtccacattgaacgtaatttatatttgaactataaaattttctgtaagttgaaacacgacctataaaggtctctacaccctgaagcaacgttttagaaagaaatcaactggtccttttctgcagaaaccattaaccataggagagataaaggaaaaacttcaatgtactgattgaacttccatgcccatagcttaatttctaaaaggcaaccattccatactgttaaactgccttaggttgttattactgttattaaagagaccctcaaagccagaagttgaaccttgactgtagttcttgcacgtacacgcacactcttgcaactgaaaccactcagattgtcctaatgctgtttcccatagcaacaccacctggaattttacgtttggttttaagcatcagtcctaatcttcacttgcactcgaacacaccgcacctgtgagagccacgtgacattaaaaaaatcccttcagtgaggccgggcatggtggctcacgcctgtaatcccagccctttgggaggccaaggcagatggatcatgaggtcaagagatcgagaccatcctggccaacatggtgaaaccctgtctctactaaaaatacaaaaattagctgggcgtggtgacgcgtgcctgtagtcccagctactcgggaggttgaggcaggagaatcgcttgagcccgggaggcacaagttgcaggagccaagatcatgccgctgcactccagcctggcaacagagggagactgtctgaaacaaatcccttcagtgccttgatccttccagattcagatccaagatagatgacatttgtccctcatcagagcccgcacaccaagataaagatttcttctggctgggcgcggtggttcacgcctgtaatcccagcactttggaaggcagaggcgggcggatcacctgaggtcaggaatttgagaccagcctggccaacgtgttcaaaccctgtctccactaaaaatacaaaaatggcccggcatggtggctcacgcctgtaatcccagctactcgggaggctgaggcaggagaatcgcttgaacccgggaggtggaggttgcagtgagccgagatcgcgccattgcactccagcctgggcaaaaagagagcgaaactccgtctcaaaaaaatacaaaagaagaaaagatttcttctctgtgcatggctcagctctgtggtctgctagggtccttcctcaatccgcttccaatctatggaatcaggaaacactcaaccaacctagatttattaatattttagtataacataatacagtgttactttttatagcattgaccgtatatgtccttttgctccttggaggaaaggcaattaatagctattatgtgagttaataaaataagcccaggatttatgatcgtaactaacctgttcccgttggttttccttgtctcctgcaggcagagagctgatcaaaacagcaaaagcaaagcagtgcctctggcccagttctgaagccaaccttccttaaccacccagacccatccctggttaggacttgctgtggattctcaggtgactccatctcaggatacagggactgagagggtgtatgcaacatctcagacccagaaactgttgattctgtctaaaaacacagcaataaccacatcccaccctcttgatttaaatgaaagtgtttgggggaataaaagatgaaccttttttttttctttgtcagatcttgcgctcatttggttctggtggggaacaacagctgtgagagaacacgtgtattcaattagaattaattcccctctcttattctcacagctgagcagggctcaagtgcttctcatctgaaagaggtaataagatttaatctgtctcctcatctaccttctgcaagtatacttaacaaattagctcttgggactcttccaaatggagttttatgagggatttgctaaggtaaacgttttagactttgaacacagttcagatttcaggggcagtactgaaatctgaactgtgttgctaactgccctgcctttcaactcaagacacaataactttgaactaaaataattatatttttgttgttttccactctgaccccacgtctatatcaccaccacccccaatcccgccccccaggagctaactcctccttcctgtccctgcaagatcaaaactcctcctggaagccccgctagctctgtctgctcgccttcgtggcagatatcactattgtacttttatactcatttgtgtgataagtacttcaatgtccacttcttccacgagcccctgagcccctggagggcctggaccacacctagtttttctcactgttacatatcccttgccagacacatggtagacgcttaataagtatttggtgaacgaatggcttgtttggtgacagtccaaaggctaggggacagagggaaagctccctcctatcgggccccagacgggtggcgctgatggagaggaggctaggataaggcctccaggaccgaagcgcgcacccataaggcccctgccaaaaagaccttcctgaaggcggaggaactgtgagagtgcctacgttggcccaaggcctgacccgacgatcccggggaccctagccctaacggccccgcctcctgggccccaaacccggactcggccccgcccgaagctccggatcctggggcccgaccatggccccgagtcggcagaccgtggactcgctcctgggcctgcctcaaaccctccgcaggtaacgcctcccgaacttgagccacactccaatcccctcctcaaacccctccccgtttctcacaccttggacccctcgctccgtctcggcccagccccaagcccagctccctctccgcccctgagcccagccccgacccgcctcccagtctcttggtccctcccgacaccggcccctccctaagctccgcctcccagggcccgcctcctgagcgcagcccgcagcccggactcggccccgcctcccggaccctgggcccctccccacgtcggcccgtcctaagctccgcctcccagagtccgagcagcgcctggccacgtgctacgacatagccaacgccccgccctggccccgcctcctgagcgcttctcctggtctggtcttagccccgccccaagacctgtctcctggactctgctccgagtctcgcctcctgaacccaatcattgtttatccccaccctaacgcccgcctccgggaatcttatcctgcccccatgcaaggccccgcctccaggacgcctccaacctggacgcttccgaagccccacttccaggatcgccctgtcctggccccgccccaggacccaccaacctgaactctcccgaggacctgccccaacgacacttatcctggccctaccccaggcctcgccctcataatgctcatcctagccccaccccaagccccggcctcataactctcatcctggccccgccctagagccacccccacgactctacctccaggccccgccccctctctgccccggtgcactgccctgggcccgccccctcttcagtccaggcccggcttccgcccggtctcccggcaaggctgaggccccgcccccgtcatggcgcccgaggagaacgcggggagcgaactcttgctgcagagtttcaagcgccgcttcctggcagcgcgcgccctgcgctccttccgctggcaggtgggcggcggggctagcggagaggtccgcggggctcgcgggagtccaggggcagacgggatgggtctccgtgctgaagcccccggcgctcccgccacgtgagtgcctgggctctcgccggtcaggtccgcgcgacccggtccccgtccctggggcctggccagagtcgctcgcacccttcttgccccgcgggctggcggcgtaagctgggggcctctccaccgtcttgggaggcacacgcgcactcgttgtggggtacagttcacgatcattttcacgactttttaaagacagtaatccttctggtcactgggacacagctgccctcgcccattctaaaaagtcagcgccctcaggaccgcgggtaaccacgtcctactgagcgcggtgaccaggtcacaggctgtccctcgtgcctcagtgttctcatctgtatgtcgagcactgcacagaattagctcatgcgctgaggctttcacacctgtgatggaagagacagagaagggggtggcctytcctctccctggrgacctgccattctcagcacaggcscatggcaggcagcagcctcccttctgccagtagaggggcttaatgcaccyggccccatttgtaattcatgtgcggtgagctcactgggatgagtcagtttggatatatattcctccctgggtctgccccattttatgggtgttgcttaatcatttgggttattccattgacataaaatatttagcactcagagatcatttctggtcaggagaaatttgtgcatttttaacccaaaatagaaaccttcataaaagcatcataggtctccattcaatattgaytataattgttcacatgcccgcgctgcatgctaacttgggctcaccctcaacacccacgaggtgggtactattattatcactcacatttaaccagagggattgtttgattagggkgcagtagttgagagttcacacccagsagacagcctgcctgcttcgaatcctggcccaagccctggccctgtgtgaccttgggcaagtgactgcatctctctgtgctgttgttttcttattaataaaatgrgggatataatgatacctacctcttagggttgtcgtcagggttgagtacaaaagcctgtggatcagtgcctggctcatgataaatgcatgtcggtgttagctagtgtttttattcagtctcaaaatgtttaataaatgccttccgtgagccagccaccatggatcagcagtacccatgacagatgaggctctgcttgcatgggagagccagagaattaacaaataaatgaataaacaagaaaagaccagatgagagtggctttaaagccaataaaacagggaaatrgtgaatggagcaactgggragaagagtcaccaaagtcrgggaatcagggaagccttccccaaagaggtggcatttgaactggggcctgagtggtgaagcagccagccatgggaagggcttggggaacaggatatgcaaaggccttgtggtggaaacaagccagctgtggttgaggaacaacagcaaggcagccagtgtggctggagtggagtgagcagggtgggccagaggcgagggagaacaggccagagagagggattaggaccaggtcttgtagggtcttttatggcatggaaggagctctgaagcaatgaagtgccttgccctgtgtcacatatcagccgagacagtctggctaactctggagccaaagttcgctgctgggcttgaggtccctgtaagaggacaatgtaacccaggctggtatgggcacattctgcatttccacttaaactcagatggcaagcccatcaaactttggtgccatggctgccctggtaattcctggctgaccagtgcaaccagggagctggcccatgacgtgggtggccgctaagtagccaggactaatgtggccaagagtcagtcttctaaccttcttcctgtgactcatccaggtgcaccctgcgacatctgaaggtcaggctttcagctgctgtggcttccacttccaactggctccacatccccagggagagatcacacagccctttgccaactcattctattgcgtgtttaatgttcctgtgaatgcacccttgagatttctctctctcctctccacacagagcttagaagcaaagttaagagactcatcagattctgagctgctgcgggatattttgcagaaggtaagaattccagagtccctgggactcatgaccctgcctcctgaatctctccggaagacctgagagaagaagcacaggtgtgcttgtaccctttaaaaacacccctgttcaaggaacaaaaccattgagtcagcactgcaggtgggtgtcggcacctccaacagctccagctctttcattttctatmtaagacttagacaaagatatcagaatatacaaaattctgcatgagaggggggaatctagggaaagytttttaaaccccccacagcaaaaacagagatgacaggtgcaaaacagcttctaacatttggtagatgctcagagactttcttttttgcattcgtgaggcctgtcctgcccactcctgtctcttctagacctaaatgggcccttactttgcccagggtggggtttggactcaagagcatctgcatgtaggtgagaggcaggatcaccacccggcccagccacagcctgaccttggccttgagggccaagtgcagatcaccctgcatcctgggtcttcaccttcgaagagccatgagcccttctgaaaagacaaagcaatagactccctcccagaaagaagtgcaccagaagaatacattttccatacaaactctggaggcagacattgtccacccccacccacccagcccatcctaggagccccagtgaagaattcctgtgctagaggtgaaccaagattatccatgtggaaaagatgcagccacagcagggaagacttttggggcaatacagtaggtcagggcttcgagcatggagatacctgaagttgtcttgcaccctgctctgagtttcaccctgagcatcactctcgtaggtggtgaagcatgaaatgtaggaatagctgctttaaaacccagcacaaggctgggtgcactggctcacatctgtaatcccaggactttgggaagctgaggtggacagatcacctaaggtcaggagttcaagacgggcctggccaacatggcaaaaacacatctctactaaaaaaacaaaaattagctgggcgtggtggtgcacgcctatagtcccagctactcgggaggctgaggcaggagaatcgcttgaacccaggaggcagaggctgyggtgagccaagattgggccactgcactccagcctgggcaacagagcgagactctgtgtcagaaaaaatgaaaaaccagcaccagcctgaagagcctgtgtattgcgtggggtactttgctgcccttgggcagaatctgcatccctcccagccagcaggcactgcagactgtctcctccctctccctccaggctcctgttttcctaccatcccctgtcctgctgcactagtccctctgccctcctttccaagtgccaggctgtggccacctcagagcttgcaccagctgttgccactgcctggaacttgctcgtcctgcacttgacttctcttggctttagctggagtgtcaccctgagcgtcccctcccctccatcctgtccccagggacacacgctgaaagagagcagttgccgagtgggccttccctcctcttccatagagccagacagttggcgactgtctttactgcaaaygctggttcacactggctcccctgggagggaggtggtttgggcccacctgccctgtgttcctgctcagaatgggcattagaaatgctgccatagcctgtgccactgcagtggaagcatttttaggaaacggcttatagcttaagacaaacttcagatgcatggggccagaacgctgtgtccatctgcatctttgctgagggatccggtagcctggagtttgccctctgccatgttggcttgaggctcataggcgacttaagacgggctctcgagcaaccaatgttctgtcccttgcagtagactgtgaagcatcctgtgtgtgtgaagcacccgccgtcagtcaagtatgcccggtgctttctctcagaactcatcaaaaaggtcagttatgggcagtgtccgcccagtagcaggacagcatagccacctgcgtgctgcagacctcatccttcccaggccctgggcctgctttgcaaaccccagtatggcaggggcctccccaggcaactggctgcagccgcgtgtgacccatgggagacagtgcagggcgggaagaagggaaggccagcgtctctccctcactctgcctcctggggtttccrcagcagctgcttctctggggccccagctcctagcatatggattctcattcctaccaggctggyccagcccacagcactggaaccctcactcacaccctctgtcctgcccgccgaagggtttggagtttcctgctcttgtccatctctgggttgccccacgggcccctgttggaaggtttagctcttgccatacctttggaactacttccgctggtgaattctctgcattgatcctgctggaatgagctctttcctgactgatacaggatggattttattttttacttatttatttttttgagacagagtctcactgtgttgcccaggctggattaccatggcacagtcttggctccctgaaacctctgcctcctgggtcccagcaagtctcgtgcctagcctcctaagaagctgaaactataggcacatgccaccatgcctggctaatttttgtatttttagtagagacagagtttcaccatgttggccaggctggtctcaaactcctgacctcaggtgatccgcctgcctcggcctcccaatatgctgggattacaggcatgagccaccacacctggcctaggatggattttaaagatgggcccgaacatgcagggtttgacataaggatgtcgagaggccattcctcagtaggcagtagcagatcttctgtgtgaaagggccacacttttagcaaataaacaatcccctgcttctccaataccttctttctccctagtcctccccaaaagggtgcatctgtggtcaccagtaggtctgccctgtgccaccaggagagggcagcagtcacccagtgtaccctgctgctgccctgtgaatcttaggatggggccagccgtggagaagcagcctgctgacagccacagcctgcagcatgggccgccctcacagttctgcctgggctcacttaaaagcaccttttgttttcctcctctctgtcatggtcatgtggcagctctcacagaatccttgtctcctgccctagactacacccaaccctacactttcaacacctctctttgaaggccctcccatccaggtttccctaccaagtgaattttttttttagagacaaggtctcttgcccaggctgtccttgaactcctgggctcaagcagtcctcccatgtcagcctctagagtagctgggactattcggcacacaccaccacgcccaacgaagtgaatattttatatggcagctggccggtattacaccattctatcccatatctcccctccaaacttggtgaaaatcatctggccatttttacagattagaacgaaagcaaacaagctctcactctgtctgcccccagcacgaggctgtccacacagagcctttggatgagctgtacgaggtgctggyggagaccctgatggccaaggagtccacccagggccaccggagctatttgctggtatgagaaggacaccctcctccccctcacagcccagatacccttcccgcacagacaaagtgaaaacgtgggtgtgggttcaaatcctgactcacccagtctgcagtcttagacatgaggttcgtcaaccttctttagcctcagtttccctgtctgtaaatcaagcacttcaacaacaacagcatgtcttatagggttgtgaggcatttgtccaataggtgacacactctacctgcttcacaaggacctggtgcccagtcctcaaagaatagttgacaggtccgggtgtggtggctcacacctgtaatcccagcactttgggaggctgaggcgggtggatccgaggtcaggagttcaagaccagcctggccaatatggtgaaaccctgtctctactaaaaatacaaaaattaggccgggcgtggtggctcatgcctgtaatcccagcactttgggaggctgaggcgggtggatcacctgagatcaggagtttgagaccagcctggccaacatggtgaaactctgcctttactaaaaatacaaaaattagcttggtgtggtagtgggcgcctgtaatcccagctactcrggaggatgaggcaggagaatctcttgaacccaggaggtggaggttgtagtgagccaagatcrcgctattgcactcccacctgggcaacgagagtgaaactgtcaaaaagaagtagaaaaattagccagacatggtgacacatgcctgtagtcgcacctacttgggcagctgaggcaggagaattgcttgaacccaggaggcagaggttgcagtgagccaagattgtgccactgactccagcctggggaacagagctcaaaaaaaataagataaaacatagatacagaaaaccacaaaggaaaaacatagcatattgaatcatcacaaggcagccaccccttcatagccacacccggcccctggccacaactgacctgtgctccatcrccagaattccattgtctcaggaatgttcaatgaatggaatcctgtrtggcctgagatgagtgtctttcatgccacrtgacacccttgaggcctgtgcaagctgttggcatgtcaacagttagctgcttctcattgctgagtggcgatttgtcctgtcatggtttattcagccatgtggtggatggctgcttgtcttctaagccacttgccttctgatcgctggactgactctctcgccttctcttggtgctgccctcgggaggctcagtcacactctccaagagcacagccatcatctcccacggcatcacagtcctggtcacatgggatgccgccctctaccttgcagaatgggccatcgagaacccagcagccttcactgataggtgacctcagggcacagggcagggcaccgaggcaggcttaccctggtgcagtcgcagacatgaccccctttcctcccaccaggactgtcctagagcttggcagtggtgctggcctcacaggcctggccatctgcaagatgtgccacccccgggcatacatcttcagggactgtcacagctgggtcctctagcagctctgagggaatgtccttctcaatggcctctcattaggkgcagatatcactgccaacttagacagccccagggtgacagtggcccagctggactgggacgtcgcgacggtctgtcagctctctgccatccagccagatgttgtcattgcagcaggtaatgcccagccccgggcatcctgtgcaggcggtgtccttgcagctctaaccagctcttggctctgggaaaagggaacaatggatgctgttgggcatggacatgatggggcttccagaagagttactctggrcctccagggtgacatcaaaggacaggggtgcctcttaagctgaccttcaagccacagccctcttgktggagacaggcatactcccgttacagtcgtcaccacatggctctgtcccagagccatgcctgtgtgtttcagagaccacaggaggaaaacaaccacttctgggataaggacagggcccttgagagaaggtggtgtttggctgggccacggaaaacccctcacccctgccagcacgctcagtctcctctctggtcgaacagagctctgcctgtggtcctgggtcccagccctgaaaatcacaggtccagcrgtggccagggacacaggcccacccctgcaagccagcagacaaatccgcagacacctgaaacacgaagttcatcgcagggtcaggctttgtgtcattcacagccctctagataggccgagaaccagagcwcgttttttaaggaacaccagtgagtctggagatttttttcttttgcttcagtcttttgcagctttctctattaagggttctcctttttcacccaagtaattgcctttccatctaatggcccaaatgatcaaatggcatctactagtctcatatgaccgctgcctctctggcctcgcccttctgctgaggtcagcatgacmtggaactgtccgctggtccctttcagtaacctgaagctttcaccgtagacgtgctgtattgcccagaagccatcgtgtcgctggtcggggtcctgcggaggctggctgcctgccgggagcaccagcgggctcctcaattctacatggcccttaccgtctgcaacccagagatgtgccagctgttcaccaccgagctatgtgagcccccacgcccacccgggcctgcatggtccccaagctgtccctacaggactccagtggaagtgaaagaactgggggccggggaaaagctaggatgccccacactcccacaccatgcggggaactagggcagaggccggtgagaagggtgggctcgggtcgtggggggattgtggcaggaggagggcagctcagcacagggagggaggatytgagcccagcagccctactgtgtgcttcagagcagggttccctaagcccttgggcctcggtttcctcatctataaaatagaggtggcaggaggggcagtcggggtcaggtttggacacagctgtggcctgcaggacgctggagcacaggctgtacaggcggatccaccacgccactgtcctgagcacccagtcaatggaagatgagcagggtgactatagagaaggggaactggccccgtagtgggccagccactgtcctcagacctgacatttgtcagcccccgcacctgtgagagtgtgatatcattgtcccatctcaccgacaaagacactaggacacacagaggacaagcaacccccgagctcccacagactgctgcccggccacctggctcttgtgcctccactctacacccaagccccccattgccaccagcctttgccccagctccccctgagcacagcccctcctggcagccatgtgcacagatgtacccgcagcagcctctgcctgcacacagagacacggacaagccagtgcctgtccacgtggggcagcccgttaactacagagccaacaaacaagccaggacacgaagacatactgggttccacgacagagtcctgcacaacctcacacaggaggctggccgggcgcggggctcaggcctgtcatcccagcactttaggtggctaaggtaggaggactacttgaccccaggtgttcaagaccaacctgggccacatagtgggaccccatcttcacaaaacttacagaaactagccagatgtggttgcacacgcccgtagtcccagctacttgggaagctgaggtgggaggatggcttgagcccacgaggtggaggctgcagtgagccctgatctcaccactgcactccagcgtgggcaacagagcaagaccctgtctcaaaaaagcaaaaaagcaaaaaaaaaaaaaaaaaaaaaaaaaaaggaagtctttcttcagatacttacgtgaaaaaaaacctgccatatcttttaagtgaaaaaaacagtgccaagcagcacacatagtataagccccccaccaaccttttttttttttttgagacagagtctggccttgtattgcccaggctggagtgcagtggtgccatctcggcccactgcaacctcccacctcccaggttcaagctatcctctcatctcagcctcctgagtagctgggactacaggtgcgtgctaccacgcctggctaatttttgtattgtttctagagttgaggtttcgccatgttggccaggctgatcttgaactcctgacctcaagtgatctgctgcctcagcatcccaaagtgttaggaatacgggcgtgagctactgcacccagccccatttttgtttaaaaactaataataatcacccacacgtggttatgagtacctatattccaactactcaggaggctgaggtgggaggatggcttaagcccaggagtttgtggccaccttgagcaacatagcaagacttcatctcaaaaaaaaattatcacaataatcattttcacataagtatacctataggagaaaacctagaacatatatatagcaggcttgtccaacctgtggccctacacaaatctgtaaactttcttaaaacaatatgagatttttttgtgatttttttcttttagctcatcagctattgctagcattagtgtattttatgtgtggcccaaggcgattcttcttcttccaatgtggcgcatgtaggccaaaagattggacatcgttgatatacacgttaacaggtgccatccttggatggcaggattatagagattgctacatgttcatgtctatactacttcatttttataaatacgcattttccactcgtaacaaaaaaccgtgattgaaaatcatcccgggtcacagtgtctcatgcctgtaatcccaacactgtaagaggctgaggctttgggaagctgaggtgagcagatcacctgaggtcaagagttcaagaccagcctggccaacacggtgaaaccccatctctactaaacacccaaaaattagccaggcgtggtggtgcacgcctataatcccagctactcaggaggctgaggcaggagaatcacttgaacctgggaggcgttgcagtgagctgagattgcgccactgcactccagctggggaacagagtaaaactccatctaaaaaataataataaaagaggctaaggcaggagcatcacttgaggccatgcgttcaggaccccatctctacaaaataaaaaaattactggcatggtggcatgcacctgtcatcccagctactcaggaagtgggaggattgctagagcccaggagtcgaggctgtggtgagcaatgactgtgccactgcactccagcctgggtgaaagaacaagatcgtagctcaaaaaaaaaaaaaaaagaatcattctggataatggctcttcagacatctgtgcttataagaacaccagccccttctaagctctgtgtgtgtgtgtgtgtgtgtgtgtgtgtgtgtgtgtgtgtgtgtgtgtgtgttttgagatagagtctcactctgtcactcaggctggagtgcagtggcacaatctcggctcactgcaacctccgcctcctgggttcaagcaattctcctgcctcagcctcccaagtagctgggattacaggcacccgccatcgtgcctggctaatttttgtatttttgtagagatggagttccaccacgttggccaggctggtctcgaacacctgacctcaagtgatccgccggcgttggcctcccaaagtgttgggattacaggcatgagccactgtgcccggccactttctaagctttgtgaagagtggactgactaagcagccaggtagatgtgggttcagatctctgcttctgtcctgctgtgccaagtgctggggcagacacaggcagagagtggacagcagcatggtgcctgctgctagccatttctatgcaaaaccagatttctggtcccatcctggaggccaattctaggtacctgggtgggcctgggaacctgtgaacaaagtatactgacttagacaccccccaccccgccaggcctgtcctagcagccccacacaatacgctcatgtcctgtccccaaacaccgccatcctcaaacacgtgctctgtttccaggctggactgggatcagatgggaagcggaagctcatcatgaccagaaactgtttccctacagagagcacttggagatggcaaagctgaacctcacactgtaggactcacacatgactccaacgggattgtgagaattaagtcactctcgtgggaagaatttttatatgggaaagcggataaaactttcattggactggaatgtttggagaatgttaaattccaaatcaggaaccacaaactgcgctctaataagacatcggctatctaagcatgtgggttccccctttctgccagcagttctggttcttaagaaaatcaccataaatcagacatgaaaattctggctccaaaaatagcattttcattgtgcaaataaaaacgtgtgtatcaagtatgacattcccccaacgtggacacacttggttcctcacaaagccaagcccgctgcagctgccacatccctggacacactcgtttcctcacaaagccaagcccgctgcagctgccacatccctggacacactcggttcctcacaaagccaagcccgctgcagctgccacatccctggacacactcgtttcctcacaaagccaagcccgctgcagctgccacatccctggacacactcgtttcctcacaaagccaagcccgctgcagctgccacatccctggacacactyggttcytcamaaagccaagccgrctgcagctgccacatccctgggtttaygatgcagcaggtgcttttttcaagacaggaatcaaagtgttaggaacatggcagaaaggtgacacctggagaccaaatgcagggtaaggagtactgcagaggtcacagggaagtcacagaacagtaatacgctagcaggggcatggggcgtgaagaacagaagacaggaagcgtttcagagactccaaagaagaaatcagggccaaccacagcttcccgagtcattcaccaggtggcaccactgccttcatttcagcttccggccactgggaggcgctgctcgaaagggtttgccctgagacaccaagaagaagctgcgggaaggacagcaggggccctggggttttagcctctggcccaggagttatgtgtccataaccaaagggagcacagtctgcacccagctctcatcccatcagagctgctgcgactcccgcaggttcttccagaactggtttagcttgcctgcaggatcaggaaagtttgagaaaagcatctgcaaaatactaaagagcagagcttacttcattgyctgtccccaccccatcccaggtcaccacctggctgaacccaggtccccgacccaamaacaacccctcccaagtccctaactccctcacttggacttgagacccttcacaacccagcagcgctccgcctccaacttgacatcatgctttctggaaacttccccgtgtgtcccactttcccacacttggtgcgctggagcaccttccggcctctacatgctgtacgttcccctgtgagcaccctcctctcagcctctggccaacacagtcccacccatctgtgggtaacaagggggtgtgggtgttctttkcagccttgctaaactgtctgaatcaaggatcacaaactacagcctgcaggccaaatccagcccacagcctgtgtttgtaaataaagctttattggaacaaagccacaccccttaatctacagatgatctgtggctactctcacaccacaacagagtaccatggttctgacagagactggggaacccagtctaaatgacttctgacctggacctttactgaaaatcctcccaatcattctgttgacaagaatgatgtattactttttgcaataagaaacaagtaacctttgcagaattccacccatctttcaaggctggtcccagaagttccctttgcccacgcacctacctgatcctgatcacttcctaaactgcagcctggcccacccggctccagcatcatttgtggagtgtcagctccataaatccagagggcaggtggggttgtgtcctaactttcccgagcctactgtactgaaatgggacagcagagtaggccagcctctgtgacttctgctccctcactagcttttccaccagaccccccatggtacaaccctggctgtgggaagcagggatcagggattgtggctcggtgccagtctccagaaccctgcccaccctggcgtggtggcagacatggctacctgcagctgagctgccagttcctctgagtcctcaaagaccaggccattttcttcatgtttcaccagctcatgtaagctgcagagagaaccaagggagcctgagagctgcctggagaagacaccagacccctggggtgtccagcttgtctcccacccacccacgctcaagccaggctgggggttggaacaggatgtgtggtttctgggagctggttcttagatttggcatctgaagggtataaaggcctgggggtgcacatcaaaatggccaaaccgatttgaggagggagccttaaggaaggtttgtaccttctgtgctggatgctcttcaagtactgaagaattatttttgcatgtttttcttaattccatggccatggaacaagtaaacgcaaccccctggggactggttcagcacataaaagatgacttttctaggacaccagatttgatcccgacattccctgagctcagctcacacgaggggctcgcacccctgaatcccatccaggagccggctcctgagcaggggccaagggctcaacttgtgctggggctactgcttctagaatctcctctaacgccacccttccaaacacccgtctatgctgggtggagtgaggccacagcatgacattcatttaactgattcaaacccaccatgtgagcttggccaaaaaggacatggtgggagagaaaaacaaagaaaaccatgtaagcctgcaggcaattccctccaattctactctaggagcaaaagccctgagtggagttctagtatttaaggtgctttcttttttcacattaggctggtgcaaaagttattgcatttttaatggcaaaaaccgtgattacttttgtaccaacctaaatataacatgagctctaaatggaagcgactacttcagtgagtctcagcccagccacagtaaccgcagggctcctcctcatggcctccagtgtgtgctggactgaccgaggggcagggcctcactgtgggcagctcactctacactgcttccccctcagcggtggatctgtgaagctatccccagaaagattcgggttctgctcctaccacttgaagttcacagcacacgcaggcaaacagctcctgaacatgtccaccaccttcatgggcaggtccaggccactggaggatgtgtccagacagacacccaggtccaccgaccctgctaggcaagaggggtgggttagagcgctggtctctgccctgggaacaaaaatcctcccagcagagtgagacaacatcccccaaggggagtgaaaattggataaggcccccgacatccccaagcacaagtggcttaagctggccacgcagccacacggcctggctgggacatctgaaaatgtaagttgacacattttctacataaccacaatttgttttttgttgtcgttgttttgttttgttttgttttgttttgttttgttttgttttgagacagagtctcactctgtcacccaggctggagtgcagtggcacaatctcagctccctgcaacctccacctcccaggtttacctcctgtctgtaatcccagcattttgggaggccaaggcgggtggatcacctgaggtcaggagttcaagaccagcctggccaacatggtgaaaccgcatctctactaaaaaaaaatacaaaattagcgaagcgtcatggcaggtgcctgtaatcccagctactcaagaggctgaggcaggaaaatcgcttgaacctgggaaggcagaggatgcagtgagccaagatcgcgccattgcactccagcctgggctacaagagcgaaactccgtctcaaaataataataataataataataaaccacatcacacccaccacaaaccagctgtcagtgtgaaaataaagccaaatagcttaacatttctaaagactagctggggccaggcatgatgggtcaggcctggaatcccagcacttagggaggccaaggcgagaggatcacttgaggtcaggagttcaagaccagcctggccaacatggtgaaaccctgtctctactaaaaatacaaaaataagccaggtgttgtggcgggctcccataatcctgtaatctacttgggaggctgaggtgggagaatcgcttgaacccaggaggcggaggttgcatgaactgagatcgtgcactccagcctaggcaacggagcaagactgtctaaaagacagtcttgtcttttagctggagaatcctgccaggaaaagaccctcagccgccaagtgctctgctcactcgaagctggaagatgcggctctagagacgcatcaggaccaagccacgactcccaacttggagaaatcaacggggaaagagacggagacaaagaagaaccatctcactgggagaggcgatgctgtttgacacatcgtccctgtacctcccaaagccactgtcctcccacacctgggcaacagtggcctcaaccccaggcccagccctcctgcaggaaggaagaggactgaatggagggcgtggcaggatgaaaggacgtggcctcctcaaacccattggtaaagggcctctggggccacctggctaagaggggctggcagaccaggaagtggcctcctcccgggagttgagccagagcccaggtcctgtccccaagtggcctccagagccaccttttcagaaaaagtacatcctgcccacccctgctccccctgcttaaggccccacctcctccctgagcctcctgctggcctctcacctagaagcgggggtagtcctcggccctccagccaaggggtgcagacctggatgtgctggaaatgcttctggtggatgaggcgactgtaatactccctcagaggccctttgccttcacagagaagagcacacactgccatggacccgtctctgtccctgccacatgaccccaggctcaagacactcccccctaggagggatccttttcccagaagctccaccccttggcagctccagtcaggccccatctgactgggaggggaacaacacacactggagcctgtctgggggtgagtggggagggagtgcatcaggataaatagctaatgcatgtgggctgaatacctaggtgatgggttgataggtacagcaaaccaccatggcacacatttacctatgtaacaaacctgcacatcctgcacatgtatcccagaacttaaaatgaaataaaataaaattttaaaaaactttattttgtctaaaattccaaaatgcagggattacaggcgtaagccaccgtgcctggccctgttttaacatatctgaacaagatttaagacatcagtttgaaaagagcccctctatggcagcaacatgaattctgtcaaacctgaagcaagaacaaacatcaaatttacggtgaagctggggtacaaaaaatggtgaaataaattattctttatgaaaagtgtacgggaaaaataacctgaagaatcagtcatttacaaatggataccttattctaagaagagataatacaatgttgaagatgaagtcaacagaggagggacatccataccaatttttgagaaaaaaaatcgtttctatgccctaattgaggaggattgacaattagcaagagatactatagccaacaccacaggcatctcaattggttcagcttacacaatactgactataacgtgaaagttgagaaattttacatttgatgagtcccaaatacccttgtgcctagatcagcagtggacaaaagcagagctattagtaactattttgagcaagcggaatcagatcctgaagcattattttgaagaattataacagggagtgaaactggctttatcaataagatcctgaagacaaagcacaattcaagcaatggctaccaagaggtagaagtggtccagtcaaagcaaaagcaaacttctcaaaagcaaaagccatggaggttttggggatgctcaaggcattttgctggttgactttctgtaagatcaaagcaccataacatctgcttactaggagagttcttagagaaaattagcaaatacttttgcagaaaagcgccctgtaaagcttcactagagagtccctctgcaccacaacaacacttctgttccttcctctcatcaaacatgggtaattttgcaagagttttcatgggaaattattaggcatcaacattacagtcctgatttggtttcttctgacattttttccctaatcttaaaataactgtaaagggcacccatttttctttagttaataatagaagactgcattgacacggttaaattcccattaccctcagttctttagcaatggaatgaatggctgggatcatcgcttaatggagtgtctggacctcagtagagcttaaattgagaaataaagtttatatttatatttttattgttaattccatttttcactgacatttttaaatcccatcacaattcacgtttgtctcaaaggtatttaaatttagaaatcatatcaagtgtgaaataaagaaaattgtatatagagagagagaacagaatctataaatatgcatgtttgtgtacatacatccatatacatacatatgtgtgtgcatgcagtaattttattctcctaaagcaatgcctctgccttccaccctcactgcacatgtcctagtcctgtgatgtccctggaactgagcacctgatttccttctctgcctcccacatgaacagggaatagaaatggaaaccacgctctgtggttgctgttgtgaaaatccatgttccccacaggctgagtttggcatcttacattctagttcccattgtaaaaaagcaagcaacaaacaaaaactacaaaagaaaaaatgaaatagttgaaagtctagagccacagaggttccagatccacccaccgccaacggtgacctccacagccctccaggcctgagggcagttatgcctgaacagcctgcctcttcaccatccacgcaggaaagtgactttaaacttcaatagctattactctgttccacaaggaaccaggtcaacattcaaagtcggtggtctgacaactctaagctttggccggaaagtgttggaaacatttaacgtgcagtggatgaagcagcccggccccactgcacacaacacactcacagggactcaaaggaagagactcaggatccgctgggtggaagtgaggacagacccagaaacacagggggtgggagggggtcaaaccaggaaggctcaggacctgacctcctcctaggccctgcccctctagaactcacagttttttctgacccagaagtggatttcactgatggaaaagaagttcagtatttctggtccagcccagtaagctgctcccattgcccagccttccacacccctgcagacgtcacaatccctgaacccactaacctgacaagggagctatgcatcacctggagacagtcctaggcctgcactcctg

SEQ ID NO: 97188 - DNA, 111786 bp, Homo sapiens
  misc_feature (1)...(111786): n = A,T,C or G
tggccaagatggtctctatctcctgacctcattacctgcctgcctcggcctcccaaagtgctgggattacaggcgtgagccactgcgcttggccattattattattttttgagacagtgtctcactctgttgcccaggctggagtgcagcagcccaatctcagctcactgcaacctctgcttcccagattcaagcaatcctcccacctcagcctcatgagtagctgggactataggtgctcaccaccatgcctgcctaatttattttttgtaaaggcagggtttgccatgttggccaggctggtcttgggctcccgagctcaagcgatctgcccactttagcctccccaaatgctgggattacaggcgtgagccaacgtgccgggcctaagttttaatttttttaaagatgaggtctcattatgttgtccaggctggtctccaactcctaggctcaagcaatcctcctgcctaggcctcctcaagtgctgggattacaggcgtgagccactgtgcacagccaagtcaacttttagagatcggtgaaaaatcagctcaactaaggttccagaaaactagctttaaagactgtacacctgtatccctggcaaagtgcttcggagtactgtaatcacacacagtcaggatgtctcaattcttttcccattttacctctctttaggtgttatattttagttttccatagctaaaataggaaaattctcccaggaatatagttaaaataatgtctatgaaacaatctgagagttttagaatatgtggagtcaatgtcctctttaatgaggctgctggaagaatttttgtctcaattagcctacctgtctttcaaatacagttgatcatctggtctttggatcaataggtttacttgaccatatgtgaccacattacagtgctgtttgcattcccaaggtttctaagtcacaaagaatacttctcttccagtggacatcagctggcaggacaaatccagccctacttagagataaggtaaaaagccaattatagcctgggcgcagtggctcacgcctgtaatccccccagcactttaggaggctgagacaggcagatcacatgaggtcaggtgttcgagaccagcctggccaacatggtgaaagcctgtctctactaaaaatacaaaaattagccaggtacggtgatgcatgcctgtaatcccagctgctcgtgaggctgaggcaggagaatagcttgaacccaggagatggaggttgcagtgagccgagatcctgccactgcactccagcccaggcaacaagaacaaaactccttcaaaaaaaagccagttacacagggcagaaccactttgtgatgtagattttattggctatctaggcagaggaaaaattggacaataataggaaaggaatgaaatctcctgggctggcccagcacctgctactggtggatgagaaatcagactttgtgcaaagggtgacttggccaggaagaacaggaagttagtcagtatcatagtcagttattcaaggagaggaagaaaacagggaatgggggtgaagaacgaaatactcgagttatataaactttggtactgtcccaggaaaagaatctctcttttcccctaagtcttagaaaggggaagaacagatgctgtagtccaagaattgcacaaaagtcagcaccattatggcctctagttgcccccattagcccaataatattcctctgctagaacatccctgtctgacccctgataagaaagcagagggaggtgagtggtgaagctgccccagattctgtgctccaggtggagaaggcctcaagaaggtgaagggatgagctaatctgagcctcatggccccatttccaaggatgtgattagtggagagtcacctgggacctgctccatttcaggaaacccggttatgggaactggtatgggacagactttgctcaggacccgagagaagcagttaaccctttcctactgtctggatgggaaacagcttaatagttgcttggttctttcccaggggagggagtcttcaaatggacttccttttgcatcagcttggaaaggcggacctcaaggatattttctacttaagttcctagggtcagcctctttagggcatttgaaagctctaggggagcctaagaaacaaggtggggccttaagaagtgtctaggagacacagagagggcacattcaaaaggaaagctcaacagtccctaaaatgtcattgttcatctggcagcactccctaggatgttctggttccactcaaacccttgagtttgggtcagaatcagtcttgggctcttcttataggggggcagggagtgtgtctcagacagagggtttctttttggaataaacaagatatccaaagtagacatgtgatatggtttggctgtgtgaccatccaaatctcatcttgaagtgtagttcccataatccccatgtgtcatgggagggaccaggcggagataattcaatcatgggggcagtttccctcatcctgttcttctgatagtgaattagttctcaagagatctgatggttttataaggggcttcccccttcactgggcactcattcttccccttcctgctgccatgtgaagaagtatctgtttacttccccttctgccatgattctaagtttcctgaggcctccctagccatgatgaacaatgagtcaattaaaactctttcctttataaattacccagtgtcgggtatgtcttcatgagaatgaactaatacaacatgaaacagtaatataaattctgaggtgggtgcagaaatggaagcagaatcaatatgtcacccagtctaaggactggaaataactggctccctacagacactgccaataaatgagacctggaaggccagggctgaaaatatcgagagccatactcaaagcctccttggttggcctagttaactaaggtgaccttaaccaagggcaggtcatttagtttctttgggcttcaaatttcttcatcttaatagataactgataatttccaaagtcccttctggctctaacattctagtgttctgaggatgaggtctgagcaaaaaaccgtttttaaaattttaattttttttttgagacagggtcttgctctgtcactaagctggagtgcagtggcataatcatagctcactgcaacctccaactcgaggggctcgagatcctcccacctcaacctcccaagtagttaggactgtaggcatgcatcactgtacctggctaatttttaaatttttttgtagagacaggctgtcactataatgcccaggttggtctcaaactcctggcctgaaacaatcctcctgccttggcctcccaaagtgctggaattacaagcatgagccaccatgcctgatttattcatacaacttcttcttggattctcatttttatcatttctaaaacaaagataacatctttcttacaagattacaaaattgggagaactgcttaagatgaataagaaaaagtgaagagcacttagcacagagtggattctcaccatatatcaagcctatattgcatgctgcctgaatacgtgggtttacgctacggaagtcctgatggcaaaccctcatatcgaaggcttccctccttgcttctccctatgtccagtagggaggacagctgtgtccctggctacctttgagaggcctccactgcctctagggtggtattgggtgctccattacacctttatccctgaagttcattccaaggacaagggctgaaagctagaggctcatttccaaggacaagggctggaagctaggaaaccaactcatcttcattctcaatgccattctcaaggtggagcattttctgctgggccaacactcacaatgataatttttttttttttttagacagagtctcactctgtcagccgggctagagtgcagtggtgtgatgtcagctcactgcaacctccacctcccgggttcaagcaattctcctgcctcagcctcccaggtagctgggactacaggcacatgccaacacgcctggctaatttttgtatttttagtagaggtggggtttcaccatgttggctgggctggtctcgaactcctgacctcaaatgatccacccacctgggcctcccaaagtgttgggattacaggcgtgagccactgcgcccggccacgatgggaaatattttaaagaaccatcctcaataccttggtttctcacccataaaatagtgacgataacaattttcttacaagatagttgagaggatgacatcatttatgtaaagagctagtggggtccgacaacaagcagtcattcaatgttactggtcccttccccttggcaactcctcttctgaaaaaggacaagagactgggggtggggatggggagctctgcggggggtgtggggggaatgaaaggaagactccaatgattcctcaaatgccagctgtttatcaagtttgatggttacgatggattttccagaaataaaagctaccttgctccaataggtctacctgtgagcaactgagatggggaggaatggggaggagcgctgagcatagactcgagaagggtatgattcaggtctcgatagacaatgttctttggagtagcaccaaggttgtgtactgggcaggcactctgccagctcgccagcctgttctgtccaatcctggcgtcttggagctggggtggaagaatttttcctgaaggaaagcagccaacaccctgtcccacccttctccttgggcaactctttgccaggcaggaatctctcatcagggttttcttttggctgtcagatcaccagcagttataggcttaagcccctgtcaccatgcccctcccggaacctggcagagagcagcagctgggactctgcaggacctccttattccagccaggaatgcacttggaaaaccccagagcttctcctgtcagccagagcccagaaaagccagctcctggtcttggcacattcagtgcagtcaaacgtggaaaggggcctggatagggaggggtcgactcccaggtcccacctttgcgggggaagctggtccccctggattaggctgggagatgcttggggctggttgtaaggtaaaagacggggggtcgttttttctttttttgagacagagtttcgctctttttgcccaggttggagtgcaatgacgcgatctcggctcactgcaacctccgcctcccaggttcaagcaattatcctgcctcagcctcccgagtagctgggattacaggcgcccgccaccacgcccggctaatttttgtattttcagtagagacggggtttcaccatgttggccaggctggtctcgaactcctgacctcaggtgatccactcgcttcggcctccaaaagtgctgggatgacgggcgtgagccactgcgcccggcccagggcgtcgtttttaatttcagattagtaattttttagtatatgtcccaaaaattgccgagatatgtgtatggttataaaaaaaattcgctgtctatatgaaattcaattttaattggccgtctttttctttgctaagtctgggacccagggcttggcctggggcagcccccgccgcagacaaggctgttggaggggtcacgaacccgcttggtagccccgcgccgttaccgtcgcccctcccggccgagggaagggtcctggaaagcgcgaagggcggccaaagcccggattagggccaagggccgcatctcgccgccaccgtgggaaactatctttgagaggagggaggagtcgtggcctggcctcattcccgctcacctccagccttggccgcctctcgcgggctcttccccgccccgaacctcccacctgcgggcccactggcacccgcggcgctcagaggctctaggtggctcccggcggcggttcgcggtctcggggccctgcagcgtcgagtgcgcaggcgcggcgggcaggtgggcggggcgtgcgcgggcgcaggcgcgcgcgcgggaagggatgggctcgcgctgccgggcgtgggcgtggactcgggcgtgggcactggcggagttccaagcccgggctgaggagggggcggcggcggcggcggcggcggcggcgggcgggtacccttcgactgggcgttgccgctgttccctgcgcggcatggaggggacggccgtggccgtgttcgaggtgatgctgggaagggagagaaagcggaggacactttctgaggagacgggctttgtgaggagaccgcgaagtttgggcagaggggtcgggcgtcgcctaaggtgaaggaggaaggttcgggaatcgaggcccgtctcccacggggaagcgaggaagtaggagcagatgagggctctcgctcgcggggtactctgtgggggaacgacgccctctctccagcctacggctcagaaagctgcggcgtttgccgagcaccggcggacacccaggggcagagcctgacgcagcctcggaggtgcctgccggagcccagmgccttccatgcaccgggtgctgggagggggcgcggaaagaaggaaaggaatggggcaagccctggcgttgcggggcggggkggggggagtcggggcgccaggacagaggcaaggagggacccagtgcagactgggagcgagggagagtttttttaggccccggtgcaggtgcaggtttctgggttcgaagcagctggacgtggaagggcgaggttcagaggccacacctgtgctcggggagctgctctggaagacggcactgagcgcctggcgccggccacgccccgtgtgctcatttcattacccactttcacggccggtgcccaatgggacgttgagctgctgtttgtgaggggtactgggcaggtgacagaagcacaggctctgagggcacctgagagagtacccccgggcgtcctgcctgtttgttgtcatcaaagaaggcggcgggattccattttacaaataaccgaacctaggctagaacccagggcgctgactcataggccagtgttcttttcccaactgcgctgtcataccgacatgagaatatctttagggtttgtttgtttgtttgtttgtttgttttttgagacggagtctcgctctttcgcccaggctggagtgcagtggcgtgatcccggctcaccgcagtctccgcctctcgggttcaagggattctcctgtctcagcctcccgagtagctgggattacaggcgcacgccgctacacctggctcatttttgtatttgtagtagagacaggttttcaccatgttggccaggctggtcttgaacttctgacctcaagtgatctgcccgcctccgcctcccaaagtgctgggaccggcgtgagccaccgtgcccggcccgatatgggaatatcgtaacagaggacgtgtgaaggaatagttagactctacacgtacctggaaaccattcttgttaactggtacaaatgaggatcttagttcccagatctccctgcctttaaaaagggggtaataattttccttgtgttgcctccctgtaaaagtgagaatctgtttgcatgaataataatgggagttggccgggcgcggtgggtagcctgtattctcagcactttgggagaccgaggcgggcagatcacttgagatcaggagttcaagaccagcctggctaacatgaggaaactccgtctctgaaaaaaatacaaaaattagcggtggctcacgcctgtaatcccagcactttgggaggccgaggcaggcggatcacctgaggtcgggagttcaagaccagcctgatcaaaatggagaaactccgtcactactaaaaatacaaaattagccaggtgtggtggcacatgcctgtaatcctagctacttgtggggctgaggcaggagaatcgcttgaacccagggggcggaggttgcagtgagctgaggtcgcaccattgcactccagcctgggctacaagagcaaaactccatctcaaaaaaaaaaaattagcagggtgtggtggcaggcggctgcacttccagctacctgggaggctgaggtgggaggatcacctgagcccgggaggttgaggctgcagtgaaccatgatgatgccatcactgcactccagcctgggagtcagagtgagactctgtcccctctctccccccaaaaataaatgaaatatattttattttcaatttgtctcgaataaatgtgtttttttttttctttttgaaacggagtgttgctgttgcccaggctggagcgcagtgacccaatcttggctcactgtggcctccacctcccgagttcaagcaattctcctgcctcagcctcctaagtagctggggctacaggcacacaccaccacacccggctaatttttgtatttttagtagagatggggtttcaccatattggccaggctgatcttgaactcctgacctcaggtgatccaccgcctcaacctcccgaagtgctgggattacaggtgtgagctaccacacccggtcgattaaatgttttacccagacatcttggagtcctgttcaacttaaaatattgtgtgtagtctttactgcattagaacttagaaataatagctaatatctgttaagcatttgctatttgccaagtactgtgttaagcatttkgcacatatttttatttaatttttttttttttttagtagagatggggcctcactatgtttccagggctcaagcgattctcccaccttggcctcccaaagtgctgggattacaggcatgagccactgcgctcagcgttgcacgtaccttatttgtttactttcagcagcagccctatgtggtagttttatccccattttaatagatgaggagtctgtggtttggagagattaagtaatttgcccaaggtcacatgctagaatttggcacatcagggattcaaatccaggtgtggagtgcagtggcctgatcagggctcacttcagcctcaatcttatgggctcaagagatcatcctgcctcagcctccccagtggctgagactacaggcacacgccaccacgctgggctaatttttgttgttgttagtagagataaggtctgcgtatgttgtccaggctgatctcaaactgttgagctcaagtgatcctctcacctcggcctcccaaagtgctgggattgcaggcataagctaccgcgcagggcagcattagcactcttaaatagtattctgaccctcaaaagtgttgatttaatgaaagatcaagatgattcataaccagatgccactcttattcatagtcttcatgttggcttttatttggggcaggaaaaaagaaacaagaaaaacaaactcccacttaatttttccctaattattatttccagatgaatttatcttctgaataaaggaatttattgtctcaatttcctgtcttactgggcattatgttgaatttcactgactcttttcttatgtcactctcctagctatttattttgtttagacacaatactctgaacaaacctaaatctgacattttagaagcaagaatacaatttttggggggaaattagagttactaatttaactgggtcatagagatgtattattactgtgatttctaaagaagattatgttttctttgaattgtgctcttttcagattttgagatttttaataattcactggaagtgtgacatagatgtatcaaagggagcattgctagaagggcagctagtgatttccatagaaggattaaattctaagcaccaggcaaatgctcttcattgtgtaacaactagtaagtagagaaagaaaaaatattttctatctcttttgtcatggtttatgtcgtagcttayttaaaaatttcaattagaatcttttatcatgttattccaggattgttccataattataaaatgaaatgattatgtaataagtgtctggtggtagatttacaaatgtatcatacaggaaaggtgagtagttgaatgactcttaccatagattatttattttactggtttaagttaaaattgctcagaaacaatcttatttttctcttgattttaatctactttgtcacagctaaattatattacmttgagctttacctactttttttttcccaagtctaaattttggcagtagcaaaaaaaaaaaaaaaaarggaaaaatgatgaatggtgcatactgtgattagttkgaaaatatctcttccatttggctttcatgcttttatcatttttgcctgttgtctttgagggaaacctgatgcagtgagtggctctgaagcatgaattttcttaaacttgaagtgttagctttttgtgtgtgtgtgtgtggtgtgtgtgtgtgtaggtttattgaagggtactttggattgaagttgccccttcaggcttagagaagtcacttgggcaccaagttgagattggatagtgaactaggctttacaagacatttgcttacctgaacaggaatgacctgtcttgtctttgtgtattaatattaaacatcttcaagagcagtatgacaggttggtttgctcttactctgcatgaactgcactctgactggcagggttcccaccactcttgagagaaatgcttggctacgtgtctagggtgatggttggtctgtgtgtggttgtaatagtctaatccaataaactctggccagggtagcaaggttgatttaattcaaagcaaaggactttagccacagtagtttttggcaagaaactcgattctgcattttgagcctgatgaacttctttagcccacctagaatagggggcatttctcttctctttattgtctctgagctttaagtaattatggttataattatttatttatttatttaggagatgggagtctcacttctgtcgtcccaggcttggagtgggcgccaatctggggctgcactggcatacctcgtgcctctctggggttcaaagcaatgtctgccctcaagccttccctgaggtagcctggagatataccaggctacgcttgcccaccaatgccctggccttaattctttgttgttgtggtggtggtaattttctaaataagagaattggaggttttcaacaatattggtccaggctggttctcaaattcctgacctccaatgaatattgaaccaccctgcttctgccttcccaaaggctgggattacaaacgtgagctaccgcacccagcctatgtttatatattttttttgggtaggaaacgtggtgatacatgcttgataaaaaacattacagaaacatatattgtggagagtgagactttctacacatctcacgcctttgagatgattattaacattgagtatatattctagattttcctttttccccctacttgccaaggataatctgtcttctagatttttctatgcctacgttcttagttatcaatatccattttttagaactagaactatactatacatatgactgtgctatgtaccagtactttgtgggcagcatttcatgttagcataagggatctatttcattttttttgtaaaaaaatgtacacttatttagttttagtttttgtcagttacacacacatatggttttggctgggtgtagtggctcatgcctgtaacaccagcactttgggagtctgaggtgggcagatcacatgaggtcaggggttcgagatcagctgtccaaaatggagaaaccctgtctctactaaaaatataaaaattagcgggttgtggtggcacacacctgtaatcccagctactcgggaggctgaggcatgagaatcacttgaacctgggaggacagaggttgcagtgagccaagatcgcaccactgcactccagcctgggtgacagagtgagactccatctcaaaacaaacaaacaaaaaacccgacagtaccctgcgtgcttcccccatctctcccttcccatctttctccctcctagaggctaatacttttaactctgttaattgattatttaatatttatctttgatctaagtaacatgtttgtgttgttgtatcttttttttttcccccaaatatggtctcactctgtcacccaggctggagtgcagtggcacaatcatagctcactgtaaccttaaatgcctgggctcaaatgatcctcccacctcagcctcctgagtagctaggactacaggcatgtgctaccatgcctgactaatttttgttttgttttgtttttgttttttgaggcagagtctcactctgtcaccaggttggagtgcagtggcgccaggatctcggctggctgcaacctctgcctcccagattcaagcgattctcctttctcagcctcccaagtagctaggaccacaggtgtgcaccaccacgcccagctaatttttgtatttttagtagagaccaggtttcactacgttggccaggatggtctcgatctcttgacctcgtgatccacccacctcagcctcccaaagtgttgggattataggcgtgagccaccgtgcctggctgactaatttttttttttttttttttatagagatgaggtctccctatgttgcccaggctggtcttgaagtcctggactcaagcgatccacctgcctcagcctcccaaactgctcgaattataagcatgagccattgtgctcagccctaaattgttatatcttaattttcctttttataggcatttattgattttccaccatagaggatgatggctctctttaatatcttcacctctaccatgtgtctttcttttaatatagttataattttccaaccacgtagatcaatatttactcatcatgaccataaaatgcagtttagccatatagaaaactatgattacttttctttataatttcccttcasttaatacttattttattttctgtttttatcatctagtcaactcgcaaacttccagcatttgtctaaatctactcaatatattccagtacatcagataatatatcagtttcatcctcctgaaaaactcttttccagtgtatcctgacctgctctaattttgacttgatgctttctgtatctggtgcacagctgttaccttggaatcttcccttcatcattattcagagtgtttctgtagtttttctcttgcattggattttgtgcttcctgaatccctctctctctttttttttttttttttacttggcttactccttgctttgatggatctcaggctccagtagcttccttggaaagagtgtttggaaggtaaatttcttgagaccttacatctctgaaaacatctccacgtatacctaattgatagtttggccatataggattctaagccagaattcatttttccttcagaattttgatgacattgcagcattattttctaacttaaggtgttgctattgaaaaatctaaaaatctttctgattactctgtatgtgacctgttttttcttttttcttcccctctgtgtaagctttcatttttatttttttgagatggagtttcactctgtcacccagggtggagtgtagtggcatgatctcgacttactgcaacctccgcctcccgggttcaagtgattctcctgcctcagcctcctgagtagctgggattacaggcgttacaccaccatgcctggctaatttttgtatttttcatagagatagggtttcatcatgttggctcggctggtctcgaactcctgacctcaagcgatccacccacctcagcctcccaaagtgctgcgattacaagcatgagccaccgttcccggcctctctgtaagcttttagaatcttctctttatccttgtattaattacagtaaataagggtaggtgctataacraaccctaaaatctcagtggcttggccaggcgcggtggctcacgcctataatgctagcactttgggagggtgaggccagcggattgcctgagctcaggagtttgagaccagcctgggcgacacggtgaaaccccatctctactaaaatacaaaaaattagccaggtgtggcagtatgcggctgtagtcctagctactccagaggctgaggcaggagaattgcttgaacctgggaggcggaggttgcagtgagccaagatcacaccactgcattccagcctgggtgacagagtgagactccgtctccaaaaaaaaatatatatatatcagtggcttaacacataaaatgtttagttttcttgtatttcacagtcagatgaatgtgtgtgtatgcaggcaagcaggcaagtattttgttttatgctatctctgtccttgcgggtgtatccttctctaannnnnnnnnnnnnnnnnnnncaggcgtgagccaccgcgcccagcccacttctcctttttgaatttcaattttctcatccataaaattagtgtgatgtattaggttattaccctggtcccctttaattctaacatcctataattatatatttaaaagtagaaagctgttacctatttcctgtgggtgcaaactgtattattttgttcctctcctccctaaaagactcgtcagaaaaaaaaaaagtctcatatcagcctcagttatgcagtagaacctgtgctgtcttggaaactcttcttatagaagagcagtttatataaccccttcatgaacagatggatcttctggatatttatctcctacagagatgggagacatgccgaggcgcagtggcttacacctataatgctagcactttgggagggtgaggccagcggattgcctgagctcaggagtttgagaccagcctgggcgacacggtgtaaccccatctctactaaaatacaaaaaattagccaggtgtggcagtatgcggctgtagtcctagctactccagaggctgaggcaggagaattgcttgaacctgggaggcggaggttgcagtgagccaagatcacaccactgcattccagcctgggtgacagagtgagactccgtctccaaaaaaaaatatatatatatcagtggcttaacacataaaatgtttagttttcttgtatttcacagtcagatgaatgtgtgtgtatgcaggcaagcaggcaagtattttgttttatgctatctctgtcttgcgggtgtatccttctctaagtcctctaagttctctccagctaaggatggggaaagagagcagagcttataaatggaagacttttatggggtaggctcgggaattggtatgttactgctgctcacgttctattggccaggacttagtcttttttttttttttttttgagacagagtctcactctgtcacccaggctggagtgcagtggcatgatctctgctcactgcaagctccaccccctgggttcacgccattctcctgcctcagcctcccgagtagctgggactataggtgcctgccaccacgcccggctaattttttgtatttttagtagagacgggttttcaccgtgttagccaggatgktctctatctcctgacctcgtgatccacctgccttggcctcccaaagtgctggcattacaggcgtgagccaccgcgcccggccatgtttttatgttttttaagacagagtctcattctgttgcccaggctggaatgcagtggcatgatctcggctcactgcaacctccacctcccaggttcaagtgattctcctgcctcagcctcctcagtagctgggattacaggtgtctgccaccacacccagctaatttttatatttttagtagagacagagtttcaccatgttggctaggctggtctcgaactcctgacatcaggtgatacgcccagctcagcctcccaaagtgctgggattacaggcatgagccaccacgcctggccaaccaggacttagtcttattgccacagccctgcagttgcaaggaagactgaaaaacgtagtcagattatgtgttcaggaagaaggagaatggggtattkgtttgcgagcaccagcagtctctgctgtggtctccattgtcacaatgatgcacctgggtgtgggtgtgttttcaaacattgtgctcagcactcagcaagacttttaaacctggaaacccttgttctttggttctgggagattttcccttgcattctctcttttctttcccccctttctgcaacttctattatttagatattagacttcctagactggttctttttcctttttaaaatcgtttctctcataatttttatctcttctactttctaggcattatctttttgagtatataaagatttttttaaagttttcttttctccacctcgttcttgtttcccttgtattgcttttcttagtctggtgtctgttttcatgttagaagctttcttcaaatatcttaaaattactggttgctcatttttaagagttagagactataaagctgatttgaaattttagcatcactaaaaggtgatctaattgggcttttaactggggaactttctcttctcttcaatatcaatatctttaggtctttgctcttggaatgaccagatctttcagtctcttaccaagtgggtaaaagccagacttgattctgggaatgagagagaaaagggggtattgggtatctcagcattcaggggttctgttcactaactccacttgtttttagtacaattttgattctcgtcccaaagattgacaccttgaccattttcaagtatcttctccccaatccacaccaaagttagggaggagccagtcccttgaatgctgagtggaggagggaatctaaagatttatttaaattcatttttcaacagactctccttaatttatcttctacctcacccatacattcagaggttcctgatactgccatgcctgagtgttttgcaattttattatataaatcaggttgtttcttggccttccctgtccccttatacttagattactcaggtctcctaaatcctttcctactagtcgttctgctttgtagtttctagattttttttttttttttgatatagagtctcactctgttgcccaggctggaggtgcagtggtgtgatatcagctcacttcaacctccgcctcctgggttcaagaggttctcctgcctcagcctcctgagtagctgggcctacaggtgtgtgccaccatgcctggctaatttttgtatttttagtagaaacggggtttcactatgttggccaggctggtgtcgaactcctaacctcaggtgatccacctgccttggtctcccaaagtgctgggattacaggcatgagccactgtgcctagcctgtagtgtctagatttttattacaatcatgtttgtctcttgttttccatccttgtgggtttgtgcccttataaatctcttttctattattttattgaggtttcaggagggaatgaaaataaacgtgtgtgttcaatcggctgtctttacctggaagtgtgcagtggtatcttttaaatttggtttgaaatctctgctctctagggctgctgtaacaaagtaccacaaactggatggcttgaaacaaaatatatttattttctcacagttctggaggctagaagtccaaaatcaaggtcttggtatggttggtttgctctggagactcagaaatctgttccatgcctctctcctagcttctggtgattgctgacaatccttggtatttcttagattgtaggtgtatcactccctgccttcacatggcattctcctctgtatttctctctttcttcacatggccttcttataagtacaccagtcaatggactcaggaacaccctaatccagtatgaccttgtcttaacttgctggcatctatttccaaataaggtcatatacactggggctagtacttaaaactatcttttgggggacatagttcaacccacaacagactagcaaatttgatatctgagatgattcatctatcagaagccaagagataattagttttttccatcagtaattattgaaggctttaacaaatatgattttcatgatgtttcccmaaatgtatgccacagaatatttatatgagttataagaaaggagttatgtagtcatttaaatttgggaaatgttagttaaaataagtttttaaactataggtctgttcaggacctctcatgtgccagtgtggactatgaaacatactgtttgggaaatgctacatacagttaaccccctttyccccccttttttttttctcaggatggagtctcactctgttacccaggccggagtgcagtggcgcagtctcggctcactgcaacctccacctcccaggttcaagtgattctcatgcctcagtcccccgagtagctgggattacagatgcccaccaccatgcctggctaattatgggtgaggagtgcttccacctgctccacatcctatccagccctcaattttcagttatatttccaatgcttttatataaaaacgataaaattctatcctccagatgcaaagatgacagtagagacttatctgtaaaatacatattttaaagcaagcattcccccaaatcccctctatagaacagaagattatctttttaaaacaatgtaaacaaaatttttttctgagatggggtcttgctctgtgttgccaagggtggagtgcagtggtgccatcacggctcactacaacctctgtttcctgggctcagctgatcttcccacctcagcctcctgaatagctggactacaggtgtgtgccatcatgacctgctaatttttgtattttttgtggagatggggttttgtgatattacccaggctggtcttgaattcctgagctcaaaatatctacccacctcagcctcccaaagtgctgggattacaggtgtgaaccaccatgcctggccataagatggtctttataaagggcggaggcggcggtggggggtgggggcgggtgcaggcactgtggctcatacctgtaatcccagcactttgggaggctgaggcgggtggattgcttgaggtcaggagttcgagaccagcccgcccaacatagtgaaacttcgtctctactaaaaatacaaaaattagtcgggcgcggtggcgtatgtctataatcccagctacccaggaggctgaggcaggagaattgcatgaacctgggatgtggaggttgcagtgagctgagattgtgccacttcactccagcctgggcgacagactctgtctcagtgaaaaataaaataaaataataatgaaaaagactatctgttgttaaatgttctgtgctgcttgggcttaggcctttggaagtgtgtatcatttatccagaatcacttaaaatctggaaatctagagtattactatccaataaaacttctttgtgatgatggaaatgttctctgtctcctgtttagcagactagtcattcgccacatgtgactatggagtgcttgaaatgtggctaatgtgactgaggaactaaaattttttttttgagacagagtttcgctcttgttgcccaggctagagtgcaatggtgcaatctcggcttactgcaacctctgcctcctgggttcaggtgattctcctgcctcagtctcccaagtagctgggattacaggcgcctgccaccacgctcagctaatttttgttatttttagtagagatgggatttcaccatgttggccaggctggtctcgaactcctgacctcaggtgatccacccacctcagcttctcaaagtgctgggattacaggcgtgagccaccatacccggctggaactaaatttctaatttaatttagctaaatgtaaatagccacatgtagtttctggctgctgtactgaacagcagtttacagaatgatgttgcctctcactctagttccgtgattctcaaccttatttccctgtctgaaagatgcacattttctgagggatagatatatttctattggttcctatggcaatgattcttagattctgaactatgaggtcatgtttctctggggaagggcatattcaatttgaaaataaaaagcctctaggtagttctgatctttttgtcccctcgttggtgcctgcttccttattcactgtctaccctgaataattattgctctaaaatttctaatatttatagttagaactctaggtaagagaattcttacctgatactggtattttctttttctttttttttttttttttttttgagacggagtctcgctctgtcgcccaggctggagtgcagtggcgcaatctcagctcactgcaagctccgcctcctgggttcacgccattcccctgcctcagcctcctgagtagctgggactgcaggcacccgccaccacgcctggataattttttgtattttttttagtagagacggggtttcaccgtgttagccaggatggtctcgagctcctgaccttgtgatccgcccacctcggcttcccaaagtgctgggattacaggcgtgagccaccgcacccggccggtattttctatttaagggtaaaattggttagaagaagagccaaagtttgaattgactcgtatattaggatatgagttattgacacgatatattctgattactagctgcaatttgcagtcttcacataatctttttctgtcaagtagagtatcatccaaagaggcagtcctggtgttgattgtgggtggatgttgaatataggtgaaaatacttgctattcggttatctctaagaagttatttttcctcaaaacagtcattgtaccattatagtatttctttgatgtttccatttttaccaaactcattagtagtggtcactttttaaatgttctgtgtctgtaagcagttttttagactctcatttgattctttcaatagaatgcatttacttatttgtgatatttctttgtattctgtttcttacagttgcttctgcaggaagcctttttggtggcatggtcctcaagaagttcctaaaaggtaaagaattacctaacttccatgagactgaatatcttcccgacaattaatttgatattttctgaaacaaatttataatgaaagaaagagctgacagatttataaataaaaatacaggatgcccacttaaatttgaatttcagataaataataatttttttaacataagtatgtctcatgcagtactttatcctacattttatctggcttctgattaaaagatgatctattaatataaaactgtatagaattgacaagatacctagatcactgtagcttttctgtatactctgtatacaactttaggcaaaattttcccagatgtaaaataaaaattttagtaggtatttgtttctatctacttcaaagaaataatgtgtggagaatgcttttactgtaaatgattggctagcagtaataatgttttccacattatatgccagagttggtacggtttaggagtttttgctgaccttagttttaagaatttatttatttatttattgagacggagtctcactctgtcacccaggctggagtgcagtggtgcgatcttggctcactgcaacctctgcctcctgggttcaagcaattctcctgcctcagccttccgagtagctgggactacagttgcatgctgccacacccagctaattttttgtatcttagtagagatggggtttcaccgtgttgccatgctggtctcgaacttctgagctcaggcaatctgcctgcctcggcctcccaaaatgctggattacaggtgtgagccaccatgcctggcagaatttctttttatttttttggacttaagaatactctacaagccaaaggccataacatttattttaaggaagccaaaatgaccttagaactcttacgctttcatttttatttcttatggttgtttgctacataagtattatccattggcctattttttcctaatgaattgttaatttacaaattttacaaaataacttttaaaaataaactttcccagactaaatctggaatattaatagatttttaaaagcttatatctgtccttgctttaagaaaatatactgtagccaggcccagtggctcatgcctgtaatcccagcactttgggaggccaaggcaggcagattacctaggtcaggagttcaagactggtcaacatggtgaatccccatctctactaaaaatacaaaaattagccaggcatggtggtgcatacctatctatagtcctagctacttggtggggctgaggcaggagaatcccttgaacccaggaggcagaggctgcagtgagccaagatcataccattgcactccagcctgggtgacagagtgagagactctgtctcaaaaaaaaaaaaagaaaacatactgtgtattaaaatggcaacaactggccaggcacagtggctcatgcctgtaatcccagcactttaggaggccaaggcaggcggattgcttgatccagtagaactttttggagttcaagaccagcctagcaccatcacgagaccccatctttacaaaaaaaaaaaaaaaaaaaaaaaaaaaaattagccagggaaggtggtgcacacctgtactcccagctacttaggagactgaggtgggaagattgcttgagcctgggaggtaaaggctgtagtaagccgtgatcacacaccactgcactccagcctgggtgacagcaagacttggtcacaaacaaacaaacaaaaaaagggaacaaccaaaaagctacattggaaaggtataatgttataaaataaatgtttatgaaatgtattaccattttttaatgacaaattttcttcgtgctttgtaaaatgcaaatcaattaaaatttgaatttatacccaaatttatagcaactcaattattacttaaagcacctttttttttttttttggaggagataaacccattttattgtctatcatgttatacaaaaatctagaaataatagatttgtatagaaaacaacgataggccgggcgcggtggctcacgcctgtaatcccagcactttgggaggctgaagtgggcggatcacgaggtcaggagatcgagaccatcctggctaacacggtgaaaccccgtctctactaaaaatactaaaaatyagccgggcgtggtggcgggcgcctgtagtcccagctactccagaggctgaggcaggagaatggggtgaacccgggaggcggagcttgcagtgagccgagattgcgccactgcacaacagcctgggcgacagagcgagagactccgtctcaaaaaaaaagaaaaaaagataaaaaggaaaaaagaaaaaaatgataataaatgagggtgcaaaacatagaatttaaatttggtattttttccccatgatattaggatgataatcatttcaaagcacatgtctagcttcatagtaggatttgttcactggccaaagcctgccataaaactatggctttcagtgtctgtctgctctactggctcttgacaaaacttttgaggtcttcaagaaaagtaatgtacgcctggtgctccggggctgtgcgaagctccaccaactcatctgcaaaaatgttgtccaccccttggtccgcaaggaaatccattaggtggtcatatarggcccagtccagggaatctgtgttgagtgtatagttagtatccttccattcaaactcgctggtggaccaaaagctaacttccctgatagagaagatgtcactcagcctcctcttcttgtccagcttcatcctctggataatgacagtccagcacaagggccttcttgccatcattctttatagcttcaaccacgaaatggggagttgatatcaattcagggtcttcaaccttctgcccttgcgagggttcctcctcaccatcaaatgttggtgggatgctgttgttaatattgaaagtgacagtgattttttccccccagcaactttccgcactaatttagcttctgtcccattcagttccagctcccaaactccagacatcttaggaagggttttatgcttctggattttcctttcctcctgaatttcatcactcaggaaatcaatcaaagctttgtctccttcgcacgccacacccacagccggaggtgcagggcccgcgaggccgcagggggcccggccgcagaacacgcgcgcaaactgagcagcctgaagggcgggcgcacagccggggcgccggccaggagctgccggaaaggcggggcgggccccgggggtgtggaagccggcgacgcagaagcccagcatatggggcactcagcgcagcagtggcagcatggcggagaggactgcgaacatgtgcggatgcaaaggacaacccaggcctaggtacccagagtacccttttttgtttgtttgtttctttgagacggagtctcgctctgtcgcccaggctagagagcaggggcgagatcttggttcactgcaaccttccgcctcctgggttcaagcgattctccggcctcaacctcctgagtagctggtattacaggtgcgcaccaccacgcccagctattttttgcatttttagtagagacggggtttcaccatgttggtcaggctggcctcgaactcctgatctcgtgatccgcctgcctcggcctgccaaagtgctgggattacaggcgtgagccaccgcgcccggccaatacctttctttatcttggtcatatcaaagaaaacaaactatttttacaactcagttacaagatgaatactctaaagacacaaatatataggaaacaattctaccttttgaaacttcttttctgaagtaatttttagttgaagaatggagacaggccagctgaagtgtctcacacctataataccagcacttcgggaggacaagatggaagaatcgcttgagcccagtagttagagactagcctgggcaatatattgagacccccatctctacaaataaagaaaattagccaggcatggtggggcatacctgtagtcccagctactcaggaggctgaggcagaattgcctgtgcccaggcatttgaggctgcagtgagctatgatcatgccactgtgctccagcctgggtgacagagtaagactgtttttaaaataaaaaagaatgaggacttaaaaatgcttgttgctaaatgaagtgatcagatgtattccccttttcctttgtaaattgtcttggccctctgaatctaccttccaactgtctgtatccttggatattttacagacttcggcttttgctctgtgaccctaattttgtttaggttctacttggtgtgagcacattaatgttttttgttttattttgagcacatttaaaaactaattgtggaggaaaagtaataaaaaatgagattttaaacattattattattattattattagagatgaggtctcactatgttgcccaggctggtcctgaactcctgggctcaagcagtcctcccacctcggcctcccaaaatgctgggattacaggcatgagtcactgcacctgtcctattattatttttgagacagggccttgctctgtcacccagactggggtgcaatggtgtgatcatggctcactgcagccccaagctcctggacttgagccatcctccagcctcagcctcttgagtagctagggtcacatgtgcacacctccatgcccagttactttttaaattttttctaaagatgggatctcactttgttgccctggctggtctcaaacttctggttggtctcaagctctcatgcaacagcctcccaaaacgtagggattacaagtgtgagccaccctgcccagccaagatttttattttagctccagaacattctgtgagcatttggtaagaatgttctccctttagtattaatcacaatgataatttattgagcatttactatgcattaggccttgtgctccacttaaaggtagttatagtagtgaacaagacagatttggtttctccctttatacccctagtgaagataccttaattattctattgcctctttaagcctatgcctagaaaaaagggaatatcagctattgtcctgaagagtttgctctgattctgagacttttgggagatctgaatccaagttcaagaatcatgggctgactgcttcaaaaacatctaattatttataagtttttccttgttcatttttgaattattgtctttgggttgatgcagagaagggaaagatcattcctagtggccctgctcctgttaatgtctgtgaaattgctttgaaagaagtgaaaatcggccgggcgcggtggctcacacctgtaatcccagcactttgggaggcctaggcgggcggatcacaaggtcaggagtttaaaccagcctggtcaacatagtgaaaccctgtctctactaaaaatacaaaaaaaaaaaaaaaaaattagctgggggtggtagtgggcacctgtaaccccagctacttgggaggctgaggcaggagaatcgcttgaacctgggaggcggaggttgcagtaagctgagatcatgccactgcactccagctcgggcgacaatgcgagactccatctccaaaaaaaaaaaaaataaagaagtgaaaatctggccaagcatggtggctctgactaaaatcccagcactgtgggagactgaggtaggcagattgctcgagccttgggcagcatgatgaaaccccatctctacmaaaaatacaaaaatcagccaggcatgtgaaaatcagctaggtgtgcctggggtcccagctactagggggctgaggcaggagatccatttgagcccaggaggtcaagtctgcagtgagctgtgattgcgccactgcactacagccttggtgacagagtgagatcttgtctccmaaaaaaaaaagctatataaatggagtatattattagcactagggaggagataggagcattccttgcaaaataaacccacacttaatgtgcttgtacaaggagtggtcagatcatatataaggctacttgtttgactaatatttgtgaaagtgctttgaaaaaagtgaaaagccgtgtaactacaagagaatagttttattatcattgttactcttagggagtatcatttatgggttatcatttatggaataaccacatactcatgccaatacaaactctagacaatttttgtcatggtgacttagttttaatttaactgttactttaaaaactcaaagcaatttcatttaatccttattgtgataaagtgtgagtggctaactcttcgtacaaagaggaagtactgcacatcaagtacataattaaaattgaatcatttgctcatgctcaatcacatttagtagccaactgtagcctaagtcttctctccagttgttagggctcttaatattaacctccactcaataatgctagttattctttttgtttgtttgtttgtttttgagatggagtctcactcttgtcacccaggctggagtgcagtggcgtgatcttggctcactgcaacctctgcctcctaggttcaagaaattctcctgcctcagcctcccaagtagctgggattacaagcgcctgccaccacggccagctaatttttatatttttagtagagatgggatttcaccatgttggccaggcctgtctcgaactcctaacctcaggtgatccacccgcctyggcctcccaaagtgctgggattacaggcgtaagccactgtgcctggcctagttattcttactaattagtaacaaaaattactcagtgaacctcacaaaggaaattggtgaagaataagacaggaatcccttagctccctggtttatgcaccattaattatgccttttttactattattatttagaatttctgacactattaagctaatagcaaactgctttaaattggtcmatttactgatctttacactgtttagttagcttcatcagggagtctctggcagctggattcattactcatcagttttctagatgctaaaaaattgtgtatctatacaaagttaatatgtctgtaaattcagtttaactctgttgttttcttcattatttggctgatttctctcagtgtctaaaacaagtggtctgacccttctttaggggagctgaactgttgaagaactatcagctttagtttcctttactcttcaatctgttctaccagggttgtatcaaggtacttttttctctggatctggaatactttagatcaattcctgtaccaaataggctcatatttctgtgtattttatttatgctggattaataagcaatgaccattgtaatctccctactcacctacttctctactggtttattttctcttttttcccctttcttctctggtccctaactatttatacttttattcagtaaacttttattgtaacatctaccttgccacaaagaagtcacaggaagtagaggcagctctgcaaataaaatgcagtgtgattagtactgtaatggaggtgtaagttgaaagagcttctctcataacccagaggatattccccaaagttcagtcaccaatgtgcttttcttcccttcattattctgcatcattattctacattcaattcagacagcttttctactttcaagactttaactaacattaactatgctgatgagacttatttttccccctcttgatcactgacatgtctcctaaactccaatggaatagctttgaatgtcaattagactattccatttgagagttcctctgaaatatcctgtgtaacatgtctaacatggggttcagtttcttgaaatgaacttattgtgtaatgtctgcattcctttcagtgatattgacatactcataattctccagcgttaaaaatcttggtttttatggtggggtttctccttttttgtttcctcattatgtaattgatttttcgttaattctgcctttataatataaaattcttaytaatttaaacatagcttacattcttcccttaatgattccttatttattattatattaggtctaagtacttcagaccagagttaaggccttctctcaagaggataatcccctctactttgcagaataatgcccattaagatagataagttcttatgtgtttaaaaaattgtcactacatgttaaatgtgtgctactgtctgcattgaatacttatctacttaggtataattccatttatatattcatttatgtgtatacttatccatttatatagaactatttctatcataaatgtcttttagtgaaacatgattgtttcagtttgtcctatttgctcagctctgcttcctattatgtccttattcaagtgaggaaaggaaagtggatggaggaatatgaaaaaaatccatgtttatagatctttattttgctgctttttcctctttcttctattcatattatttttatttttgtctttttaaaatagcttctcatttccatgtttattgacataacttagctctttatacagtatggccagttattttaaaaagatgtgcaagtgtttttcccaaataaaatttacagccttcttttttcttcataagactagataagaataccagtccttgtaaacagggaggactgctttgctgttgayatatggttacatggctatgatagttcagtttttgcctcttccctatatgctacccttttggtgtcagggagacttttttgttgttcattgttttgttttttggaggcagggtcttgctctgtttcccaggctgaagtgcagtggcrtgaccacagctcattgcagccttgacctcttgggctcaagggatcctcccatttatagccttctgagtaactgggaccacaggtgtgtaccaccatgcccagctagttattttattttttgtagagatgagatctcaccatgttgcccaagctggttttaaactcctgggctcaagcgatcctcccaccttggcctctcaaagtgtaaggattacaagtgtgagccttcatgcccagcctgtttattttcaagtttacttttgtcctctttgttaatttgttgggaaagaaagtgaggagtggtgcttttcatgggttagagagattgacaggtccagacttgctcaacattgagtaagaaactcacaatggtgaactcttgaatgtctgacgtaatcaagttttttttttttaagtctgagattcttgtattcaagaataaaaatctattataattttatatcttacaaaatcaacaactctaaggctcagaatttatctaacgctttttcccccgggagctcattttgtagacatgatctcattcattcttgaggagcagtcagacataagtgttatcatcatctctgtttcagagatgagaaaactgagacttagcctcatatactaagaagggaaacatttgtagactcataggttgctggttatccattaaactgtgagagactacacttaattttaagcttttgatacattctaaacaggctgttgttgccaaatttacctaacgctkggtaagattttataaaggttggctgaagatcaagacacgctaaaacagattttkkttttttgttttttktttttttkgctyccttaatatttctttactctttyccttgttacatttatctaattgcacttcactattgagaacatgttcaagatttgatgtgacagaaggggatggaaaggacagaagtggtttttaccaaccctgacatattccttttccttttgaacttggatagataaaacaggaggaaaaggatagctcttattattagagatcctgggagctggctcattctctggctgagtggtacataactgcttttattcagcagcccatgagagctaacctgccttgtacctggctggcttaaaatgcttgaactgttacaattcctcattgagtaatcagctgggcacttactgttccaactctgtccttctgggttaccacacatctttcatcttctcagctgggaacacaaggagagttgtctccctatagtggtatagtggaatttggctggaatgggaagaggggatactgtattttttcttgagtagactttatggctagccatttaatacattctgaaaaatggtcagatgacatcacatagaaaaattacctcmaaatggatcaaagaactaaagctataaaactcttagaaaagaaagaaaggtttaaatcttcatgaccttggattaggcmatgttttcttggatatgacatttaaagcacaagcmacgaaaggaaaagtagagaaattggatttaatcaatattaaaaactcttatgcttcmaaagatgatactaagaaagtgaaaagatcaattatacctaaaaaaaaaaaagctggaaaatgaaggtctctagttccaaaactcagaaaaaaaaggtgaataaataatccacagataagaaaagtctagtatccagtgtacatatagaacttatacaacaacaattaaaggacaaatagcaaaattcatatggtaaagccccaacccccagtgtgatagtatttggagatggggcctttgggaggtaagtggggttagattagatcatgagggttgggccttcatgagattagcagttttatttatttatttatttatttatttacttattttttaatttttattttttgagacagagtctcactctgtcgcccaggctggagtgcagtggtgcaatcttggctcactgcaagctccacctcccgggttcatgccattctcctgcctcagcctcccgagtagctgggactacaggcgcccaccaccacgcccggctaatttttttttttgtatttttagtagaaatggggtttcactgtgttagccaggatggtctcaaactcctgaccttgtgatccgcctgcctcggcctcccaaagtgctgggattacaggcrtgagccaccacggctggcctgagattagcagttttataagaagaggaagggagagagagattattctctttttccctctccctcccttgtatccaccaaggaaaggccatgtgagggcacaatgagaaggcagctatctgaaagccaggaagagagccctcatcaggaaccaaatcaactggcaccttgatcttggccttcccagccttcagaattgtgagaaataaatttctcttgtttaagctacctagtttatggtctcttgttatggcggcttgagtggactaagacaacatttatcctaaaaagatacacacatggccagtaaacccatgaaaagatagatgctcagcatcattagtcattagggaaaaatgcaagtcaaaaacataatgaggccaggcacggtggctcatgcctgtaataccagcgctttgggaggctgaggtgggaggatcacctgaggtcaggagttggagacaagcctggccaacatagtgaaccctcatctctactaaaaatacaaaaattagctaggcgtggtggccggtgcctgtaatcccagctacttgggaggctgacccaggagaatggcttgaactcagaaggtggaggttacagtgagctgagatcacaccactgcactccagcctgggtgacagagccagactctatctcaaaacaaatgctccacacaccagtggtaatatgaaattgaagttttttaaactccatcttcccctttacttccctcttctctttcctgacaccccttctggcctccttacccatcgttggccacttagcatagtataatcccctgctgccttgactttctactttttctttcttatcagtctccaggcttgggtaatcaccattattattattttttcattcttatttccaagctgccaagtgttacttgtgtaaatcataaaactgaatgttgggtacgctataaatttaaggagaatttctaacttcttggggttgttcagtactcttatcttgtttattcttttatataattctcatagtgtatatttcaaattacctgacactcaataaatgtctttaccttctatttttctgaaaaggttgaggttatccaaatggcacttcttctggatttctttttttcttttttttttttwagagatgaggtcttgctatgttgcccaagctggtcttgaactcttaggctcaagcaatcctcccacctcggcctcccaaagtgctgggattacaggcatgagccaccatcctcagccattccaatttctttttaagaaatttaaatttgaggctgggcgtggtggctcacgcctgtaatcccagcactttggaaggccaaggtgggcggatcatgaggtcaggagattgagaccatcctggctaacatggtgaaaccccgtctctactgcaatagaatgtggctgccatgctggctttgcaacttcaagagatcctctgcacccttacacttctcagccaatttgtggaagaagtggccagtgccttccagtgccacatcattgtggtcaaaatagaagcccagaatgagagagatgtaggaggcctacagatacaaattgaccaggcgattgacagctgcctccaactcgatgaaataattctgatgagtctagttggcaagaaggagctaaccacaaaaacagtgttggctggtctcagaagcaggagatggccgagaagatggtcctggaggttgcaagtggagaggacagtggagggcagttggaggctggaagagagggagtccctgggtttgttccatccaaatactattgaagcaagagacagatgggtgggactgtcaaatgcactgccagaacatccatgaacagctcatggttcaagaagtaatttcaacttttaaggcttattatttaggaaatacattttataagactatagctgccatagatagtgagtagagtcaattaaaaaccttctggaaaggagtcaccattctagatgccattaagagcattcgtcattcataggaggaggtcaaaacatcaacgttaacaggagtttggaagaaattgattccaacccttatggatgactttgaggggttcagtacttaagtggaagagttaactgtaaatgtggcccggccagtaagtggtatttttttaagaatttcattttccaactgtttcttgctagtatttgaaatacaattgatgtttatatatttttcaagcttgctaaactagcctgggaaacatagcaaggccccatatctacaaaacatttctaaaagttaattgggcatggtgctgcatgcctatagtcctagctactcaggaggctgaagcagaaggagtgattgaaaccaggagttgtagggtgcagtgagctataattttgccactgcactccagcctcggagacagagcaagaccctatctcaaaaaataaaaatcttggccgggcaccgtggctcatgcctgtaatctcagcactttgggaggctgaggcgggcagatcatctgaagtcaggaattcgagaccagcctcgccaacatggcgaaaccccgtctctactaaaaaatacaaaaattagctgggtgtggtggtgcgtgcctttcttcccagctactccaaaggctaaggcagcagaatcagctgaacctggaaggtggaggttgcagtgagctgagatcatgccactgcactccagcctgtattgttagatttgatttgccataattttattaagaatttttgcatctatgttcacaaaggatatgtgtaattttcttttcttgtaatgtctttgtctttttttggtacaagtaatactggcctcatagaatgactttggacatattctctgttcttcaattgcctagaagagtttgtagaagatattatttcttccttaaatatttggtacaatttcttccttaaatatttggtgcaaatcatcaaggaagccatctgggcctgattttttccttcctaggaaatattttaactacaaattcaatttctttaataattatacagtctctctctctctctctctttgagacatggtctctgtcgcccaggctggagtatggtggggcgatctcagctcattgcagctttgacctccctggctcaagcgatcctcttgcctcagattcaggactataggcctgcaccaccacacctggtttgtattttttgtagagacagggtctcactgtgttgcccaggctggtctggaactcctgggctcaagcgatcctcttgcctcagcctcctaaagtgctgggattataggcacgtaccmctgcacctggccttttttttttttcctgagtgagcatgggtaatttgtgtcaaggaatttgtccattttatctaagttattgggttattgacataaaattgttcataattttccttattatctttctaatgtttgtagaatctctagcaatatcctctttcttactccctggtgttggttatttatatcttctcttttattttccttgatcagtctggctagaaccaggttcttcctgttgttctatttcattcatttacactctgatcttttattctttcttttgctcgtttggggtcttacttgctcttctgtttctagttttataaagtgaaagctgcaatcattgattagagacagttctacgctaaagtcataatgacattttatgtaatttcttttttcttttttttgagacagagtctcgctctgttgctcaggctggagtgcagtggagtgatctcagctcactgcaacctctgcctcccaggttcaagcgattctcctgcctcagcctcccgagtagctgggattacaggcccccaccaccaagcccagctaatttttgtatttttagtagagacaccatgttggccaggctggtctcaaactcctgacctcaggtgatccaccagccttggcctcctaaagtgctgggattctaggtgtgagccaccatgcccagcctatataatttctttaatagtgctaaagttttaaatttatatttattattacatctagtgaatctggagtttatttttgttttgctttgctaaccagctgactttaatggagtttatttttattttatttatgatgtaagttaggaatctaatttaaatccttttccaaacagattgctacttgtcccaactcagtttattattgaatagtactttacccagtaatttatattattattctgtcatatactaagattctatatatgcttgggtctgtttctgggtaatctagtctttatctctgtgcctgggccagtattgtagagttttatttcctaaagctttagaataaatcttgctatatgatagggcaaatctctcctccttgtttttctttttcagaatcgtctttggtgtttctttgttttgttttgttttgtgcttttgacaaagtctcgctgtgtcacccaggctggagtgcagtggcacaatctcggctcactgcaagctccgcctcctgggttcacgccattctcctatctcagcctcccgagtaactgggactacaggcgcccgccaccacgcctggctaatttttttgtttttttgtttcttttgtatttttagtagagacaggtttcactgtgttagccaggatggtctcgatctcctgacctcgtgatccgcccgcctttgcctcccaaagtgctgggattacaggcgtgagtcaccgcgcctgaccttgtctttggtttttaaaacctttactcttggctatgagttttataattagttaagttccaggctggacatggtggctcacgcctgtaatcccagcactttgggaggccaaggctggcagattaccggaggtgggagttagtgaccagcctggccaacatggtgaaaccctgtctctactcaaaatgcaaaaattagccaggcatggtggcgggcgcctgtagtcccagctactccggaagctgaagtgagagacccacttgaacccaggaggcagaggttgcagtagagctgagatcgcaccactgcactcctgcctgggtgacagagtgagactctgtctcaaaaaaaaaaaaaaaaaaaaaaagctccacaaaaaaatcttgttgtgattttcattgctattaaatggaattatagattaagttggtggcaatgaacatttttagcattgtttttgtgagatgatatatcttgtcatttatttagatttttcttttaaaaatgttatttaattttagttgtcacacttttaagagataggcactataagggagaataaggggctcgaccaagagcaaatggctataagccaaagtctgcctgactttagagaccattttgccaggtgttattatttgttcaaaatattgcctgctcttctcctgggagatttatattttttgccctatgagtataaggctgggtcatgtaacttgccagggccaatgaaatgtgagtggaagtgacatgtgtcgccttccaggagaagctttaagagtctatgtgtattttgctggtagcttcttttcctttgccatgaggctaggatgtctcagatgagggggtactcctttagcccaggtcttgcttagatgtggctcttgttggctttgagttcacttatggttctgcaacctcttaactggcttctggagttctcacaaaagataatttgatattgctgttgagttggtttttctgtgggggaaacgaggrcctggggcttcctatcccgccatcttgctgatggcattcctatttagatcttttatgttaacactttaaaattcttttcataatggtcttagatatcttttgctatatttatttctatagtcttatagtttttgttgctattatgaatgatattcatttttttcaaccctactgaattcatcccttattaatttggataatttatctgtggattcttttggatcctctatatgggcactcaaagcatctctaaattatgacaactccatcttttccttttcaatccttatatggcttctttttttttttgagacagagtctcactctgtcacccaggctggagtgcagkggcgtgatctcggctcactgcaacctccacctcccgggttcaagtgattctcttacctcagcctcctgagtagctgagactacaggcatgcaccaccatgcctgggtaacttgtgtatttttagtagagatgggattctaccatgttggccagcctggtcttgaactcctgacctcaagtgatctgcctgcctcggcctcccaaagtgctggaactacaggcatgagccatcacgcctggcatatggcttacttcttttccttgtcatattgtattgaatagaatagtactagtattaaatagaatagcaggggtaatattaggcatctgtcttgctttccttaaacaaggaaattaaacaaggaaggattatttaaaagtctaccactggccgggagcagtggctcatgcctgtaatcccagcactttgggaggtcaagattggaggatcatttgaggccaagagttcgagaccagcctggtcaacatagcaagtccccatctcttagaagaaaaaaaagtccattattaagtatatttgcaatagtttttatacctgctcctgttaagtttaggaaattattttctattcctaatttgccagcgtgtttgttatgaatgagtgctgtatttcctgaaatgctttttctaggccaggcacagtggcttatgctagtaatcccagcactttgggaggccaagacgggaggaccacttgactctggtagtagaagaccagcctgggcagcatggcaagacccagtctctacaaaaaaatacaaaaattagctgggcatggtggtgtgcagctgtagtgtcccagcttcttgggagcctgggacagaaggatagtttggccccaagaggtggaggctacactaagccagaatcatgcccatcatgtttttttaatactgttgtaatcactatatctatatatctatatctatatatctatatctatatatatctatatatctatatctatatatctatatctatatctataatgttgtcctatgtctttttttacttaacataagcatttttcatgttatgacatagtcttctagtcattattttaatggctaaattatccatcaagatgtatcataaattagccatttttctattaatagacatttaggtttattcttttttttcccccattattatgaatagcaggatagtttagtgtctaggagattatactgtgtgttcttgaacaagtttttgatcttttgaaagcacctacctcataaaattgttttgaggattaagtgaagtaatacgtataatgcatgtagcacagtggttattctgaatacacagttctcaataagtgctaattaatatcactggaatgaatatcttaatgcatatagctctttactatattgaaaattttaggattaattttatgagatagaattaacttgatcaaagtctgtgtacatttttatggctctgaaattgctttgtaaaaagtgttggccaggcgtggtggctcatacctgtgatcccagcactttgggaggctgacatgggtggatcacttgaggtcaggagttcaagaccagcctgctaacatggtgaaaccccgtctctactaaaaatacaaaaaaatagcctgtagtcccagctactcgggaggctgaggcaagggaatcacttgaatccgggaggtggaggttgcagtgagccaagatcacaccactgcactccaacctgggcatcaaagcaagactccatccccccaaaaaaagttgtgtcttgtaatgctaacatttgtagcaaagttaccaacttcaccgtactttgccagcattgggaatttcaattacttaaaatatttaagctaatttacaagttaatgagatggttaaaagttttaattatatttctctgaaccttttaataagtgtttaccacctctattttctgttttctgaactttgtgtctttttcttttctttctttttttttttttttaagagacagtctcaaactcctgggctcaagtgattctcctgcctcagcctcccaaattgctgggattacagacttgagccactgcacccagccttctccatgtctttagggacaaacttctaggatgaaatttaggatgaattaagtcattagcttgacaccatgatgtacaaatccctgaatttcagtttcattgttaaaatgccattgtttcaagatgctcagttggctatggaaagataggtcatctatcccagctactcagggggatcttttgagcccaagaggtcaaggctacagtgagctgcgatcacagcactgcactctagcccgggcaacaaagtgagactgtctccaaaaataaaatataaaatttatatggaaagaaaaacccagaatagccaacgccatattgaagagtaaagtcaggggactggcactacctgacttcaagacttataaagctacagtagttagcccaaggtaattaatagattcaatgccatccccatcaagctaccaatgactttcttcacagaattggaaaaaactactttaaagttcatatggaaccaaaaaagaacccgcattgccaagtcaatcttaagccaaaagaacaaagctggaggcatcacgctacctgacttcaaactattctacaaggctacagtaaccaaaacagcatgatactggtaccaaaacagagatatagaccaatggaacagaaaagagcccttagaaataatgacgcatatctacaactatctgatctttgacagacctgacaaaaacaagcaatggggaaaggattccctatttaataaatggtgctgggaaaactagctagccatttgtagaaagctgaaactggatcccttccttacaccttatacaaaaattaattcaagatggattaaagatttacatgttagacctaaaaccataaaaactctagaagaaaacctaggcaataccattcaggacataggcatgggcaaggacttcatgtctaaaacaccaaaagcaatggcgacaaaagccaaaattgacaaatgggatctaattaaactaaagagcttctgcacagcaaaagaaacaaccatcagagtgaacaggcaacctacagaatgggagaaaatttttgcaacctactcatctgacaaagggctaatacccagaatctacagtgaactccaacaaatttacaagaaaaaaacaaccccatcaaaaagtgggtgaaggatatgaacagacacttctcaaaagaagacatttatgcagccaaaaaaaacacgtgaaaaaatgctcatcatcactggccatcagagaaatgcaaatcaaaaccacaatgagataccatctcacaccagttagaatggcgatcattaaaaagtcaagaaacaacaggtgctggagaggatgtggagaaataggaacacttttacactgttggtgggactgtaaactagttcaaccattgtggaagtcagtgtggtgattcctcggagatctagaactagaaataccatttgaccccgccatcccattactgggtatatacccaaaggattataaatcatgctgctataaagacacacgcacatgtatgtttactgcggcactattcacaatagcaaagacttggaaccaacccaaatgtccaacaatgatagactggattaagaaaatgtggcacatataccatggaatactatgcagccataaaaaatgatgagttcatgtcgtttgtagggacatggatgaagctggaaaccatcattctcagcatacttttacaaggacaaaaaaccaaacaccgcatgttctcactcataggtgggaattgaacaatgagaacacatggacacaggaaggggaacatcacacaccagggcctgttgtggggtggggggagggggagggatagcattaggagatatacctaatgttaaatggcgagttactgggtgcarcacaccaacatggcacatgtatacatatgtaacaaacctgcacgttgtgyacatgtaccctaaaactttcataaaaaaaaaagaaactgtggtattggcaaaagaataggtaaatagtgtttttttgctcaattttgagtatttttaaatactcaaatacttataattccctgccttatgagattatttttgctctgaaaagctagctgtcaagaaaaattcaaggaaaaaaatagtcttttatattcacttatttatgatttctggtgctcttcatttcttcctttatagctgggtttccatcttcagcctgaagaaaatcctttagcaaatcttctagcagcagattatttcatcttctatcttaaaatgcctttaccttaacctcatttttaaaggatattgcactggaatatctggcttgatagttttctccttttcaacattttgaaagatgttgtcaattgtcttctgcgctttattgtttttatttatttattttattttattttttkggagacagagtctcactctctcacccaggccggagtgcagtggcgtgatcttggctcactgcaacctctgcctcctgggttcaagtgattcttgtgcttcagcctcctgagtagcactgggattacagacatgtgccaccacacctggctaattttttgatttttagtagagacagggtttttccatgttgaccaggctggtcatgaactcctggcctcaagcgatccacctactttggcctcccaaagtgctgggattataggcatgagccaccgcgcgtggacctggcctttattgtttatggtaagaagtcagctgtgattcattttatacctcctgtgtatatgatgtgtgcttttcctctggcttctttcaatattttatctttatctttggtttttatcattttgactattatatacctaggtgtgattttctttgcatttatcctccttggggtttgctgagcttttcacaccttaatatttttcatgaaattttagggaattttgttcatggttttttgatgtttttcttgtcctattctcattttattctcctatcctccttctgggactcccattgcacatattttagactggttgatattttcctacaggtttctaagactattcatttttcttcagtcttttttttctttattctccagattggatagtttttgttatttgtcttcagtgattttactgactcttctgtcacctctaatctgctattaaacctatcaagtgaattcttcatttcaattatttaacttttcagttatagaatttctttttggttctttttgtatagtgttatctgctgacatttcctatcagttcactcattaaggccgccttttaagcctttgaacatatttataatagattctttaaagtctttcctaaatgtaatatctgtaccatatcaggttctgtttcttttcttttttcagagacagggtctcactctgtcaccaggctgaaaagtgcagtggcacagtcatagctcctgcagcctccaactcctgggctcaagtgatcctcccacctcagcctcttgagtagctaggacccacaggcatgtaccaccacgcccggctaatttttaaatttttttgtagagatgagtctttccatgttgcctaggctagtctcaaactcctggcctcaagcgatctccctgccttggcccctcaaagtgctgggattataggcatgagcctggccctcaggttctgtttctattagttgctttttttcccccttgactgtgggttatcatttcctatttctttgcatatttagtacatttttgttttatactgggcaatatgatcatattctatattgtgttatctatctctggagagtattaatttttgctctagtaggctatgcaccttgaccttgtacaggcttgtttttatgcattttaaagggtaggtctgtagaaagccaatgcatttttcaaactcttctaatttgataccatttagcctccaaactctatctcctctgtgggttttgtcaaggaatggctttagacttttttggggtgggtctagagcacaccttcatcgacagtatggtttttattactaaagcattatctgtggggcatctcagctagacaccagcagttttaacaaggtctccccatttctagstaggcctgaaggccaacatttttcagcactggaaaatcttgctagtgtcttgttacattctcaactccatagcacctgctctgtgggaaatcatatgtagtctcactctctgcatggatagtccagaccttggccaaggactcatggggagctcctacacagactttagtaccctgctctttgtatctccctcttctccagtgccctgccctgcagattccaggtactttcacaactccaaaatctattctctgcctcctcagcttagtgggaccactgtcctctgcttgggttccatgtccctgttctgtagatgggaaaatttccccaggcagacacccagggaaataacaggactaacctggtgagtttcccttctctcaagggattgtaaccttgtgctatctattgtccagtgcctgaaaacaactgtctcatatattttatccagttttacagtagtttttggtttgagggctcatttggttatttcattaatgctgggaggagaagccccagtacatagttttgctatgtgttcgtaatgtcatctgattgaaaattttctatctacttcatctttaacagttgaagacctatgtgaagaggtaacttgatactgataatgatctctttcttcctccttatccccacatgatctcagcaaaaatgtaaactcatgtttaaatggacatggtggtttgtttagtggttatttgaggacttgtagatggtaaacattttaagtctctcattttgtaatggtagtttggctctcttaaaagttcagatttggctgggtgaggtggctcatgcctgtaatcccagcactctgggaggttgaggcaggaagatctctcgagaccagcctgggcaacatagtgagaccctgtatctacaaaaaattacaacaatttccctaaacagtttaatataaagaaaaaagattagctgggcatcgtgtacacctgtagttctagtgagttgggaggctgaggtaggaggatcctttgatcccagaagttgaaggctgcagtgagctatgatcaccccactgcacatagcctgggccacagaacatgatcctgtctcagacagacagacagacagatagatagatgataggtagatagataagtaagtaaaagagtccagattcaaaattacttcagatctttgaagatagtactggatcatcttctgacatttagcattgctaactcatgggttttttttgctaatttaatttttttggtagctcgtagggttttctgcttatccttgttattttgggtttcactgtgatgtgttaactatgtggcttttttaatttttgcttttgccttgttttttcgaaatttagcctgcttgacgtktggtaaaactgttcagatagcacttacatctgtctttgttttatatttctcagtcattatttcttctggatctatttttaatgtctcttgccttttcttttaattgatataaaattcatatatcataaacacaaccattttaaagtatacaatttggtggtttttagtatattttcgggattgtataactaatattttttggcagggtctcactctgtcacccaggcaggagtgcagtggcgtgatcatggttcactgcagcctctacctcctggcctgaggtaatcctcccacttcagccctctgaatagttgggactagagctgtgcaccaccacacctagttaatttttttgtttttgttttttttggtttttgttttgttttgttttgtttttgtttctgagatggagtcttgctctgttgcccaggctggagtgtagtggcgcgatctcggctcactgcaagctccacctcctgggttcatgccattctcctgcctcagcctcccgagtagctgggactacaggcgcctgccaccaagcctggctaatttttttttgtatttttagtagagacagagtttcactgtgttagccaggatggtctcgatctcctgacctcgtgattcgcccaccttggcctcccaaagtgctgggattacaggcgtgagccactgcaccctgccatttttttgtattttttatagagatggggttttgccaaggggtggtctcaaacttctgggctcaagtggtcctcccgccttggcctcccaaagtgctgggactataggcatgagccactgcttcctgcctgtataactgttatcactatccaattccagtacattttcayccagaaaaagaaaccgtgtactcattagcagtcactctgcttactttcattctctatgccttggcaaacactaatctactttctgtctctgtcgatttgcttattttggacatctcatataaatggaatcatacaatatgtagcatttagtgtgtgggttctttaarcattatattttcaaggcctatccatgttgtttcatgtaacagtacttcatttctttttatggctgaatactccccatttggttaagccattcatcatttgatggacatttgggttgtttccacttttagctgttctgagtaatcctgctatgagcattcatgtactaagttttcttttacatttgctcttttactgtgtccaatctaaccatccatagagttttaatttcaaacactgtatctttaatttcttttcttttttttgtatctttaatttctaagatttctttttttttttttttttttttgagagtctcgctctatcgcccaggctggagtgcaatggcgtgatctcagctcactgcaacctccacctccctggttctagcagtcctcctgcctcagcctcccaagtagctgggattacaggcattcaccaccatgcccggctaattttttaaatatttttagtagagacggggtttcaccatgttgtccaggctggtcttgaactcctgacctcaggtgatccacccgtcttaacctcccaaagtgctgggattacaggcatgagccaccgtgccgagccagtttccaagatttctaataccccattactttctgtttaatttacgacagtgtttccttgtttcatggcttctttttctttttaaaggtataaaatatagatacttatttaaaaatctctcccagattgttctattaactttatttccttaggtataagtgcattggttgatgtgtattatcgttttcatggtattaatcttctttgcctggtaatttttaattaagagctaattgttcatgatatgtttaatctgaacacattttgtgttgacaactgtcccgtaggaggctctctgagttgctgagccttagccttgtatgatgtatacctaggattaatctttgtatgggtggtaagatgcaaagctcttgcatcttaatagattatatagttctgagtcctttcaccacttacatgaaatggctctatggccctcatctcatatcagtgaggctgctgccagaatccccttggctgtaaccaacattcaggtagacaggcagtgcacctctagtccttgttcatgtgttgctcccttgcttagacctcctgtgtgtggctcttgctcttaaacctatgagtgttacagtattagctctatgttttttcctagtctaggcccaaatactatgcatctttttagttcttgtctactattgtggaatctctcttttgttccctttttgttgttcttttcaaaggaggagaaagaagaacacctttccatttctggtctataaagatttctctcttctggccagatatggtggcttacacctgtaatcccagcacttnnnnnnnnnnnnnnnnnnnntccctggctgtgccttatcttctttaggagaatggagggtaaacaatctggagcaattaatggttagtcagctctgaaactattcatgtcaagtagcaataaaaaggtgattccagtgaaccaagaagggcaattctaggaaatgaggttctgtgtttcagtcagcctgaacaagcagtaagttgtatacataacatttatatatattatgtaagcatcctgacaagtctatgaagtgggtaggatgaggattatcaccccattttacagaccagaaagttgagattcagagaacttgactgactctcccagtgtcatacaacagttaaatggcagaattagaacttgaaccaaagtctgactcatatagatcagggctatttcaatatttacttattcatccagacgtgtgtttgttcaagtcagtgtcagtgagctagatactatctgtaggtacagtgtcttaagatatgttacttgatcctggctgggcgccgtggctcacacctgtaatcccagcactttgggaggctgaggcgggtggatcatgaggtccggagattgagaccatcctggctaacacggtgaaatcccgtctctacaaaaaatacaaaaaattagccgggtgtggtggcagcctgtagtcccagctactctggaggctgaggcaggagaatggtgtgaacccgggaggcggagcttgaagtgagccgagatggcgccattgcactccagcatgggtgatagagtgagactctgcctcaaaaaaaaaaaagatatgttacttgatcccaaggaacctggaatataaatagaaagatcaagaagtaaacacgtaattacaatacggtgtgattcccaggatggatgatagaagtgagccctgaatgctatgttagcatggaggaagggcatctaatccatgggaagaggttgaagtctggaggtcttgatgagactgaaaaacagatttgctgggtgtaggagattctgacacttgaaagaataggaagttgttatcagagtgataaagtttctcttatttctttattgcaaaagtagtgtttccctcagaaaaatcaaagtatgatcaaaacaaacatttagaatacacataatttggcctttcaaggcagccgttattaacaccttggtgtacatcttttcacaatagagtgggacatttcaatttaagattttcagaatggaacagttccaagccgtggccatggaaataggtggctgggaatgagtggaggtcaaggtcattattgttgaagaggtcagggaactgtgagactaagttattgcttaggctagttatctgcttggatatggatgtcagtcaagatgatgacagcatttggcatacagaggaaaactgtgagcttagtgaccagcagtcagctggtgatggagatgagaagtaaaataatagtatagtcaaacggcattagcctcaagggaacaaggatttcctcatgcatttcttccattatatctcattgtttttggtactgtgcagctatgtagacaatatttgaatgaagagaatgagaagagataaaagggagattgtaaaagatttcatcatggatgcctcaattgaggagaaaggttaagtagcaaggttcacagcaaaggctaatagagactccatggaaaagctataataaatgatccattaatttgggcctgcgaggaaagtcaattgcaaggaagactgaggaaagtttcatttaggagagatattgggttttgtgtttatgcccacagctagtcttacatcttggtgttcattaggctgggtaacatgtcccttcaaaagcaatctgattttataagatcttcttgacagctttatccagtttaatatttatttttgtaataatactaagtgatcaagtgaatggagttatacatatatacatacaaacatatatatgcacaaacatatctatatatttatacatctgtacttctgtgtgtatgtatctaaggtgagggggcaagagagagagacagactttcttctagaaagtgatataagggctcatgactgtataagttcatatttgaaaacatacttctatattctgtcatataattagacatatttaaaggtgaaggctaaaaccatatgattcaatagtagtttctgctgtgcacggctggcagcatctatttttttcataacagtaaataagtaaattcactgcttctgtaggtatgtcaggctggggtactgggtctctaacacccaacacccaactgtaaaaggctttgtcatctctctcttcctctttctaataatttttttttttttttttgggagggagtcttgctctgtggcccaggctggagtgtagtggcgcgatctcagctcactgcaagctccgcctcccaggttcatgccattctcctgcctcagcctcctgagtagctgggactacaggcactcgccaccatgcctggctaattttttatatttttagtagagatgggctgtgttagccagatggtctcgatcttctgacctcatgatccgcctgcctcggcttcctaaagtgctgggattacaggcgtgagccgccgcacccagcttcctctctctaataattctatgagtagatcttaaaagggtcctctaaccccttttaaggggttagttgtgttgtattaattatcctctctgacnnnnnnnnnnnnnnnnnnnntgccgggattacaggcataagctaacacgcccagcctacaatttcaaatatatggatccttaaaacagttctgtgaggtcaaagcggtaggttttatccctattttgcagattaggaaatgaggtccagagcagtgattttttttttttcaagagtatttaagtaattttttttttttacagaaccagtactagaacacaggtcttctgacttttgagctttttgctcttcagcttttccttataaataaatgtttggattaatggattgatgtcaaaaataggttccttttagtgtttgctccttccgactccactcagattctttttttaaaatttctttctaaaaaagcataactcagattcttaatacagattgttccaaagcacattaggatggtggagttattcttaccaacttcagtctgaattacttttaaatttgtccccaaaggtggttttgacattatgggttttactctgatctttrttctcgtgtcttctgaagttccgtgtaatagatactctaacccaagaagtgatggctatttagattttcttttgcatacaattctcattcccaaagatgtctccctttsgttgtccaaaaagctttctgaggtatagttacttttagaagaggaaatacckttttaattcatttgtgctcttgagattgtgtatgtgtggtaggtgtttttgttgtattattacaggttgatgaaaagcccagaaccttgatgacagattgtctggttataaagcattttttacgtaaaatcatcatggtgcaccctaaggtaagctgttcctttgtacaataatgattctcttatttaagtcattgttttccagagacctttactgtgtaggacatggacagatgtgattggttctttttctttcaatgaagatgattaaaacgtttaatatttgaggtcatggtggctcatacctgtaatcccaacattttgggaggccgaggcgggaggatcgcttgagtccaggagtttaagaccagccaaggcaacatggtgagactctgtctctacaaaaaaaattttaaaaattagccaggtgtggtagtgagctcctgtaatcccagttcctcaggagggtgaggtgagaggattgcttgagcccaggaggttgaggctgcagtgagccatgattgtgccactgccctccagcctaggtgacagagcgagaccctgtctttggaaaaaaaaaaaaaaaaagacaactttcaactttcaatattgaattgatttggtttctatgtccttaagacagttgttttttttttttttagagagacaaggtctcactatattgcctaggctagtctctaactcccaggctttaacaatccttctgctttggcctcccagtgtgctgggattacaggtgtgaggcactgcacctggcccaggcaatctttttttttttttttgagacagagtcttactctgttgcttaggctggagtgcagtggcatgatcccggctcactgcaacctctgcctcccagattcaagccattctcctgcctccgccttcctagtagctgggattacaggtgtgcaccaccatgcccggctaatttttgtattttcagtagagacagggtttcactgtgttggccaggctggtctcaaactcctgacctcaggtgatccacacacctcagcctcccaaagtgctgggattacaggcctgagtcaccacacccagccaaggcaatcttaatgttggttatgtgttatagcgagaaacctctggatagagagagctttgttttgggttattttcacttttttttattgctttattgtatcactttagatacctcttccctcctctgtgctttgttttttgttaaagctagataataaaccttgctgtttatctccttttctaaagtgactataagaacaaataaggacttttttttttcctgagacagggttttgctctgtcacccacgctggagtgcagtgacttgatctcggctcactgcagcctctacctccaaggttcaagtcattctcctgcctcagctccctgagtagctgggattacaggtgtgcaccaccacacctcgctaatttttgtatttttagtagagatgggatttcgccatgttggccaagctgatcttgaactcctagcctcaagtgatccacctgtctcagactctcaaaatgctgggattacaggcgtgagccatcatcatgcctggccaagaaattttgatagaatattttgaatattagagagctaaattttttattatctgtagttagatatgtttataaagataaacacttaagcatatctatgacatcccccttctgccatcttcctactttttgcctattgtttcagtcactattctaagtgctctttgtgcactcgctcacttaactcttacaacaccccttgtgaagtaagttttatcatcatcatccgcattttgtagctgagaaaactatggtacagagagtaaataacttgaagagtcaggatttgaactcaggcagtctggttctagagtcacttcttaccttatgttacacagaaagaaaaatataggtgaatggagagaataattagaacagtgaggtacactggagaggatataaaagtcagatggagaagaggaagaaaaagcaaagaaaaaagcatggaatgttccacatatgaaaataatagaaataaaaatggatagttcctttaaaaaggaggtgaaggggctgggtgtggtggctcacacctgtaatcccagcactttgggaggccgacttgggcggattgcttgagctcaggagttccagaccagcctgggcaagatggtgaaactctgtctctactaaaaatacaaaaattagtcgggtgtggttccatgcacctgtggtcccatctacttgaggggctgaggcaggagaatcgcttgaacccaggaggttgaggctgcagtgaaccgtgtttacaccattgcactccagcttaggtgacaaagtgactctgtctcaaaaaaaaaaaaaaaaaaaaaaaagttaagggataggggttgagagaatggcaaagaggcagggatgatttctgataatttgtgacaacctggagctgtgatatagggctcaatatatttaagatttagaatttaaacacaggcaagcattaagtatgtttagggaaaatacaagtgataaagaatgtattttttggccgggcgtggtggctcacgcttgtatcctagcactttgggaggccgaggtgggtggatcacaaggtcaggagattgagaccatcctggccaacatagtgaaaccttgtctctactaaaaatacaaatattggctgggcacagtggctcacgcctgtaatcccggcactttgggaggccgaggtgggcagatcacctgaggtcaggagttcgagaccagcctggccaacatggcgaaaccccgtctctactaaaaatacaaaaattagccgggcatggtggcgcacgcctgtaatcccagctactcaagaggctgaggnnnnnnnnnnnnnnnnnnnnctgcctcagcctcctgagtagctgggactacaggcactcgccaccatgcctggctaattttttatatttttagtagagatgggctgtgttagccagatggtctcgatcttctgacctcatgatccgcctgcctcggcttcctaaagtgctgggattacaggcgtgagccgccgcacccagcttcctctctctaataattctatgagtagatcttaaaagggtcctctaaccccttttaaggggttagttgtgttgtattaattatcctctctgacctgacattagtcactttatcctaactctgggataggtgtcggtccttctgctgtattcctttagcacctcatttatctaaatttcacattgtcatataaattagtctgtctcatctactgaactgtgaactcttctaattctgagattgtcttatttatttttataagcccaggtacataataagccacattaatattttatgagtgagtaaatgcatatattgagtagccatacataagcattgcttgtcaggctccataaaaaataatgatggattatatattaccccattcagatagctacctgtatacacagaaaatgaacatttttggagaggcagcattggatrgtagaatgtggactttggagttagtcagctctaggtttgaatcccagtgctgccacttaactagctgtgtatgaccttggacaaattaattagcttattgagtctcattatcctcttctataaaatggagttatttcttacttgcatagaaactgcttgacatgtagcaagtagtcagtaaatatcatcattattcattgtagtctctctccagtagttgctcaaggaactttcacttcggttgtcttactgttagatataattagccctctctatgatacgccctataatcaccaaggttacaaagctttgaaagtgttccaagaagttgttttggaagtggtaagcacagaaaatgctttaaagactattgctttttggtttaaacattttatactaaaattttaaaaatgaaggatgtgactatgatatgtataccaattgcagttattatttaattaccactgttaacatgcatgaataatcctagacatatttacagaattttctaataatcccccatccattttggtaataatggttttttttttttgagatggagtctcactctgtcacccaggctggagtgcagtggcacgatctcagctcactgcaacctccattccaggttcaagtgattctggtgtcttagcctcccaagtagctgggattacaggtgcacgccatctgtaatcggctaatttttttttgtattttttcagtagagatggggtttcaccatgttggccaggctggtcttgaactcctgacctcaagtgatctgcccgcctcagcatccgaaagtgctgggattacaggcatgagccactgtgcccagcccatttttgttaattttttcaaatactttttcaaataattttttctttttttgttttttttttttttttttttagacagagtctttctctgtcacctagcctggagtacagtggtgtgaycttggctcactgcaacctccgccttccaggttcaagcagttctctgcctcagcctcccgagtagctgggatcacaggtgcccgtcaccactccaggctaatttttgtatttttagtagagacggggtttcatcatcttggccagccctggtcttgaactcctgacctcaggtgatccacccgccttggcctcccaaagtgctgggattacaggtgtgagccactgcacctggcccaattttttctatctttaatcccaacctattgccacagtttttgacttctttttcagtgtacttataaaaaacattaaaaggccaggtgcagtggcttatgtgtaattctagtgctttgggaggccaaggtgggaggactgcttgaggccaagagtttgagaccagcctgggcaacataatgagaccctgtctctacagaaaattaaaaaataaaaattatccaggtgtggtgatacacacttgtagtcctggctatttgggaagctgaggtgggagggttgctggagcccagaagttcgaggttacagttagctatgatcatgccactgcattccagcctgagtgacaaagcgagaccctgtttctaaaaaaaaaaaaaaaaaaaagtaataaaataaaaatattgtaatagtttatccttctatatttgcatgtttcttctttttgtattatcatattttgacatctgggaccattttttttgttttttgtttttaacatatacctagtacatggctgtgtattctctgagccaacaataaaaacctactgatttctgattgtatttcttctttcatttttttggagttctgcattttctaggagactgtttctaactttggttttaggaacactataatagtgagtcagtataggtaagtggttaatgctaaagatttatagccaagttgacctggctaaccttggacaagctgtttaacctttttgagactgcttttgtaaaatatttatttttattttccttcatttttaaaaatccagatcctgcacaatcttttatttataaaatttgggtacctaatagagtttttgtgaaggttaaatgagataatataaataagataccttagcaccataccctgctgtaaaatcatcacctagtggtaaatacttatatttgtagggaagtgtgttgtagtatattggcaagaacatgggcannnnnnnnnnnnnnnnnnnnnnnnnnnnnnnnnnnnnnnnnnnnnnnnnnnnnnnnnnnnnnnnnnnnnnnnnnnnnnnnnnnnnnnnnnnnnnnnnnnnnnnnnnnnnnnnnnnnnnnnnnnnnnnnnnnnnnnnnnnnnnnnnnnnnnnnnnnnnnnnnnnnnnnnnnnnnnnnnnnnnnnnnnnnnnnnnnnnnnnnnnnnnnnnnnnnnnnnnnnnnnnnnnnnnnnnnnnnnnnnnnnnnnnnnnnnnnnnnnnnnnnnnnnnnnnnnnnnnnnnnnnnnnnnnnnnnnnnnnnnnnnnnnnnnnnnnnnnnnnnnnnnnnnnnnnnnnnnnnnnnnnnnnnnnnnnnnnnnnnnnnnnnnnnnnnnnnnnnnnnnnnnnnnnnnnnnnnnnnnnnnnnnnnnnnnnnnnnnnnnnnnnnnnnnnnnnnnnnnnnnnnnnnnnnnnnnnnnnnnnnnnnnnnnnnnnnnnnnnnnnnnnnnnnnnnnnnnnnnnnnnnnnnnnnnnnnnnnnnnnnnnnnnnnnnnnnnnnnnnnnnnnnnnnnnnnnnnnnnnnnnnnnnnnnnnnnnnnnnnnnnnnnnnnnnnnnnnnnnnnnnnnnnnnnnnnnnnnnnnnnnnnnnnnnnnnnnnnnnnnnnnnnnnnnnnnnnnnnnnnnnnnnnnnnnnnnnnnnnnnnnnnnnnnnnnnnnnnnnnnnnnnnnnnnnnnnnnnnnnnnnnnnnnnnnnnnnnnnnnnnnnnnnnnnnnnnnnnnnnnnnnnnnnnnnnnnnnnnnnnnnnnnnnnnnnnnnnnnnnnnnnnnnnnnnnnnnnnnnnnnnnnnnnnnnnnnnnnnnnnnnnnnnnnnnnnnnnnnnnnnnnnnnnnnnnnnnnnnnnnnnnnnnnnnnnnnnnnnnnnnnnnnnnnnnnnnnnnnnnnnnnnnnnnnnnnnnnnnnnnnnnnnnnnnnnnnnnnnnnnnnnnnnnnnnnnnnnnnnnnnnnnnnnnnnnnnnnnnnnnnnnnnnnnnnnnnnnnnnnnnnnnnnnnnnnnnnnnnnnnnnnnnnnnnnnnnnnnnnnnnnnnnnnnnnnnnnnnnnnnnnnnnnnnnnnnnnnnnnnnnnnnnnnnnnnnnnnnnnnnnnnnnnnnnnnnnnnnnnnnnnnnnnnnnnnnnnnnnnnnnnnnnnnnnnnnnnnnnnnnnnnnnnnnnnnnnnnnnnnnnnnnnnnnnnnnnnnnnnnnnnnnnnnnnnnnnnnnnnnnnnnnnnnnnnnnnnnnnnnnnnnnnnnnnnnnnnnnnnnnnnnnnnnnnnnnnnnnnnnnnnnnnnnnnnnnnnnnnnnnnnnnnnnnnnnnnnnnnnnnnnnnnnnnnnnnnnnnnnnnnnnnnnnnnnnnnnnnnnnnnnnnnnnnnnnnnnnnnnnnnnnnnnnnnnnnnnnnnnnnnnnnnnnnnnnnnnnnnnnnnnnnnnnnnnnnnnnnnnnnnnnnnnnnnnnnnnnnnnnnnnnnnnnnnnnnnnnnnnnnnnnnnnnnnnnnnnnnnnnnnnnnnnnnnnnnnnnnnnnnnnnnnnnnnnnnnnnnnnnnnnnnnnnnnnnnnnnnnnnnnnnnnnnnnnnnnnnnnnnnnnnnnnnnnnnnnnnnnnnnnnnnnnnnnnnnnnnnnnnnnnnnnnnnnnnnnnnnnnnnnnnnnnnnnnnnnnnnnnnnnnnnnnnnnnnnnnnnnnnnnnnnnnnnnnnnnnnnnnnnnnnnnnnnnnnnnnnnnnnnnnnnnnnnnnnnnnnnnnnnnnnnnnnnnnnnnnnnnnnnnnnnnnnnnnnnnnnnnnnnnnnnnnnnnnnnnnnnnnnnnnnnnnnnnnnnnnnnnnnnnnnnnnnnnnnnnnnnnnnnnnnnnnnnnnnnnnnnnnnnnnnnnnnnnnnnnnnnnnnnnnnnnnnnnnnnnnnnnnnnnnnnnnnnnnnnnnnnnnnnnnnnnnnnnnnnnnnnnnnnnnnnnnnnnnnnnnnnnnnnnnnnnnnnnnnnnnnnnnnnnnnnnnnnnnnnnnnnnnnnnnnnnnnnnnnnnnnnnnnnnnnnnnnnnnnnnnnnnnnnnnnnnnnnnnnnnnnnnnnnnnnnnnnnnnnnnnnnnnnnnnnnnnnnnnnnnnnnnnnnnnnnnnnnnnnnnnnnnnnnnnnnnnnnnnnnnnnnnnnnnnnnnnnnnnnnnnnnnnnnnnnnnnnnnnnnnnnnnnnnnnnnnnnnnnnnnnnnnnnnnnnnnnnnnnnnnnnnnnnnnnnnnnnnnnnnnnnnnnnnnnnnnnnnnnnnnnnnnnnnnnnnnnnnnnnnnnnnnnnnnnnnnnnnnnnnnnnnnnnnnnnnnnnnnnnnnnnnnnnnnnnnnnnnnnnnnnnnnnnnnnnnnnnnnnnnnnnnnnnnnnnnnnnnnnnnnnnnnnnnnnnnnnnnnnnnnnnnnnnnnnnnnnnnnnnnnnnnnnnnnnnnnnnnnnnnnnnnnnnnnnnnnnnnnnnnnnnnnnnnnnnnnnnnnnnnnnnnnnnnnnnnnnnnnnnnnnnnnnnnnnnnnnnnnnnnnnnnnnnnnnnnnnnnnnnnnnnnnnnnnnnnnnnnnnnnnnnnnnnnnnnnnnnnnnnnnnnnnnnnnnnnnnnnnnnnnnnnnnnnnnnnnnnnnnnnnnnnnnnnnnnnnnnnnnnnnnnnnnnnnnnnnnnnnnnnnnnnnnnnnnnnnnnnnnnnnnnnnnnnnnnnnnnnnnnnnnnnnnnnnnnnnnnnnnnnnnnnnnnnnnnnnnnnnnnnnnnnnnnnnnnnnnnnnnnnnnnnnnnnnnnnnnnnnnnnnnnnnnnnnnnnnnnnnnnnnnnnnnnnnnnnnnnnnnnnnnnnnnnnnnnnnnnnnnnnnnnnnnnnnnnnnnnnnnnnnnnnnnnnnnnnnnnnnnnnnnnnnnnnnnnnnnnnnnnnnnnnnnnnnnnnnnnnnnnnnnnnnnnnnnnnnnnnnnnnnnnnnnnnnnnnnnnnnnnnnnnnnnnnnnnnnnnnnnnnnnnnnnnnnnnnnnnnnnnnnnnnnnnnnnnnnnnnnnnnnnnnnnnnnnnnnnnnnnnnnnnnnnnnnnnnnnnnnnnnnnnnnnnnnnnnnnnnnnnnnnnnnnnnnnnnnnnnnnnnnnnnnnnnnnnnnnnnnnnnnnnnnnnnnnnnnnnnnnnnnnnnnnnnnnnnnnnnnnnnnnnnnnnnnnnnnnnnnnnnnnnnnnnnnnnnnnnnnnnnnnnnnnnnnnnnnnnnnnnnnnnnnnnnnnnnnnnnnnnnnnnnnnnnnnnnnnnnnnnnnnnnnnnnnnnnnnnnnnnnnnnnnnnnnnnnnnnnnnnnnnnnnnnnnnnnnnnnnnnnnnnnnnnnnnnnnnnnnnnnnnnnnnnnnnnnnnnnnnnnnnnnnnnnnnnnnnnnnnnnnnnnnnnnnnnnnnnnnnnnnnnnnnnnnnnnnnnnnnnnnnnnnnnnnnnnnnnnnnnnnnnnnnnnnnnnnnnnnnnnnnnnnnnnnnnnnnnnnnnnnnnnnnnnnnnnnnnnnnnnnnnnnnnnnnnnnnnnnnnnnnnnnnnnnnnnnnnnnnnnnnnnnnnnnnnnnnnnnnnnnnnnnnnnnnnnnnnnnnnnnnnnnnnnnnnnnnnnnnnnnnnnnnnnnnnnnnnnnnnnnnnnnnnnnnnnnnnnnnnnnnnnnnnnnnnnnnnnnnnnnnnnnnnnnnnnnnnnnnnnnnnnnnnnnnnnnnnnnnnnnnnnnnnnnnnnnnnnnnnnnnnnnnnnnnnnnnnnnnnnnnnnnnnnnnnnnnnnnnnnnnnnnnnnnnnnnnnnnnnnnnnnnnnnnnnnnnnnnnnnnnnnnnnnnnnnnnnnnnnnnnnnnnnnnnnnnnnnnnnnnnnnnnnnnnnnnnnnnnnnnnnnnnnnnnnnnnnnnnnnnnnnnnnnnnnnnnnnnnnnnnnnnnnnnnnnnnnnnnnnnnnnnnnnnnnnnnnnnnnnnnnnnnnnnnnnnnnnnnnnnnnnnnnnnnnnnnnnnnnnnnnnnnnnnnnnnnnnnnnnnnnnnnnnnnnnnnnnnnnnnnnnnnnnnnnnnnnnnnnnnnnnnnnnnnnnnnnnnnnnnnnnnnnnnnnnnnnnnnnnnnnnnnnnnnnnnnnnnnnnnnnnnnnnnnnnnnnnnnnnnnnnnnnnnnnnnnnnnnnnnnnnnnnnnnnnnnnnnnnnnnnnnnnnnnnnnnnnnnnnnnnnnnnnnnnnnnnnnnnnnnnnnnnnnnnnnnnnnnnnnnnnnnnnnnnnnnnnnnnnnnnnnnnnnnnnnnnnnnnnnnnnnnnnnnnnnnnnnnnnnnnnnnnnnnnnnnnnnnnnnnnnnnnnnnnnnnnnnnnnnnnnnnnnnnnnnnnnnnnnnnnnnnnnnnnnnnnnnnnnnnnnnnnnnnnnnnnnnnnnnnnnnnnnnnnnnnnnnnnnnnnnnnnnnnnnnnnnnnnnnnnnnnnnnnnnnnnnnnnnnnnnnnnnnnnnnnnnnnnnnnnnnnnnnnnnnnnnnnnnnnnnnnnnnnnnnnnnnnnnnnnnnnnnnnnnnnnnnnnnnnnnnnnnnnnnnnnnnnnnnnnnnnnnnnnnnnnnnnnnnnnnnnnnnnnnnnnnnnnnnnnnnnnnnnnnnnnnnnnnnnnnnnnnnnnnnnnnnnnnnnnnnnnnnnnnnnnnnnnnnnnnnnnnnnnnnnnnnnnnnnnnnnnnnnnnnnnnnnnnnnnnnnnnnnnnnnnnnnnnnnnnnnnnnnnnnnnnnnnnnnnnnnnnnnnnnnnnnnnnnnnnnnnnnnnnnnnnnnnnnnnnnnnnnnnnnnnnnnnnnnnnnnnnnnnnnnnnnnnnnnnnnnnnnnnnnnnnnnnnnnnnnnnnnnnnnnnnnnnnnnnnnnnnnnnnnnnnnnnnnnnnnnnnnnnnnnnnnnnnnnnnnnnnnnnnnnnnnnnnnnnnnnnnnnnnnnnnnnnnnnnnnnnnnnnnnnnnnnnnnnnnnnnnnnnnnnnnnnnnnnnnnnnnnnnnnnnnnnnnnnnnnnnnnnnnnnnnnnnnnnnnnnnnnnnnnnnnnnnnnnnnnnnnnnnnnnnnnnnnnnnnnnnnnnnnnnnnnnnnnnnnnnnnnnnnnnnnnnnnnnnnnnnnnnnnnnnnnnnnnnnnnnnnnnnnnnnnnnnnnnnnnnnnnnnnnnnnnnnnnnnnnnnnnnnnnnnnnnnnnnnnnnnnnnnnnnnnnnnnnnnnnnnnnnnnnnnnnnnnnnnnnnnnnnnnnnnnnnnnnnnnnnnnnnnnnnnnnnnnnnnnnnnnnnnnnnnnnnnnnnnnnnnnnnnnnnnnnnnnnnnnnnnnnnnnnnnnnnnnnnnnnnnnnnnnnnnnnnnnnnnnnnnnnnnnnnnnnnnnnnnaaaaaaaaccacaaaaaactaactgtattccattgtgtatataccacattttcttaatcaaccagaaagacaaatactgtatgatttcacttatatgtggaatctgaaaaagtcaaactcatagtagagaatagaatggtggttaccagaggctgggagtgggttaaggaaggaaatagggagttgttagttaaagtgtacaaagtttcagttagacaggaggaataagtctttagaatcttatttcacaggggggtgactatagtcaataataatgtattatatatttcaaaatagctgagagtaaatttcaaatgtcttaccacaaaaaatgctagtaagttatgtgatagatgttaatctacttgatttaatcattccacattatatacatatatcaaaacaccacattgtaccctatgaatgtatacagttatagtttatcaattaaaagtaatgttaatttaaaattttttaagcttattcttttcctttagggattagatatggaagtttttaatctgtatcttggctcatgttaaatctcacacttaacttattgttttgcaggtcagatttcatttcagtgtaaaggtaaatggaatcctctccacagagatctttgggtaagttcttaggtctatggcttaagatgatgctatggctctgcaatttttctcagctattattgtcctatttccaaaaggttcacagtttgatatcttgacccaaagtcaccttgaaactaattttctgacacccccacattttattattttagtagattcatccctgtctctagagggggtaaacttaaagattgccattttccccttggttaattagttactgaattctagtaatcgctggggtggtagtagtcatgggccaaaatttatgtcaaacagagattgattttagaatctttgagagatggcttagctttgctttgctttgcagggtggagaatgaacccactttgaaccttgggaatggaattgctcttttggtcgactcccagcattatgtgaggtgaaggcgtaaagccttgttgtccctctgcatgttttactctcctctcgagtacgaatgtgggtagaaattggaaattgtctcacttgtcatttgtaagtgccaggtgtcagcttctctataagaaaagcagaagtaaaacttttttttatgttgaaaactgctattttaagttatttatgtatttgaatctattctaaatgacctgaagacatgtgccttcttctcttcaggccttattttacacagaccctgctagttccaatcccatttaggcatgagaagagaagactatgaatttaaaactttacttgaattcttggctagagagatagtatgaatacaaaggaattcagtgtacattattttytgtgcatcagcattttgcataggtttggaaatcatctctctgcccatctccatcttcttcagactccaagaaagtaaatctggccaggcgcagtggctcatgcctataatcccagcactttgggaggctgaagttgatggatcacttgaggttaagagtttgagaccagcctggccaacatggcaaaaccctgtctctgctaaaaatacaaaaattagctgggcatggtagcacatgcctgtaatcccagctacttgggaggccaaagcatgagaatcacttgaacccaggaggtggaggttgcagtgagccgagatcacgccactgcactccagcgacagagcaagactctgtctcaaaaaaaataaataaataaaaaatgtaaaaaatccatggaggaggtggtaaacaatatggaacacacagagcccttctgtcttgccttcctgtgccatttaactaccacagaatccaaagtgaaaatgaattatgtcaagaaaagacctaacatatgcttaagtccaattaatttattttttctttttttgagacagggtctcagtctkttcaacccagatgccatcatagctcactgcagccttggtctcctgggctcaagtcattttcccacctcagcctctcgagtagctagtagctaggaccacagaaatatgctaccatacgctgctaatttttttttttttgagacggagtctcgctctttcgcccaggctggagtgcagatctcacctcactgcaacctccacctccctggttcaagcgattctcctgcctcaatctcctgagtagctgggactataggtgcatgccaccacgcccagctaatttttttgtatttttagtagaaatggggtttcaccatgttggccaggatggtctcaatctcctgacctcgtgatcctcctgcctcggtctcccaaagtgctgagattacaggcatgagccactgcgcccagcccatatactgctaatttaaaaaaaatttttttttgtagagatgaggttgttgcctaggctggtgtcaaactcctggactcaagcaatcctcctgcctcggcctttcaaagagctgggattacagatgtgagccaatgtgtccagccctaatttagtctttattcattagtttctgcctctatttatgtgcccagaggcaacactagtagtcaaagtctcttaaggcttaaagagactgcctgtggttcttagtctgttttcttattctcacccaaaattacacctcagatgagaatatttttgtcatttaatatgcaggtaataatttccccaccccatatctttctttagtgatcctctaataataaacaatccttacaggtagcagctcatcatcatagttgtactgacacaagtttaagcctttgagccaatttttgtagatgtgtttccttggatgacctgattagagacaaagggaaaggttcattaatatttcctctctattaattaattcattcattcttaatcagctttctcaggttgactgttttctctctgtttagaaaagagctattggaaagtaacaaaattttactagattctttctaggagagaaagatggcctggttttttctcattgttactatcaaacagcaacctcagacctcttcagcggaaggtgtagcatgcgtgagagcagacttataagtatcatggggccagttttaggccatttgtgattcatgggccccctcacacaatgctgacctttgaatgaatttggaaatttgctcagaaccaaagattaattttagtggaggaartatacttgagaataagaaacaggctggtcatgatatctcacacctgtagtcccagcactttgggaggccaaggcagaaagattgcttgaggccaggagtttgagaccagcctaataaacatagtgagaccccatctctaataaaataaaataatagtaattatttttcgagacaaagtctcgctctgttgctcaggctggagtgcagtggcgcaatatcagctcactgcaacctccgcttcccaggttcaagcgattctcctgcctcagcctcctgaatagctgggattacaggtgtgcaccatcatgcacagctattgtatctttagtagagatggagtttcaccatgttggccaggttggtcttgaactcctgacctcaagtgatccacccacctcagcctcccaaagtgctgggattacaggcatgagccacaatgcctggtctaaaatgtttttttaaaaagagaaactaagaagcatccgttagtggcagcaaaagcaggagcaatgatatctctgaaatgccagtttttctactacttccattgctgtgattccctgagtgagacataagttatttattccaacaaaactgatatggcaggttgtgtggttgtacatatgctagaggttacaaaaataattttgaatgctcttttaaataatttcttaagaggaaaaaatgttaaatttgacttgtctgttttctgacagtagaccaaattttggtacaattgaatcacactgcagcagaattcaccctgtgctaggacatccagtaatgcttttcatccctgaagacgtggctggcatggacttgttgggagaactgatactgactccagcagctgcactgtgccccagcccaaaggtttcttccaaccagcttaacaggatttcttcagtttccatatccttttgatgaaaagttccatccaattatctttgaaatgggtttttatatcccagttttaggaaagcctttagtatgtgaattctgcatctacaaatatatatgatttgtataaaaacatataatctaatgtgaaagccaagcttgaaaattttgccagggaactgaaaactgtaaaatgtgacacatgccatgcgtttttcatacaatccaatatgactgaagcatgaaatgaatggtgcacgaggaagagatgggactagaaaagtagtctggagttgaatatggtagatcttgagtgccatactaaggattgtgaattttattctctgtatagtaagaaaccattgaatgttttgggagaagtctttagcagcattatagagtacggatgggagacagaagttagtaatactaagtaaataagtaagtgaactggattaaaaataatgagtgcttgacggctgggtgcagtggcttacacctgtaatcccagcactttggcaggccgaggtgggcggatcacttgaggtcaggggtttgagaccagcctggccaatatggtgaaaccctgtctactaaaaatacaaaaattaggccgggcgtggtggctcacacctgtaatcccagcactttgggaggctgaggcggatggatcacaaggtcaggacttggagaccagcctggccaacatggtgaaaccccatcttagtaaatacaaaaattagctgggcatggtggcaggcgcctgtaatcccagctactcaggaggctgaggcaggataatcacttgaacctgggaggcaaaggttgcagtgagccgagatcgcagccactgcactccagcgtgggcaacagagtgagattccgtctcaaaaaaataaattaattaaagccaggcgtggtggtgtacgcctatagtcccatctacttgggaggctgaggcaggagaatcacttgaacctgggaggtggaggctgcagtgagccaagaacacgacactgcactctagcctcggtgacagagcaagactctgcctcagaaaaaataaaaataaaataacaataataatgagtgcttgaatctaaagtgtggtaggcacggaaaggccagacttatcacctgaattaatcaacaaaatgtggtaaccagttcattattaaggtagggagagattaggggcagggaatgtctaaggttgatgtcagatttctattctatgtctgtctagaataggcaaatacagagagaaagttgatggaggggcttttttgtttttttttttggagacaaggtctggctctgttgcacaggccagagtgcggtgacacaatctcagctcactgcaacctctgcttcccggactcaaaccatcctcccacctcagcctcctagagaccacaggtgcatgccaccatgcccagttaatttttgcatttttggtagagacagagtttcaccatgttgcccaggctggtctcaaactcctggactcaagcgatccaccaggctcggcctcccaaagttttgggattacaggcataagccactgtgctcggcctggaggggcttcttttcagagtaatgaaagtgttctaaaattgatggtggtagtgactgcacaactctttgaatattctaaaatccattttattacacatttaaaatgagtgaattgtatggtatgtgaattgtatctcaataaagctatttaaaaatatttccatgaataactgacagaataatgatactttcagcaagataaaaaaacattaatagcagatttaggagataaagaagatgagtttgacattaaacatgttgagtttatggtgtctcaagacatcctttgaacatagtaaggagctatataggaatttggtctggaacttggaaatggtcagatttagagatacagaattttagagtctcagtttcctccataggtaagagtcgtgtagtgctgtgtttagagcatggcacaggagtgtaaatgttggattcactactaattagctgtgtgactgtaggcaactcacttaaccagcctaagcctttacttcctctgctttaaaatgaggatgatacttatctcataggtttagtttcccttgcaaaaattggttttctgttcttttggggtttgtttgctcgttttagaattaagtataataatccatgtgaagctcctagcatataatgagtactcaataatattaataattgttattgtcatatgattgaagctataggagtaaatgaagttatagaaaattataaacaatgagaacaggccggacacggtggctcatgcctgtaatcccagcactttgggaggccgaagctggcggagcacttgaggtcaggagtttgagaccagcatggccaacatggcaaaaccctgtctctattaaaaatacaaaaattagctggacatggtggcacatgactgtagtcccagctactcgggagactgagacaggagaattacttgaacccaggaggcagaggttgcagtgagcactgcattccagcctgggcgacagagcaagactctgtctcaaaataaaaaaaaagagagaacagaagaggcgtggtatgatagatgtcagctatctgatgttgcatatcagatatcaaaagataccatagtatcttttagggaggtggagggagcaggatagtgatgaagactatgcttggacattttctattttaaaacatgctttttctttatatctagatagtacagaacagtatagaataaataagtttcttcttcttcctcattccatcatctagaagggataagacagacaaattttttgtcctcttggggaaaatttaacagatagatattaggtagtgataagtgcagtggagataaatagaacaaagtagtagagaatgatggagatgttattttaaatatgggcagtgaagcctctaaggaggtgatgttttaaaaaagagagagagctagctatgaaaattctgttgagattttactttctgaaagtggcaaacttgataatttagaccaaccttctcaatgaaggcaaaggctagatgaaatattaaaacatcataaaagcaggccgggtgtggtggctcacgcctgtaatcccagcactttgggaggccaaggtggatggatcacctgaggtcaggagttcgagaccagcctgaccaacatggagaaaccctgtctctattaaaaatacaaaattaaccaggcatggttgtgcatgcctgtaatcccagctactcaggaggctgaggcaggagaatctcttgaacctgggaggcggtggttgcggtgagccgagatcgcgccattgcactccagcctgggcaacaagagtgagactccatctcaaaaaacaaacaaacaaacaaaaaaatcataaaagcatcaaagagctagtgaagaggaagagtttctgtgccatgatttaggagaggtttgaattacagagagctgagcctagcattgggggatgcttttgccctggagcagtttgccaattagagcaagcagttgagaggctaagatgtattaatacttccaaatcagtgcaggacaagaaggccaaagaatccaggacctgctgagcttgggagtgctgctaaaaacacctcttgccttgggcaagggataactagaaggctatattttaaggagtaaggtgaacctgaaataaattactcttcacatggactgtatatgctttttggtcatctaggcaggccagaaaatcttgaactttgaaattggattaggatgattttagatttgttagttctagatgttttatagaagcaaacaaaaatttctagaggaaaataactgcatcctgtgctcccaattatttaacactttttcaaatacagtgtcccatggtgcatatgcacacacacatgcacagtcacaaataaccaggtgtaagaaaggacaagataatatgaacaagagctagcaaaaacaaaatcacagaaacacccactgggactccagatactggtgatatcagatattgactttaaaaagttatgcttagctgggtgtggtggttcacacctataatctcagcactttgggaggctgaggcaggaggattgcttgagcctgcaagttcgagatcagcctgggaaacacagtgagacccccatctctatacaagttacctgtgcatgtgtggtgcatgcctgtggtgccacctactcaggaggctgaagtgggaagattgcttgagcacaggaggtcaggactgcagtgagccatgatcgtgccattgcccttcagcctgggtgacgtgagaccagtttcaaaaaaaaaaaaatgaaaaattatgcttactatgttgatgaaaatgaaagcaaagtttgaaaattttactagaaaactgaaactgtaaaatatgaaataccttttaacaagaacaaaacagaaattgtagaatcaagaaatataatamccaatgttgaataaaattcagtacactggtttaacagcagattaagtacaacttaagtgaatttgtaaactaaaagctaaagatagcaagaacttagcaaaaataaaacaaagagacaagttatggaaaatacagaagagaggggttaacagagtaaagagtaaaactgtctaatgtatatttaattgatgtccaaaaagagaagagagaagagaaaatagggcagaaacaatatttaaagagttaatggctgaaacaactgagacagatttgtgtgtgtgtgtgcgtgtgtgtgacggagtctcgctccgtcgcccaggctggagtgcagtggctcgatctggctcactgcaagctccgcctcccgggttcatgccattctcctgcctcagcctcccaagtagctgggactacaggcacccgccaccacgccaggctaattttttgtatttttagtagagacggggtttcaccgtgttagccaggatggctgagacagatttaagaacagaataatcaagcagtataaataaaaaagatttctacacctaaagagatgaaaaacagagaagaatcttaaaatcagtcaggaggacaaatcatctttaaaagataaattaacagttgacttccccataccaacagaaggtgttagactaatagtgttaatgtcttgaaataaaatcattaccaacctagaatttcatatccaatccaaatattcctcaacataaaaggtaataaacttacctgtatattatgttaaaattataatccacgtaacaagaagaattaattcaacagactttagaacatggtgttttgactatacgttcttagcaggatatactctaaggatgaaatggaagtccaaagacctcttaaaatttattcagtggcatgattgttagtaataatattggtattttatattggaattattgtatgcatacttatgataaataattatgttaacaatgttaggaaccaaagtttttagcatcagatagaagatatgtgagtgtaaattcagagaaataactattttttttaaagggatctcactctgttgcccaggctaaagtgcagttgtgcgatcatagctcactgcaacctcgaacttytggggttaagcagtcctcctacctcagcctctcctgagtagctgggactacaagcatgcaccatcatgcctggctaatttttttatttttattttttgtagagacagggtctcacccccgagtttccaaatttaatgaaaactataaacctgcagattcatgatcaatgaaccctaagtgtaagaaatatgaagaaaattataccaagtcacatcataatcaaagtatttgaagccagtaataaaaaaatcttaaaagcagctggagataagacacattatgtatagaggaacaaaataattatggcagatttctcactggaaacagtgttagctagaagaaagtggggtaacatctttataaagtactgagagaaaaaaggcaaaatgaagaatttttcagacatagaaaaggtgaaagaatttatcaccagaagacctgtattataagaaatgttaacagaaatcttttaggtagaagaaaaatgttgccagacggaattctgaatctacccaaaaaaggaagagcactggaagtggtggctatgcgggtagatacaaaatacttttgtccttttaaaaacacaaaatatccttcttgagtatataaaccaaaaagcatccaagacaggtttcaatcagtttagaagtttattttgccaaggttaaggatgttcctgggagacaggtctgtgcctttctctaaagatggttttgaggtcttcagtatttaaaggggaaacgcaggctggagaggaaagatggaggggatgatcacattattgaatccatatgttacaagagaaaaggagcaagtaggggaacagtcaattatgtatttgtcttgtgctcagtaaagtggccctttatataatagaaggtgaacattacagtagctacctgtagaggtatttaaccctttatctgtagctatctgcttaggaacaaaaggagagacagcttcttgcatgactcagctttcagctaaattatttccttttggcatagtgatttggggtcttgagttttaattttcctttcacaagtaccttaccagaaaaaaaaaaatctttaaaaaacaagtcttgaagtctctcccttcaggctccaattacacattcctgaattaggccacctaaagttatcctgcagttcactgaggctttattcatttatgtagagacagggtcttgctgtttcccaggctggagtgcagtggcttgatcttagctcactgcagccttgaactcctaagctcgtgtgaccttcccacttcagcctcctgagtggctaggactacaggtgtacaccaccatacctggctaattttgcatgtgtgtgtgtgacatatcttgctatcattttctatrttcttcatatttcttttttttgagatggagtctcactctgttgcccaggctggagtgcagtggtgtgatctcagcttactgcaacctctgcctcctgagttcaatcaatcaggcccctgaaatgatttctatctctgccatttcagcctcccgagtagctgggactacatgtgcccaccaccatggccagctaattttcgtatttttaatagagacagggtttcgccatgttggccaggctggtctcgaactcctgacctcaagtgatccgcctgccttggcctcccaaagtgctgggactacaggcatgagctactgtgcccagcctatactcttcatatttcttatgcttagggttcattgatcatggatctgcaaaaatataatgtataaggtttataacatctatggaaataaaacctgtgacaatagcacaaaggccaagaggagagaagtggaagtatattgttggattcttaaactwtatatgaattgttataatatcatttgaaggtagactgtgataagttaaagttgtatactaataaagcctggcratccctggtttaatgcaacagttataactaataacttaaaaaggagataaaatggagttataaaaaattcctggcaggcatggtggctstcacctgtagtcccaactaccttggaggctgatgcagagagaggctcgcttgagcacaggaatttgaggctgcagtgagctatgatcacatcattgcactccagtctgagcaacagaatgagaccttgtgtcttataaaagggtggggagagagagaaaacactttttaaaatgtaaaaaacaatttctaatccaaaaatagaaaagaggaaaaaggaaacaaagaatacaagcaagaaatggaaaaaagatgatggatttaaactccactatagctatcttcatattacaagtaaatgatttaaacaacccaattataagacaactgcacatcttggctcctcaaacactcccctcttattctgagtttgcatctttttttttgagacggagtctggctctgtcgcccaggctggagtgcagtggcgcaatctcggctcactgtaagctctgcctcccgggttcacgccattcttctggctcagcctccctagtagctgggactacaggcgcccgccactacgcccggctaattttttgtatttttagtagagacggggtttcaccgtgttagccaggatggtctcaatctcctgacctcatgatccgcccacctcagcctcccaaagtgctgggattataggtgtgagccaccgcgcctggccctgagtttgcatcttaaaaatccccttgccctaaacagtgagtcagccttagttcatgtgttaatgccttctgagatttgtgagggagacttcatttatgggtataaagcctttccataatgcctcagtgcccactgggtaggaattttaatcttcacaataccttgtgtttaccccataagaaagaggatgaaaacgaatgaaagataaaggaaagcacacattctggtctctggccttggttcaggggacaagaaaggttaagcagtggttcttaatggggtaattttgtccttaaaggacatttgacaatgtctggagacgttttttattgtcatggagggggtaacgtaagaagggtgctactggcatttggtggctagaggccagggattctgctaaacatcctatagtgcacaggactgcccaccgcagtgaagaattatctggcccaaagtgtcactagtgcagaggttaagaaaccctgggttacaggtagggtgagagtgggaatgggaagttcagagatagaaaccatttcaggggcatgccttcctttgttttagataataggtttggagacaatccgaggaagtttccttctcaatctaagtatactcaaatacttcctagaagatattctcttgtatatacttctagcatgtatcacattgtattacagcttaccggcttttatgtctgtctcccatgttgtaaatatgataaacttgaggacaggtattatctggatatttgtctttgtaccccaagaacttagaacttaaaacaatgttaacctgtggtgcctttcaaatctatgaccatgtgaaccggatgaataaataaactgtcttaatattatatctgtagctcacacttattaaacccagaataaatttctggggatcctagtggatctatctctggtgcctcacatctgtcttcagtgtggaaaaggcttaatatgtaactgcataggctgggcatgatggctcacgcctgtaatcccagcactttgggaggccgaggtgggcagatcacgaggtcaagagatcgagaccatcctggccaacatggtgaaaccccgtctctactaaaaatacaaaaattagtcaggcatagtggcatgcacctgtaatcccagctacttgggaggctgaggcaagagaatcacttgaacctgggaggtggaggttgcagtgagctgagatggcgccattgcactccagcctgggcgacagagcgagactccatctcaaaaaaaaaaaaaaagtaactgcatagcacacttatgggagtgtaaaccaggtcagtgttgtttgtttgttatacaagtgaatacatagtcataagatactaaaatttggcagttttctttagcaactacacatatttctatatggacctttgggtctgcctctgatattgtcaacttgggagcagccgatgactactttcttcaaagatacctcttctttagttgactggaaaaaataccatttgtgtatgatacccaatttggatctcaatttggatagaggtatatcctccctctttctgcacaggaattaagacatttgaagaatattagataaatgaaaggaaatatgaatagaacgtgtgtataaaaatatgaccagagatctgatggcccaggttggggtttgggggtcagggtctggccaaatgtgagagaccacttgaagtgaggcaaacaggtgtcaaacaggcaagctctttcagagcttgttttggcattgcatgtttttttttgttgcttgtttttgtttttgttttgtttgagacagaktcttgctctgttgcccaggctggagtgcagtggtatgatcttggctggctgcaacctccgcctcccgggttcaagtgatcctcctgcctcacccttccgagtagctgggattacaggtgcctaccaccatgcctggctaatagttttttgtatttttggtagagacagagtttccccatgttggccaggctggtcttgaactcctgacctcaagtggcccacctgtctcagcctctcaaagtgctggtattacaggtgtgagccaccgcacccggcctggcattgcatgttgatactggttctcctcttacttcctctgctgcctcctctattcctggtccttctgttagatacttgttcagaggatttctaatgtacctaatctgtcaactctgggcctttacaaaggtgagtaagggagcaatgatacctctgaactactgtggaagagaartgcttcataatgaactgagaaaatccacataaaattccttagaaaaagttaaaacgcatacaaatgcaagatgtaatagtattaggcctaggaagctggctgtaatattcccataagctctaaccacaccagctttgggtgaatcatgctaaaagctggaggttaataactgagctaataaaactgggaaattggagtatgcgaccatgggctgatatctaggaggggttgcagttttgagattgactgttctaactagaatcctttgaaatttagaaggtagtctggtcgtctggctcctgaagaagacgaccagtagggaagaggtattctgcggctatgactggtatgagaacattgaagcctactgggatggggcagtatcttagagggaatgatagactccaccgatttcgaatagagatatgactggtgaatttctagggatcgccatacctccttttctctttcatttttgtttttgggctttgctggtttagttttttgccaattcatggtcctgaactttctcagttaactttggaaatgaataacgtaggaaatgtcctctcatctccctcccttattactctaaaggacagaaccaggatccacatggaggtacttctctacatggatctgaaatatgggactatcctgattgtattctaaaggatcaaggtgctagaaagtgaccactgggcaatggattacatttggggatacaaatatatagtattggggctaagagaacaggttttttagtcagtctagcaaagtctagaactcagttccaccacctactggctcccgttggacgaggtatttaacctatctgtgcctcttttcttatctgtaaaagggcataagaataggttctatccgatactgttgttgtgaagtctaaatgttgaaatagtacataagcatttgatgcagtacctggcacataacacaaattagctgttgtcattacactcaggtgaatctaacctcttaccagccatacctgccttagaaagttgtacaaggaatcaatgaatttattgtgtagagcttctcagtaatgtaaaggagtgctgtttggcttgcattttacacacatagttactattttaatgttcttcctgtgagtcattatgatttgcttccatcatgtggatagagaaacaggttcaggagggtaaatgggtgttcagatttagatctcctattctcagatccttctttgttcagaatacaggttctgtagtcactttgtatttcaagagctttacttatcttagaaattcgtgtaatatcttgtcctctagatttggtgcttccagatgtgagttatcaggtggaatccagtgaggaggatcagtctcagactatggatcctcaaggacaaactctgctgctttttctctttgtggatttccacagtgcatttccagtccagcaaatggaaatctggggtaagtataagagaatggggttgccagctggggtgtgccaaatgctaagagagagggaaactttgtgtaatgcacacatctaaattagrtatatttctgtagaataaakaagttcagtgaaaaaccttgcttaataaaatgaacatatcctatagaaaagattcatatattgatgcatcgcttaaatgatgacatttctagtctggttggccagaaatcagcagatacttcatatattgctccctagggatcagcggttttcaacgttagccgcacaatatattacctggagagcatctaaaatgcttactccccagagattctgatttccagatggactgaggtggggcttagggttcagtatgtttttaaattttttttatttttagagatgctctgtcgtccaggctggagtacagttgcgcgagcatagctcaatgcaacatcaaactcctgggctcatgtggtcctcccgcttcagcctcccaagtagctgggcctacagatgcatgccagtgcacctggataactttttcaattatattttgtattattattttttgtatggaggtcttgctttgttgcccaggctgttctcgaactcctggcttcaagtaatcttccttcctcggcatccccaagtgcttgtcagtatgtttttaaagtttctcaggctgggtgcggtggctcatgcctgtaatctcagcactttgggaggttgaagtgggtggatcacttgcagccaggagttcaaggccagcctagctaacacggcgaaaccccatctctactaaaaatacaaaaattagctggcatggtggcagcttcttgtaatcccagctattcaggaggctgaggcaggagaatctcttgaacccaggaggcagaggttgcagtgagccaagattgtaccactgcacttcagcctggacaagagattgagactctgtctcaagaaataaaataaaataaaataaaataaaatcacttctcaggtgattctgatgtacagcaaggcttgggaacttttcatcatcatgctgcctttccaggtggatttaaaaaatgcacacctgttcttattcaggtatgcaacagggaacctttggtgtttatctattagatgggtgacaatttgttatcaatcagaaaggttatctatgatagagataaaacagtggtttcattttctggtccatgaaacacatgcatcagaatcactggatgatgatgatgatgatgatgatgatgatttttgagacagagtctccctctgtcgcccaggctggagtgcaatagcgtgatcttgactcactgcagcctccacctcccgggttcaagcaattttcctgcctcagcctcctgagtagctggaattacaggcacacgccaccacacctggctaatttttgtatttttagtagagatggggtttcaccatgttggtcaggctggtctcgaactcctgacctcgtgatccacccgcctcagccccccaaagtactgggattacaggtgtgagccaccacaccaggccattattattattattgtagaggcaaggtctgaactcctgggctcaagtgatcctcccacctcggcctcccaaagtgctgggattacaggcatgagcaatcgcactggcctcaagtgattcttaaatagagtaaaatttgaaaaccactgagcatgagcaggagttgacttctgcattttaatccaataaaccctgggacataaatttaagtgtttctcaatgccctcctaatctttgaggaaagttacaaggagaagtggagcttatacaaatttggggaaaggttcgtaagcctcccttttggtgcttctgatatgtctctgttctcctttctctatgggccaatgtgttttcgtgggactctattctccaggcactctagtgctatttggtgtggccctgctcctactgagtcataagaaaaaagagactgcttacaccagatcaaaagagctcatgttgactggtgtcaattatttattgaacaaaccattgttggctgtggtattcttccttctaccttccttctgagcctctcagaagtaagataaggcaaacttttccctgccttttcccaacacatgctgtacacactaggagagaagcactgtttcctggggctctggcttgtagctctttatttgaggagctaatggtctttggtgtaccgccgttctgatgattaacaccaggggaatggaaaatagaagatacctaaactaatgtgaggattcctggggctgttccctgtggcttatgctcacatagacagaggttggtaagagcagcagctgattattgtggaaaagacatcagggtggaatcaagagacctgggtttaattttagcactgataccaacttcctcaatgatttttgggaagtatgtcacgtaaatctgagcctcccttttcatatctttaacatgagattgttaggctaggccccatcaaaggcccttccaggtctaaaaccctcttaagacttaagatctgctaccttctggcaggctttttttaaggtctgtcagaaggtaatccttggataatgcaagcctgataacatgttctgagccctaaagaacattccttaagaactcagattcctcagaaacacagtattatcattcctgaactactgtgataatttgtacacttctgtttagcttgaccctgaaggcctgcagtatctcagttgttgtactcagtattggatttaaaagaaattcatcaatgtattagtaaacacagtaaggctctcccatcttacacatctggtaatttaagactagcctctgaagaagatgcacagtgagggaaggtagatatagacatagtgataattttaccttctcttcccccttttctttctcatatccttaaaagctttctctagagcctcttttttaggaaacagatggtgcaaagttagtctgtttccatgtgtctttaagaaaattacttaattggccttatgcccacctaccttgtcatggtaacttttctgtgattaactcattttttttttcttgtgactaactcattattttccccaatgtcaaaagcattkggtggtcaaaagttttaggaatgaactttgacttttaaattaaatgtctgctttcaaaagagatctgatttcttgaagctgttcttaaaaccaaactatggaaaataccaatctagatgatacattaacatagcaatagcaatattttgaaactgtacagtgtacatttcaaaacacttcatgggctaggcactgtggcttggctcctgtaatcccaatactttgaggggccaaagcaggaggaccgcttgagcccaagagttcaagaccagctcgggcaacacagcgagacctcgtctctacatatacaaatttgcccgggcatggtccctcacacctgtaatcccagcactttgggaggccgaggcgggcggatcacactgaggtcaggagtttgagaccagtctggccaacatggcgaaaccccgtctctactaaaaatacaaaaattagctgggtgtggtggcaggcgcctgtaatcccagctactcgggaggctgaggcaagataatcacttgaatccaggaggcggaggttgcagtgagccgagatcacgccattgcactccagctcgggcaacaagagcaaaactcttgtcttaaaaaaaaaaaaaaaaaaaaattggccaggcatggtggtggtgtacacctgtggtcccagctattcgggaggctgaggtgggaggatcacttgagccccggtggtcgaggctgcagtgagccaagatcgtgtcactgcactccaggctgggcaacaaaacccacaaaacactttgtgtacattatcgcagtttatctacacaacatacctgtgagagcaggtggtataaagccattttctatactgaagaaaagatttcatcaccactagttgatggcagaattggccctagaatctatgttctccctgactccagctccagaatccttttgagcttaccatatattacgttccctaccaggaaaggatcatggtgccttgtggtagaaaatgttcttctggtttgcatttttaatacagtcctggaaaaagccagccagttttaggctgcttcccatagaattctgaacactgaaaacaaagaataatcaagaaggattttctccaggtgacctgtaaatttggcttcctgtgcctgctgcatcgggatcattaaatggtggcctattgtttgatggcatagtttttttgcctgttgctctcacatattagcttttctgaatgagactgagcagtggtgcctgtggttactttaacagagataatctcccatttaaaaggacctcataccaacagttctgtgtcatctctgtgaattttaaccttttctttaccacagtacgtctgaaagcactgccacaacagtgatgttcacatagacgtagagtagggttagacacactctataggacctttgcttctccctttctcctctcctttgggagtcactgggattgttgtttatagtacatggtatatatttctgctatgaattaaacaggatcccttatttgtttctttaaaaaataatgtcattctccaccttaattttcctgagctttcttagatttatgagtgggaattaggtaggtgtgtaagttgctgggagattttgtctaaaaaaaggtaattatttgtggatatgtaggggtctcttcttccaagaggcatctttcccactcccagtcctgactcaaagcacatgaacagcaatcttgaagtagttatcctcgctcatggttaatccttggataatgcaagcctgataccatgttctgagccctactgaacatttctaaagaactcggattcctcagaaaccagtgttatcattcctgaactactgtgataatttgtacacctctgtttagcttgattctgagggcctgcagtatctcagtcgttgtactcagtattggatttaaaagaaattcatcagtgtattagtaaacaagtgtcttaaatcttacacatctggtaattttttttttttttttttgagacggagtctcactctgtcacccaggctggagcgcagtggcacaatcttggctcactgcaagctccgcctcccgggttcacgccattctcctgcctcagcctcccgagtagctgggactacaggtgcccgccaccgtgcttggctaattttttgtatttttagtggagacggggtttcaccgtggtctcgatctcctgacctcgtgatccgcccgcctcggcctcccaaagtgctgggattacaggccacatctggtaatttaagactagcttttgcagatgcacagtgaggggaggtagatatagtgataattttaccttctccctccccttaggagtctatactttgctcacaactcatctcaatgccatccttgtggagagccacagtgtagtgcaaggttccatccaattcactgtggacaaggtcttggagcaacatcaccaggctgccaaggtaataaggaattcacagcctcttttctcctattctctaagaaaaagatagcaagcatatatggcaggcagggcccaggagcccttcctcccttaatgccccttcctctcctcttctgtcacctgggtgatcttgtaacactgcatctagcctacaactcaaactttagcttagatggatcactgtaaccagcttgcttagtcttacctcctagtaggtgtgtttgggtaaatagggaaatagttaatagggaaaaatggctgataacacacctcttccttatgcatataattccccttcccacacagacttctggagctgctgtttcgctgtgtcttacattcttcccccattttcctaattctttacaccaccactttctctccttacctgattttctacatccatccatcctgtgtacttttggtaacacatttcttacctcatatggcccccttttcagggraaaaacaaccacactaagagagcagaactaaaagcttttttttttttycccaaatagtgtgtctgttttcttgatcattgtcctattgcttgtcttctctgatgtgtctgtgtcagtaagtcacctctgtgaaatgcaagaacattttaaaattttattttaattccctaagtgttatgatgtaaaaatatgtgaggatctcagtaacttttgttgatggataggaagaattgttgaaatcctgctctgatggaaatgtgtgggccctctgggattctctaaaccacatcttgggattcatgcagtctcccccttacttgttatgttccccaggctcagcagaaactacaggcctcactctcagtggctgtgaactccatcatgagtattctgactggaagcactaggagcagcttccgaaagatgtgtctccagacccttcaagttagtaggagattgggattggggatgcttaaaagtgccagggttttggctgggtacggtggctcatgcctataatcgcagcactttgggaggccaaggtaggaggattgcttgagcccaggaatttgacaccagcctgggcaacacagggagaccctgtctctacaagtaattaaaaaatcacccaggtggagtggtgcacacctgtggttccagctcctcaggaggctgaggtaggaggatcaactgagcccgggatgttgaggctgagccgtgatcatgccactgtactccagcctgggcaacagactgagacctgtcttaaaaaaaaaaaaaaatgcccagggcagtggctcatgcctgtaatcccagcactttgggaggccaaggcgggtggatgacctgaggtcgggagtttgagaccagcctgaccaacatggtgaaatcctgtctctactaaaaatacaaaattagccagtcgtggtggcagttgcatgtaatctcagctactcagaaggctgaggcaggagaattgctggaacccaggttggggaggttgcagtgagccgagatcgccccattgtactccagcccaggtgacaacagcgagactccacctcaaaaaaaaaaaaaaaaaaaagccaggattttaatgacattctactgcttatctttgtaaaatgtacagtatttttagaaacattactttatttgctccactgtgatgctacatagtaccaggcttaagttttaagaaatatttgttggaatagtagtatgtataccattttacaaatgagaaaacaaattatttaagatttctgctttctttaggtcacacagctagttaagaacagagctagggctgggtgtggtggctcatgcctgtaatcccagcactttgggaggctgaggcggtggattgcttgaggtcaggagttcatgaccagcctgaccaacatggtgaaaccccgtctctactaaaaatacaaaaatcagccaggcgtggtggtgcacgcctgtagtcccagctactcaggaggctgaggcagaattgctgaaacccgggaggtggaggttgcagtgagccaagatcaccccactgcactccagcctgggtgacaaagtgagattccgtctcaaaaaagaataagaaaaaaagaacagagctaggactagatcagtgattcctaatctaattccttgttgaaaaatgctatctcatggtgacagaatacactggaaataactgagcaaccttacctattacgtgtatgtggcagtacggaatcagaggctcaggttcaaatcctgactcatttacttattagttatgtttaggcctatagttctgagacttgtctacaaattggaaaaagtaatagtacctcacagagttattatgaaggtgagagctaaatgtgtgctatggtctgaatgtttatatatccccaaaattcatatgttgaaatcctaacccccgaactgataatattaggaggtatgaggcctttgagaggtgatttaggtcattaggccttcannnnnnnnnnnnnnnnnnnnnnnnnnnnnnnnnnnnnnnnnnnnnnnnnnnnnnnnnnnnnnnnnnnnnnnnnnnnnnnnnnnnnnnnnnnnnnnnnnnnnnnnnnnnnnnnnnnnnnnnnnnnnnnnnnnnnnnnnnnnnnnnnnnnnnnnnnnnnnnnnnnnnnnnnnnnnnnnnnnnnnnnnnnnnnnnnnnnnnnnnnnnnnnnnnnnnnnnnnnnnnnnnnnnnnnnnnnnnnnnnnnnnnnnnnnnnnnnnnnnnnnnnnnnnnnnnnnnnnnnnnnnnnnnnnnnnnnnnnnnnnnnnnnnnnnnnnnnnnnnnnnnnnnnnnnnnnnnnnnnnnnnnnnnnnnnnnnnnnnnnnnnnnnnnnnnnnnnnnnnnnnnnnnnnnnnnnnnnnnnnnnnnnnnnnnnnnnnnnnnnnnnnnnnnnnnnnnnnnnnnnnnnnnnnnnnnnnnnnnnnnnnnnnnnnnnnnnnnnnnnnnnnnnnnnnnnnnnnnnnnnnnnnnnnnnnnnnnnnnnnnnnnnnnnnnnnnnnnnnnnnnnnnnnnnnnnnnnnnnnnnnnnnnnnnnnnnnnnnnnnnnnnnnnnnnnnnnnnnnnnnnnnnnnnnnnnnnnnnnnnnnnnnnnnnnnnnnnnnnnnnnnnnnnnnnnnnnnnnnnnnnnnnnnnnnnnnnnnnnnnnnnnnnnnnnnnnnnnnnnnnnnnnnnnnnnnnnnnnnnnnnnnnnnnnnnnnnnnnnnnnnnnnnnnnnnnnnnnnnnnnnnnnnnnnnnnnnnnnnnnnnnnnnnnnnnnnnnnnnnnnnnnnnnnnnnnnnnnnnnnnnnnnnnnnnnnnnnnnnnnnnnnnnnnnnnnnnnnnnnnnnnnnnnnnnnnnnnnnnnnnnnnnnnnnnnnnnnnnnnnnnnnnnnnnnnnnnnnnnnnnnnnnnnnnnnnnnnnnnnnnnnnnnnnnnnnnnnnnnnnnnnnnnnnnnnnnnnnnnnnnnnnnnnnnnnnnnnnnnnnnnnnnnnnnnnnnnnnnnnnnnnnnnnnnnnnnnnnnnnnnnnnntggatcacttgaggtcaggagttccagatcagcctgaccaacatggtgaaactctgtcactactaaaaaaaaaaaaaatacaaaaaaaattagccaggcgtggtggcaggcgcctgtaatcccagctacttgagaggctgaggcaggagaatcacttgaacctgggaggtgaaggttgtagtgagctgagttcgcaccattaccctctagcctgggtgacaagtgcgaaactctgtcccaaccaaaaaaaaaaaggccccagagagacccttgccccttctgccatgtgaggacacagggaggaagtgggcagcctacagcccagaggagggccctcaccagaacctgaccatgctggcactttaatttcagattccctgcctccagcactgtgagaaatcagtttctattgtttataagccacccagtctataggaatttggtatagcagcccgaatggactaagacagtgtcaaagtgcatagcatacggtagattctcaataaatgttagtgtttcccttcctttaggaatgtgtgctgaccaactggtattatcaatgggcaacttatcattccatatttgttgcttttttttttttttctctgagacagtgtctcgctctgtcgcccaggctggagtgcagtggcgcgatctcagctcactgcaagctccgcctctcaggttcacgccattctcctgcctcagcctcccaagtagctgggactacaggcgcccgccaccacgcccagctaattttttttgtatttttagtagagacggggtttcatcgtgttagctaggatggtctcaatctcctgacctcgggatccgcccgccttggcctcccaaagtactgggattacaggcatgagccaccacgccctggcctgcttcatttttttggtatagttttcttgaaaagctagtataacacaaaaaaattttaaaataataactaataaaatttatcactataatttttactcattatctcatatatatttgtaaccaaagcattctattttcatatataatttgccattttccccatttcaacagtcttagaatttttagttaatatcccactgtattgtttaaatctaatttaataaaccattcctctgttagacatttgtttacattcttgcttatatagtggttcagttaatacctttatgtaatatcttgcttcttttgaattattttctagaacaaatttctataaatggagttatgagtcaaagtgtataacacatttataagctagtgcattttatcatagcttcaactttctgggtcatgtggatagcacagggtagtgaaaagaacactatattgggaattctaaggtatccattaaagccctaacttttgtactaactagctgtgagatcttgggtgggtcacttcttttttttttattttttatttatttattttttttgagacagagtttcgctcttgttgcccaggctggagtgcagtggtgcaatctcggctcactgcaacctccgcctcccaggttcaagcaattctcctgcctcagcctccccagtagctgggattacaggcatgtgccaccacccctggctaattttgtattttttagtagagacagggtttctccatgttggtcaggctggtctcggactcccgacctcaagtaatccaggctaatactctttcaggaatctaattttaaaagagcacaggcagggaaacgagagcccttccaaaaatgatggagagcaggcagaacacttgcaggtgccgagaaggaccctggagtcactgtgttgcttggcaaagtccctgctgccctcagggctgcagcctgtgttctgggttcctctggggcagaggtcagaggtggagagaaccagaaaagcctctacttatggtgactcagggacctatttcctcttgtgaaaaacaagactggcagactgtggaggtcctggcagaggcttcannnnnnnnnnnnnnnnnnnncatgcgccaccacgcccagctaattttgtattttcagtagagacagggtttctccatgttggtcaggctggtgtcaaactcccgacctcaggtgatccacctgccttggcctcccaaagtgctgggattacaggcgtgagccaccgcgcccagcccacttctcctttttgaatttcaattttctcatccataaaattagtgtgatgtattaggttattaccctggtcccctttaattctaacatcctataattatatatttaaaagtagaaagctgttacctatttcctgtgggtgcaaactgtattattttgttcctctcctccctaaaagactcgtcagaaaaaaaaaaagtctcatatcagcctcagttatgcagtagaacctgtgctgtcttggaaactcttcttatagaagagcagtttatataaccccttcatgaacagatggatcttctggatatttatctcctacagagatgggagaacaggccaggcgcagtggcttacacctgtaatcctagcactttgggaggctgaggcgggtggatcacctgaggtcaggagttcgaaaccagccttgccaacatagtgaaaccctgtctctacgaaaaatacaaaaatgagccgggtgtggtggtgcatgcctgtagtcccagctactcgggaggctgaagcaggagaatcacttgaatctagggggcggagggtgcagtgagccaagattgtgccactgcactccagcctgggtgacagagcaagactctgtctcagaaaaaaaaaaaaaaaaaaaaaaaaaaagagagatgggaaaacaaagaccttctttgaaggatcttgcttagatgacagaagtgggaagacatataggagccacaactgcctgtcttacaccaagtatctcaggccttctttttttctctactgccttcatgaaaactaagaaaactcttaactttaatggcttgcctactgtctgcctcctcatctccctgtataaactttctgtgagaactttcccccttggtttccagtactggaactcagcatgttctatttctggcccattttaggcagctgacacacaagagttcaggaccaaactgcacaaagtatttcgtgagatcacccaacaccaatttcttcaccactgctcatgtgaggtgaagcaggtaagtgtaaataatcagtactttggtgggaatcttccattttgatatatgggaatcctgaattgagggtgggtaggtacaagtgtttcagactgcataatctgaggtcagcctttcagcaaggaagtctgtgaaannnnnnnnnnnnnnnnnnnnnnnnnnnnnnnnnnnnnnnnnnnnnnnnnnnnnnnnnnnnnnnnnnnnnnnnnnnnnnnnnnnnnnnnnnnnnnnnnnnnnnnnnnnnnnnnnnnnnnnnnnnnnnnnnnnnnnnnnnnnnnnnnnnnnnnnnnnnnnnnnnnnnnnnnnnnnnnnnnnnnnnnnnnnnnnnnnnnnnnnnnnnnnnnnnnnnnnnnnnnnnnnnnnnnnnnnnnnnnnnnnnnnnnnnnnnnnnnnnnnnnnnnnnnnnnnnnnnnnnnnnnnnnnnnnnnnnnnnnnnnnnnnnnnnnnnnnnnnnnnnnnnnnnnnnnnnnnnnnnnnnnnnnnnnnnnnnnnnnnnnnnnnnnnnnnnnnnnnnnnnnnnnnnnnnnnnnnnnnnnnnnnnnnnnnnnnnnnnnnnnnnnnnnnnnnnnnnnnnnnnnnnnnnnnnnnnnnnnnnnnnnnnnnnnnnnnnnnnnnnnnnnnnnnnnnnnnnnnnnnnnnnnnnnnnnnnnnnnnnnnnnnnnnnnnnnnnnnnnnnnnnnnnnnnnnnnnnnnnnnnnnnnnnnnnnnnnnnnnnnnnnnnnnnnnnnnnnnnnnnnnnnnnnnnnnnnnnnnnnnnnnnnnnnnnnnnnnnnnnnnnnnnnnnnnnnnnnnnnnnnnnnnnnnnnnnnnnnnnnnnnnnnnnnnnnnnnnnnnnnnnnnnnnnnnnnnnnnnnnnnnnnnnnnnnnnnnnnnnnnnnnnnnnnnnnnnnnnnnnnnnnnnnnnnnnnnnnnnnnnnnnnnnnnnnnnnnnnnnnnnnnnnnnnnnnnnnnnnnnnnnnnnnnnnnnnnnnnnnnnnnnnnnnnnnnnnnnnnnnnnnnnnnnnnnnnnnnnnnnnnnnnnnnnnnnnnnnnnnnnnnnnnnnnnnnnnnnnnnnnnnnnnnnnnnnnnnnnnnnnnnnnnnnnnnnnnnnnnnnnnnnnnnnnnnnnnnnnnnnnnnnnnnnnnnnnnnnnnnnnnnnnnnnnnnnnnnnnnnnnnnnnnnnnnnnnnnnnnnnnnnnnnnnnnnnnnnnnnnnnnnnnnnnnnnnnnnnnnnnnnnnnnnnnnnnnnnnnnnnnnnnnnnnnnnnnnnnnnnnnnnnnnnnnnnnnnnnnnnnnnnnnnnnnnnnnnnnnnnnnnnnnnnnnnnnnnnnnnnnnnnnnnnnnnnnnnnnnnnnnnnnnnnnnnnnnnnnnnnnnnnnnnnnnnnnnnnnnntgagactctgtcccagaaaaaaaaaaaaaccaaaacccctatacagaggggctgggaacgatggctcatgcctgtaatcccaacactttgggaggccgaggcaggtggattacttgaccccaggagttcaagaccagcctgggtaacatggcaaaaccccatctctacaaaaaaatagaaaaattagccaggcatggtggcacatgcctgtagtcccagctactcgggaggctgaggtggaagaactgcatgagcccaggaggcagaggttgccgtgagctaaaatcatatcactacactccaatctaggtggcagtgggaccctgcctcaaaaataaataaataaataaataataaataaacaaacataaaactaatagaactataaggagaaatagacaaatccaaaattatattttgagatttcaacataattctctcaataattaatagttatgataagcagagacagtcagaacaatgctttcaatcactttgacctaactggcatttataaaaacactctgttcaaccacagaagaatatgcattcttttcaagtgcacaaggcacttttagcaagatagaacatattctaaggcattaaatatgtctcaatacattttaaaagatctaagtcataaaagtatgtttctgactataatagaattattacagcaaaatcaataaaagaaagctatctagaaaatccccaaatatttggaaactaaatgacacatttataaataacctatgagttaaacacagaaatcaaagggatattagaaatattttaatttaattaaatggaaaagcaaattatcaaaatttgtgagatgtagctgatgtagtatttagaggggaaaatgcctgtgttagaaaagaaaaaaggctcaaatccatgagatcactttccaactgaaactagaataagaagagcaaattaaacacaaattaaacagaagaaatgaaataataaagatcagaatggaaatcagtaacatagaaaccagaaaaacaatggagaaaaatcaatgaaactaaaaggtggctcatttagaagattaataaaattgataaacatttagccagactaatcagaataaaaagaatgaacacaaattatcactatcagaaatcagaaaggtagcatcagatattaaaaggattatcagaatattttgaacaagtttacagtatattttacaacttagatgaaatggacaaattccttgaaagatacgaagcccactcaagaagaagtacccctatatacctgatagcactgtatctgtttttaaaattgaatgtttaaaaaccttaccataatatcctcaatatataaagaactcttaaaactcattaataagaacacaactcggtttttttaaatggacaaaatatttgaacacacttcacgaaagaagctacagatacacaaatggcagataaagacataagatgcccaacatcatcagtcacaacaaaggttcaaaaaagaaccacaatgagataatcatttcataccactggaataaaaggactgactataccacatgttaacaagcatgtggaagaaagaactcacatacactgtttgtggaaatggaaaatggtacaagcacttcggagaacagttagcagtttcttaaaaagttaaatatatacctatcatatgacctagctctttcactcctaggtatttacccaagagaaatgagaacatatctccacacaaagaatcatacacaaatcttcatggcacttttgttatagccccaaaaatgagaaacaacccagtatcaacaggtaaatggataaaaaaattgtagtagattcatataaaggaacactatgtggcaataaaaggaaagaactattgatacacacagtgacatggatgaatctctgaatagcatggcaagtgaaaaaatcaaaaactaaaggagtacatactgtttgattgcacttacatataattctataaaatgccaactaatctacacaggtcagtggttactagaggatgggaggtgggagagttggaatgattataaagggcagcaggatgcttgcagggagatgaatatgttcattatgttgattgtgtgatggtttcacaggtatgcacatgtgtacttaaaaattgtacattttcggccgggtgcggtggctcacgcctgtaatcccagcactttgggaggctgannnnnnnnnnnnnnnnnnnntgtatccaggatttttgttatttcaggcaggagggtagattcagtccccgttactccatcttgtccagaagacactgtaggataatttcatctttaatttctcttatttattcatcctacatttttagttccagataagtcaatcgtactgactggagccaagaaagccagaaaagtgggcttcagttagacaactactaccagctacacctggaatctggagaaacagaatttcctgctaggatctccgttcactcattagaggagaccatcacaaaaccagttaaaagctatttgacctccttgagggtaaagaccccaactaaggaaattctagatctccagcatccaaaaaggtgaaaagataaaagtgtgtgtgtgtttttttttttttttttttttgagatggagtctcactctgttgcccaggctggagtgcagtggcgtgatctcggctcactgcaagctccaccccccgggttcacaccattctcctgcctcagcctcctgagtagctgggactacaggcacctgccaccatgcccractaattgttttttctatttttagtaaagacggagtttcactgtgttggccaggatggtcttgatctcctgacctcgtgatcctccggcctcggcctcccaaagtgctgggattacaggcatgagccacygcgctatggacactgtttctgagaaaatgagtaacagggcctttggtacctcctctgcatctgctctgccccttgtacttctgctttcctgattgggtggggaagtttaggtgcccaggcacccaaggatcaaagcatcttatggactttaccatcctcctcttcagtgtgattagagaggcacagagcagcagtaaagccgttagtgctcccttcaccaccccttccatggctggctgtgccttctacgatgcacttcccaggaacgtgtccactgttcctttcagctgcttcaccgcaaatactcttgccagtttccctcggacttggaaagccgctgtccacgccttgcgcaaataaagctaaaatccattgtatcagtttcctgggatgctgtcagaaattaacatcaacttgaaggtttaagaacaatccaaatttattgtgtcacagttctggaggccagaagtccaaaatcaaggtgttnnnnnnnnnnnnnnnnnnnnnnnnnnnnnnnnnnnnnnnnnnnnnnnnnnnnnnnnnnnnnnnnnnnnnnnnnnnnnnnnnnnnnnnnnnnnnnnnnnnnnnnnnnnnnnnnnnnnnnnnnnnnnnnnnnnnnnnnnnnnnnnnnnnnnnnnnnnnnnnnnnnnnnnnnnnnnnnnnnnnnnnnnnnnnnnnnnnnnnnnnnnnnnnnnnnnnnnnnnnnnnnnnnnnnnnnnnnnnnnnnnnnnnnnnnnnnnnnnnnnnnnnnnnnnnnnnnnnnnnnnnnnnnnnnnnnnnnnnnnnnnnnnnnnnnnnnnnnnnnnnnnnnnnnnnnnnnttttgccatgttggccaggctggtctcgaactcctagccttaggtgatctggctgctttggcctcccaaagtgctgggattacaggcaggtaattagggatttagggcccaccctaaatccaggctaatcctgtcttgcgatctggaattacatgtgcaaagacttttctcaaataagctcacattcacaaattctgggggttaggatttggacatatttggggtgggggagaatgcagttcactacagccatccacatcttcagctttctagggacaggttcagggtaaggcatgtgctgttatcataggacccaggatataagcgcagagggactcctcaggatctaggagtgcttcagcctctgaagtacttttacttgggcctctgtggtatcccagtaagacctaaaaaagataatctgggccaggtgcggtggctcactcctgtaatctcagcactttgggagggcaaggcaggtggatcacttgaggtcaggagtttgaaacctgcctggcaaacatggcaaaattccgtctctactaaarataaaaaaattagccaggcctgttggcacacccttgtagtcccagctactcaggagggtgagacatgagaatcgcttgaatctagggggcggaggttgcagtgagccaagatcatgccactgcactccagcctgggtgacacagcaagactctgtctcaaaaaaaaaaaaagatctgacctcttttaccctgttcttttgctatagtcatggctcatagcctcagggccattcatagcccaattaatttggcatatggctagtgaactcaaggtcttaccagtagtcataggtcttggaaagaaggaacacttactgaatccctaatctgtgccgagattttcactttaatctctgcaaagatgttataaattaggtcatagttttcccattttacagatgaggaaactgattacagaactttcataatttgcccagaatcacagtcagtaaatagcaaggctagaatttgtaccgagagctcccggctctgaaacctggtaatattgttaacacagaggactaggttgcaagcccagggcagatgagtgatccaggtcattgagtagaacccatgattctccactcaacatcctctggtaatggccatttagtgataaataacttgttagtggtacaagagtggcacccagtggcttcagctagaactacaagactaaggatgataggtcaaattctttgacctctgggccattctgtttccatttctaaacaggaaaggtagaatagctgacctcttgagtaacagggaagaaaaccatctattatatgctttattgagaaactgaaaaaatgagggagtgtgtattcagagtgaayatattcagggaaaggtcatgcaggaatggagaaggtattatttttgtttttatttttttagaaacaggttcccgctatgttgcccgggctggagtgcagtgactattcataggtgtgatcatggtgcactacagcctcgaactcctgggcttaagtgatcctcctgtgtcagcctcctgagtaactggaactacaggcgtgcatcactgcacctggcgaggagtggatattttaagcctgaatgtttgaacagagacagtgggccaggaaggagtgaacaagatagtactccagggtttagtgtcatagatatatgtagggactgagaacttaaacccagaatgagcaggagtagtatcaaggaggcaattttctaaggaaaggcattgtttccggcgggtcgggggagggggtagactagaaataaatgtcccatagaatgttaaatccaaggtgtattctgaggtcagggctgtcttatctgggggaccaggtgatgaatgaagggtgtgcaaggctaccagagaggcccagagcttcatatctcaatgcgggtagttccttgataagaccmatttcaagataggagaaagatttatctatgacacgagattttccaagctaaagccaaaaaaaaaaccaagttctgtctcaagataaaaatatttagaaaatatcctgtttctttctttatgtctttagaattatttttgcccctcctatgttccttggaatataattacttgggaactaaaacttgttttagtaaacaatatatgatagatctctcatggagataattcatataccataaaatttaccactttaaagaataaaactcattgattttaagtatattcactgtgctgtgcagccatcgccactaaaattacagaacatctccatcatgccattagcagtacctattcgcagtgagtcccagttcccctctcccttcaacccctggcaaccactagtatgcttcccatctctgtggatttgcctattctggacacttcatatagatgggaccatacaacatgggcctttatgtgccttctttcatttagcatgtttctaaggctcatctatgttgtaccatataacaatttcatccattctttatggctgaataataatccattgtattgatataccacattttatccattaattagttgatgaacacaagttttttccacttttcggctattatgaatatgctgttacgaacagcatatttgtgtggacatgcttgtaactgtcttgggtatatatctaggagtagaattgctgagtcatatgataacactatgttctaactttttaaagaactttcgagctgatttccacagtctgcatcattttacattcctgccagcactgtgtgatggttccaatttctctataccctcattaactgttgtcattgtttttcttactgccattctagtgcatgtgaagtaatttcgtggttttgatttgcatttctctagtgaatactgatgctgagtatcttttccatgtgcttattggccatttgtatatcttctttgaagaaaggtctattcaaatcttttgcccatttgctgttgttgttgttgttgagacggagtctcactctgttgcccaggctggagtgcagtggcgctatctcggctcactgcaagctccacctcccggattcacaccattctcctgcctcaagtagctgggacttacaggcgcccactaccacgcccggctaattttttgtatttttagtggagacggggtttcacaatgttagccaggatggtctcaatctcctgattttgtgatccgcccacctcggcctcccaaagtgtagggattacagacgtgagccaccgtgcctggccctcttttgcccatttttaaattggtttgttaaattattgagttatgagagttctttaccttgggccaggcaaggtggctcacacttgtaatcccagcactttgggaggcggaggtgggaggatcgcttgagcccaggagtttgagaccagcctgggcaacatagtgagacctcgtcactacagaaaatatgatttttttttttttttttttgagatggagtcttgccctgccacccaggctggagtgaagtggagcattctcagctcactgcaacctctacctcccgggttcaagtgattctcctgcctcagcctcctgagtagctgggattacaggtgtgcgccaccacgcctggctaatttttgtattttcagtagagacggggtttcaccatgtcggtcaggctggtctcaaactcctgacctcattatctgcctggctcagtctcccaaagtgctgggattataggcgtgagctaccgtgcgtggcctataaataaattttaaaaagagttctttaatttgggtaacagtaccttagcaggtatgatttgtaaatgtcttctcccattcttgtggattgacttttcacttttgttcataggaagcacaaattttattttatttttattttcttgagacagagtctcactctgtcgcccaggctggagtgcagtggtgtgatcttggctcactgcaagctctgccttctgggttcacgccattcttctgcctcagcctaccgcatagctgggactacaggcgcctgccaccacgcctggctaatttttttgtatttgtaatagagacggggtttcactgtgttagccaggatggtttcaatctcctgacgtcatgatccgcctgcctcggcctcccaaagtgctgggattacaggcttgagccactgcacctggccgagaagcacaaatttttaattttttttttttttttttgagatggagtctcactcatcacccagactggagtgcaatggcgtgatctcagctcactgcaacatccacctcccaggttcaagcaattttcctgcctcagcctcctgagtagctgggattacaggagcccaccaccacagccagctaatttttgtatttttagtacaggcggagtttcaccatgttggccaggctagtctcgaactccttacctcaggtgatctgcctgcctcggcctcccaaagtgctgggattacaggcatgagccaccgcgcctggctatgaatttttaattttgaggaagaagatacctatttttatacatctgtattcttgaaaaggagctgggaggattgggttctggtctcagtaagaacctctttttctctgtccaaattattgaactaaccagtgtggcagggctctaggaggctaccgatgactacagaatataccctgtggcttcccaggtttgactttctcagtcaaacttacctggtgtaaggcactctgctagctgtaaagtgataaaggcatgatggcccttgcctttgaagggatttagggtgtagaaaatggacatttgcacattacttgatgaatgggcacacaggatacttgcagagtatgcagagcccgaggaatgggcaggcagtagccaagagactggagctcagagaagaaaggatgtgccgtgaatggccagagtggagaaggatccacagagggaaaccttgaagactggagggtgggtagggggattcatgagccaggaggaagagggagttccaggtgagggcagataaccttgtgaggtcagtgaagccaccaggcacactcctgtttcactagggctcgttcatgtttctacaaaactcacttaggacttctaatttttttaagcagctaaccctagaaaaaaaggactcagcccagggcactgaggacgcacctgataacagcagcctggagctcctagcaggtaaggttttagcttttcaagtgagccctggactgcagcagaggaagtaaaaaacgtgagttcaaactttcaaactattccactgtaccttctactacagcggcgtccttctgcaatttagtgggctgttgctgccactgtgggtcttcaaggcagcagcaggtcttccctccccaagatgttaggacaggactagaaatttgtattaaagtctgtgcagttacagatagctgcacatgatggggtgggggtaggtaatacgcagattcagggccctgaattttattttatttttatttttttgagacagagtctcacctctgtcgcccaggctggagtgcagtggcgccatctcggctcactgcaagctccgcctcccgggttcacaccattctcctgcctcagcctcccgagtagctgggaccacaggcgcccgccatcacgcccggctaaatttttgtatttttagtagagacggggtttcaccgtgttagccaggatggtctcgatctcctgaccttgtgatccgcctgccttggcctcccaaagtgctgggattacaggcgtgagccaccgcgcccggcctggcaccatgtcactcttaatgtgtgttatgggaaagtgtcagtgcgtgggttgtgattgcaattatactgaagtcttttctccatacatgtctcctgcagtgcttaaacagccttcccagcccacagcagcaggggtacagcagctctcacattcagtcactagcagagatgccaggtactattctgagcttttaaaatgtactaatgctcttagttctcaaaactatcctaggagctataggtactgttattaactctcattttgcatatgaggaaattgaggcccacagatatcaataaacttacccaaggctacacagccagtaaatgacagagcaagaattcaaacccaggcagcctagctctgctgtctctggaagagccgaattagcagggatgccctcctacagatcctgagtccttcagataaaacagtatctgggtcaagggaagctggggatcgtgacgtcagcacctatgcttggttggtaaatccctctttctagggtcacaaccacaacacatacgcgtttatgcttaggcctaagatgtgtccctgaaatcactgtcaactgaaccatgttttaaatgttgtgggggctgttgctactgaaaagaaccctgctgtgaacgcttgtacaaagcaaagaatctatttttataaatttagatctggagattttaaaaaatgcaaatatgatacatacaattcagtatttatgcagtcagaagagacaaaggaataagtatcttcccatacaaggaaaaaaattaacatttaattcagtaccttctgtggaccctggggagatgctggggtcttccacagccttatctcatttagtctttacagtgcccttctgggggcagggggaggcatggatcctaacaaactagaggacccaggctcaggtgaggcagaacgcttagcaggaggtaatgactttcagtttgccgcctccaaagcccatgttttctccagtgtgcaacatgagctttaaaatctaggtgtttataatctggtggaacccctggaggatggcttgggctgttctgtcctacagacctgtggctctcagcatccattctacgcctcacatgggcagccctgctgaagaaaatcaccaaactgtgtgttgatgccaccatccattggtggtccactcactcaggagcctttggtttgtcagtccttccmcctgcctttctggcctttgtccctcagtggctactccattctttaaaaaatctacccagtctctgcctcctgcttcatacttayggatctcttttctcagtaaactcacccaacttgcaccctcccactgcagaacctcatcagtgtggggacccatttcctccaggctcacagtgggatcgtcccttctgctttcttgggacctgcttgcatcagttatcactgctgcaccttcagccttcccctgagttcctttccctcagcaggtcaagctctcatttcatcagaagaaaatctcccgtgaccttgaacttcctccacttatcctcaacctctctccctcacatctcagccaaggatctcaaaaccacaagctgcatgcaccctgtctccctttcttcctctcattctctccctcacttagggtacttgctttttctgtggcctctgaaacttctctcctcagggaaggcctcttaattaccaaattttgcatttaccttcattgtatctgaactatgtgcaaaatttggcactgtaaggctatgactcgcctggtttttccctccctgggcttttctcttcatctactttcctctggtcatgcctaaatagtgctcatcctgctctcccacccagctatcttccatcccaactgttgaccactgcctctgggctcaagactctcaaattggtatgaccagccaaggcctctgctgagtgccagctgggagattcatttgctcactaggcagctcctcgtggaggtcccattggtacctcagtttcctctctcctgactaaagagacttttagtctstttcatgattaatccaatttatcacatctgaaatcttggattcattcaagaggcctctcattttttttttttttttttttttttgagacagagtctccctctgttgcccagactggagtgcagtggcgtgatctcggctcactgcaacctccctgcctcccaagttcaagtgattctcttgcctcagcctctgagtagttgggattacaggcgcccaccaccatgcccagctaatttttgtatttttagtagagacggggtttcaccatgttggccaagctggtctcaatctcctgacctcgtgatctgcccgcctcggccccccaaagtgctgggattacaggcatgagccaccgcgcccggccaagaggcctctcccacatccaggcgctcacaaaggcctatcacttaggcctgatgaacacttctgattcctggtgacgcctctatctccactgtctttacttgtyattgggctcttaaggtcttcctgtctctagtttgatctaagccacacctttgaaagaacgatctttctgaagtacaaaattaccaatatatttcaccagtgcttaaaactctttattggcttcctgtcttctacagatgaaaatctgtttctagccaggcaaggtggtgtgtgcctttagtcccagttactcgagaggatgaggccgggagttcaaagctgcagtgagctacaatcacgccactgcactccagcctaggtgacaggcgagacctcatctttaaaaagtaaaaatttayataggaagttgttttatgcctttgcataaggtttgtgttaactttcagcaagaaattccctttctctcccttgtctggcatatcactcttcatccttcaaaacccagctctggggcaggagtggtgacttatgcctgtaataccgtcactttggggagctggggcgggaggacagcttgagactagcctgggcaacacggtgagacccctgtctctacaagtaaaaaaaattagccggtgtggtggcatgcgcctgtggttcctggtactctggaagctgaagctgaggcagtaggatcgcttgagcccaggaggtcgaggctgcagtgagccaggactgagccactgcactccagcctgggcaacagagcaagaccttgtctcaaaaaaacaaaaggtcagctcaggtatctcctcatggaaacccttcttcacatccagaggtggtcggcttccttctctattctaaccctgggctttgtacacaggtctgcatcccctcctagcatctgtgagcttctctcagggaaaagctcattgatctgcatccccaagacctgctggggaagaatctatccatctaaactcgctttaatttgacaaatgaatcagttaagagtaggaaagctgcctatgggcactgctcaatgcaacgtgagcaacaaagggagacagaactgaggccagaaaggtgaggggggacagaggctggcagggaggggagcttgtcagtgcagactccaggaagaatctatacagaaagttactgagcggcctgagtcccccaagtgagggctcgggacaatctcccgcctgggtgagagaatagggagaccctgaaacgtctctgcagcctcgggctgctccagaagcgcccacagctgcagggttttggtgtggatgggacctgctgacagggatgcggtgggaagagcccctcggcgcccgttctcccaggcttccccttggccaagggtgctcctagcacagggccatgaaagtaagatgaagaggcttgtttttctcctagataccagcgggcaagcagaaaacaagaggctcaagaggggcagcccccgcatagaggagatgcgagctctgcgctctgccagggccccgagcccgtcagaggccgccccgcgccgcccggaagccaccgcggccccyctcactcytagaggaagggagcaccgcgaggctcacggcagggccctggcgccgggcagggcgagcctcggaagccgcctggaggtaactgggcgagggccgcgcagggaagggctcagcaggaggtgcaggccacgggccgctgctgagaggtcctcaccccgggcccccttgttcccgcaggacgtcctgtggctgcaggaggtctccaacctgtcagagtggctgagtcccagccctgggccctgagccgggtccccttccgcaagcgcccannnnnnnnnnnnnnnnnnnnnnnnnnnnnnnnnnnnnnnnnnnnnnnnnnnnnnnnnnnnnnnnnnnnnnnnnnnnnnnnnnnnnnnnnnnnnnnnnnnnnnnnnnnnnnnnnnnnnnnnnnnnnnnnnnnnnnnnnnnnnnnnnnnnnnnnnnnnnnnnnnnnnnnnnnnnnnnnnnnnnnnnnnnnnnnnnnnnnnnnnnnnnnnnnnnnnnnnnnnnnnnnnnnnnnnnnnnnnnnnnnnnnnnnnnnnnnnnnnnnnnnnnnnnnnnnnnnnnnnnnnnnnnnnnnnnnnnnnnnnnnnnnnnnnnnnnnnnnnnnnnnnnnnnnnnnnnnnnnnnnnnnnnnnnnnnnnnnnnnnnnnnnnnnnnnnnnnnnnnnnnnnnnnnnnnnnnnnnnnnnnnnnnnnnnnnnnnnnnnnnnnnnnnnnnnnnnnnnnnnnnnnnnnnnnnnnnnnnnnnnnnnnnnnnnnnnnnnnnnnnggcagcctctacgtctggaagagcgaactgcccaggtgcgggggctgcgcgcgaccggaatccgcgccctgcgggcggagcttgggcgagccgggggcgggtccgtgctcatgggcagccgcgggccccctgaacttactgtcccctccgtagggaccatcccgcggtcatcaagcgacgcttcaccagcgtcctggtggtgtccagtctctcacccctgtgcgtgctgctctggagggaactcacaggcatccaggtgcgaaggaggcggggcaaagggcaacggcggtgagagctcaggggtctttaggggaggaagcaaaactgatgccccctttcctgtggctcagccaggcacatccctgctcaccctgatgggcttcaggctggagggcattttcccagcggcgctgctgcccctgttgctgaccatggtgagtgctcctgctgtattttttcttctggtctttgttatcagcctgatgggcagtgccgtggactcttgtttttggtttttggttgatgggagacaggacttttgagatggccccagggtcctccggtatgcatggtctggaaatcgtggctggagaggatttcaagcttggagtctcagggagcatgggcaaaggtctgggcaaaagcggtgggttatggtgaaagtgttttcttgccctcagattcttttcctgggcccactgatgcagctctctatggattgcccttgtgacctggcagatgggctgaaggttgtcctgggtgagtcttaaaggctgaagggaaaagtaggcacaggcagtccaggacattggggcagggagtcagcgggctcagggtgtgatctggacacgtgaaatgtcatctctctgggtgtgttttctcatcagtaaaatggaaacatagagctaggtggcctctaagggttgattgccaacgtccaaggagttccctgggaacccccagcagtatttggtgtggatcagagagcactgtcccctgcttccccaaccagagctagtcttgcttaaattttggtgtctccagagtttacttccaggatgcccttgcctcagctaatgccttccattcaggtcatctcaagacattgggtttatgttgggtccacacccccgtcctcagcagtattgatgcctaacctgagtttggccagggtaaagttgtgggagaggagcccttggagcctctggggtctcactgtctgacagcccgtcactcacagcttgtcctgaattccctctgcagccccccgctcctgggcccgctgcctcacagacatgcgttggctgcggaaccaagtgatcgccccgctgacagaggagctggtgttccgggcctgtatgctgcccatgttagcaccgtgcatgggcctgggccctgctgtgttcacctgcccgctcttttttggagttggtgagtctggccagattagtcctggtgtgttttcagcatgagagctcagaagggggcttgaggtgaggggcagtcctagaagggaggctgggaggaatgactgtgatgtgattgtcacctttttcccagcccattttcaccatattattgagcagctgcgtttccgccagagcagcgtggggaacatcttcttgtctgctggtgagtcctggctagctggcctgggttagggtgtatgatgatgtcgctaatggccactctggagaaggaattgggaactgagggccacagtattggagaggccactgaccgtgggaagttggggtgcaggacagctgtaggtggtggggcaggcagctactgccccggggggaggggatggtcggtctttggctgatgggtatgtagtgtgggggcaggaagggcgtgcaggtgtggtcactcgtggcctccccgtctccagcgttccagttctcctacacagctgtcttcggtgcctacactgctttcctcttcatccgcacaggttggtcctcagtccctcatgggtccctgggggcccacaggagcgggtgggagaatgggaatactgtttgttctaggaacaaaagttcttctactccagtccttgagacaggctgagccagagccctcagcctggtgaggtctgagaggtggaaaggagcagaggccgtggtgtgtgggtggatggctggggtagtgggatcttgatctcctgtttcaggggatgagggtcactagccctggaagggccagaggaggtggtagggctgctccctgagctgctgtctcttttccccaggacacctgattgggccggttctctgccattccttctgcaattacatgggtttcccagctgtttgcgcggccttggagcacccacagaggcggcccctgctggcaggctatgccctgggtgtgggactcttcctgcttctgctccagcccctcacggaccccaagctctacggcagccttcccctttgtgtgcttttggagcgggcaggggactcagaggctcccctgtgctcctgacctatgctcctggatacgctatgaactctcaccggctccccagccctccccaccaaggggtactgcaggggaagggctggctggggtccccgagatctcaggaatttttgtaggggattgaagccagagctagttgcgtcccagggaccaagagaaagaagcagatatccaaagggtgcagccccttttgaaaggggtgtttacgagcagctgtgagtgaggggacaaggggcaggtcccaggagccacacactcccttcctcactttggactgctgcttctcttagctcctctgcctctgaaaagctgctcggggttttttatttataaaacctctccccaccccccaccccccaacttcctgggttttctcattgtctttttgcatcagtactttgtattgggatattaaagagatttaacttgggtaacatggccttgggcctttgggaatcggtctatttgggatcttgtgtgaagactctaggcagctcttgggagtgtgcccaccacctgtcccagctaccttgaacactgacatctgggcggtgcatccaggcgggtagttccctggagtacaggatgggctgggagctctggttgctgggagcctgtggcttcctccttcctgaaccatgccccaaagtcctagtgtggttggctctgagactgcaggtaccaggtgtgagcccagctcatcctggggcctgtgccttggctgacgggtcagggagtgggaaccatggccctggccctgacctcagcgatggagcctccgacgtatctcctctgaggggaagatgactggcctgaagcctctgccaggacctccacagtctgccagtcttgtttttcacaagaggaaataggtccctgagtcaccataagtagaggcttttctggttctctccacctctgacctctgccccagaggaacccagaacacaggctgcagccctgagggcagcagggactttgccaagcaacacagtgactccagggtccttctcggcacctgcaagtgttctgcctgctctccatcatttttggaagggctctcgtttccctgcctgtgctcttttaaaattagattcctgaaagagtattagccctggattacttgaggtcaggagtccgagaccagcctgaccaacatggtgaaacccgtctctactaaaaatacaaaaaattagccgggcataggcgggggcgtggtggcaggaggctaaggcaggacaatcacttgaacctgggaggcacagattccagtgagccaaaatcacactactgtactccagcctgggtgacagagcgagactccatctccggggtggggggcagggggggcgggggagggaagaaagccctttaggtcccattccccaatcaaggaggttgtcccaaggtcccttctctgaggctggccactgagggaaaaaggatgtgcggtcactcccccacgatgcctgcaggctggccatgacaacgacatccacccggatggaaggggcagcatcgcagtcatctgcctcctggggtacatctaggacatggcggtccagaaaggaagaggctcaagcccactgtgagttgcccatcccagaggttggactggctctgggagcactgggcagaggcctgctgggtgcttcccatccagaggctgatttcctgcatcggcctccccacacccacccctccatctcaggaactgcccagcctcctgctcccttcaccatcctctccctacctgtgggcaggtgggcaggagggcagtggtgcaggcagggttactgtccccactgcaggaaagggaactgagcaggagtctggaggggtggtcatggggagtggcagggttagaacctgagaccctggacccggtgctccccctcacctcccaccaacattctcacatccagagcacacacaagactcccggatcaccattcccgagggtcttacccactgcccacaaggtggtacctgcttgcatttacctgctaactgaggtgggacgctggccttgggttttagaaaataaagcagcggggttgggaggcgagtctgccaacggcctgggtttcatctctctctcttactacttgtgaagtcctggacaaattatttaatcttcctgtgacttgatttctgtgtccataagaggatgaaggttaattccctgtgttaataggtgttaaatacttagaacaggccccacccctcaagcaagttcagtactactagtcctgtttggggagtatacacagtaggcacccaatagtgacttaaaacagggccacgatggtcattctcactaccctctgaggagaacgacacaactgacctgcccacccatggggagcttgaaaggcagccccccactgctgagtggtgcaggctgggggctgcacaggatccagcatggagggcaggggaaagccagctttattgagtaaacttcccaggacctgggacatcttagatctccccttcccccaggagataggacccctaaacctcccctgggtcctaggaccacctgacccaccacttgtagtctccagtgaggaggggacccttatttggcaagagatgaacatgtaagcagctgtccgccggaggaaaggacgatggctgaaaggaatgaaccaccgcaggcggtgtctctcctgtccagctgtggacaggacctccacggcccggccttcctggcctcgggcactggctggcctgggcctgccgtggcagcacagcttctgttgaaggcttggggatggccaggctgccggtctggggcaagatcactcgatctccaggatgaggtcgtcaccttccagtgtcatgtccttggtcacatgaaccttgcggacagtaccctccatgggtgaggtcaccacagtctccatcttcatggcactgagcacacacaggggctggcccttggccaccttggcccctgccaccactttgatgtctatcaccttcccaggcatgggcgccccgatctggcccttcacgtcctttagg

SEQ ID NO: 97189 - DNA, 14941 bp, Homo sapiens
  misc_feature (1)...(14941): n = A,T,C or G
ctatgaatttttaattttgaggaagaagatacctatttttatacatctgtattcttgaaaaggagctgggaggattgggttctggtctcagtaagaacctctttttctctgtccaaattattgaactaaccagtgtggcagggctctaggaggctaccgatgactacagaatataccctgtggcttcccaggtttgactttctcagtcaaacttacctggtgtaaggcactctgctagctgtaaagtgataaaggcatgatggcccttgcctttgaagggatttagggtgtagaaaatggacatttgcacattacttgatgaatgggcacacaggatacttgcagagtatgcagagcccgaggaatgggcaggcagtagccaagagactggagctcagagaagaaaggatgtgccgtgaatggccagagtggagaaggatccacagagggaaaccttgaagactggagggtgggtagggggattcatgagccaggaggaagagggagttccaggtgagggcagataaccttgtgaggtcagtgaagccaccaggcacactcctgtttcactagggctcgttcatgtttctacaaaactcacttaggacttctaatttttttaagcagctaaccctagaaaaaaaggactcagcccagggcactgaggacgcacctgataacagcagcctggagctcctagcaggtaaggttttagcttttcaagtgagccctggactgcagcagaggaagtaaaaaacgtgagttcaaactttcaaactattccactgtaccttctactacagcggcgtccttctgcaatttagtgggctgttgctgccactgtgggtcttcaaggcagcagcaggtcttccctccccaagatgttaggacaggactagaaatttgtattaaagtctgtgcagttacagatagctgcacatgatggggtgggggtaggtaatacgcagattcagggccctgaattttattttatttttatttttttgagacagagtctcacctctgtcgcccaggctggagtgcagtggcgccatctcggctcactgcaagctccgcctcccgggttcacaccattctcctgcctcagcctcccgagtagctgggaccacaggcgcccgccatcacgcccggctaaatttttgtatttttagtagagacggggtttcaccgtgttagccaggatggtctcgatctcctgaccttgtgatccgcctgccttggcctcccaaagtgctgggattacaggcgtgagccaccgcgcccggcctggcaccatgtcactcttaatgtgtgttatgggaaagtgtcagtgcgtgggttgtgattgcaattatactgaagtcttttctccatacatgtctcctgcagtgcttaaacagccttcccagcccacagcagcaggggtacagcagctctcacattcagtcactagcagagatgccaggtactattctgagcttttaaaatgtactaatgctcttagttctcaaaactatcctaggagctataggtactgttattaactctcattttgcatatgaggaaattgaggcccacagatatcaataaacttacccaaggctacacagccagtaaatgacagagcaagaattcaaacccaggcagcctagctctgctgtctctggaagagccgaattagcagggatgccctcctacagatcctgagtccttcagataaaacagtatctgggtcaagggaagctggggatcgtgacgtcagcacctatgcttggttggtaaatccctctttctagggtcacaaccacaacacatacgcgtttatgcttaggcctaagatgtgtccctgaaatcactgtcaactgaaccatgttttaaatgttgtgggggctgttgctactgaaaagaaccctgctgtgaacgcttgtacaaagcaaagaatctatttttataaatttagatctggagattttaaaaaatgcaaatatgatacatacaattcagtatttatgcagtcagaagagacaaaggaataagtatcttcccatacaaggaaaaaaattaacatttaattcagtaccttctgtggaccctggggagatgctggggtcttccacagccttatctcatttagtctttacagtgcccttctgggggcagggggaggcatggatcctaacaaactagaggacccaggctcaggtgaggcagaacgcttagcaggaggtaatgactttcagtttgccgcctccaaagcccatgttttctccagtgtgcaacatgagctttaaaatctaggtgtttataatctggtggaacccctggaggatggcttgggctgttctgtcctacagacctgtggctctcagcatccattctacgcctcacatgggcagccctgctgaagaaaatcaccaaactgtgtgttgatgccaccatccattggtggtccactcactcaggagcctttggtttgtcagtccttccccctgcctttctggcctttgtccctcagtggctactccattctttaaaaaatctacccagtctctgcctcctgcttcatacttacggatctcttttctcagtaaactcacccaacttgcaccctcccactgcagaacctcatcagtgtggggacccatttcctccaggctcacagtgggatcgtcccttctgctttcttgggacctgcttgcatcagttatcactgctgcaccttcagccttcccctgagttcctttccctcagcaggtcaagctctcatttcatcagaagaaaatctcccgtgaccttgaacttcctccacttatcctcaacctctctccctcacatctcagccaaggatctcaaaaccacaagctgcatgcaccctgtctccctttcttcctctcattctctccctcacttagggtacttgctttttctgtggcctctgaaacttctctcctcagggaaggcctcttaattaccaaattttgcatttaccttcattgtatctgaactatgtgcaaaatttggcactgtaaggctatgactcgcctggtttttccctccctgggcttttctcttcatctactttcctctggtcatgcctaaatagtgctcatcctgctctcccacccagctatcttccatcccaactgttgaccactgcctctgggctcaagactctcaaattggtatgaccagccaaggcctctgctgagtgccagctgggagattcatttgctcactaggcagctcctcgtggaggtcccattggtacctcagtttcctctctcctgactaaagagacttttagtctgtttcatgattaatccaatttatcacatctgaaatcttggattcattcaagaggcctctcattttttttttttttttttttttttgagacagagtctccctctgttgcccagactggagtgcagtggcgtgatctcggctcactgcaacctccctgcctcccaagttcaagtgattctcttgcctcagcctctgagtagttgggattacaggcgcccaccaccatgcccagctaatttttgtatttttagtagagacggggtttcaccatgttggccaagctggtctcaatctcctgacctcgtgatctgcccgcctcggccccccaaagtgctgggattacaggcatgagccaccgcgcccggccaagaggcctctcccacatccaggcgctcacaaaggcctatcacttaggcctgatgaacacttctgattcctggtgacgcctctatctccactgtctttacttgttattgggctcttaaggtcttcctgtctctagtttgatctaagccacacctttgaaagaacgatctttctgaagtacaaaattaccaatatatttcaccagtgcttaaaactctttattggcttcctgtcttctacagatgaaaatctgtttctagccaggcaaggtggtgtgtgcctttagtcccagttactcgagaggatgaggccgggagttcaaagctgcagtgagctacaatcacgccactgcactccagcctaggtgacaggcgagacctcatctttaaaaagtaaaaatttacataggaagttgttttatgcctttgcataaggtttgtgttaactttcagcaagaaattccctttctctcccttgtctggcatatcactcttcatccttcaaaacccagctctggggcaggagtggtgacttatgcctgtaataccgtcactttggggagctggggcgggaggacagcttgagactagcctgggcaacacggtgagacccctgtctctacaagtaaaaaaaattagccggtgtggtggcatgcgcctgtggttcctggtactctggaagctgaagctgaggcagtaggatcgcttgagcccaggaggtcgaggctgcagtgagccaggactgagccactgcactccagcctgggcaacagagcaagaccttgtctcaaaaaaacaaaaggtcagctcaggtatctcctcatggaaacccttcttcacatccagaggtggtcggcttccttctctattctaaccctgggctttgtacacaggtctgcatcccctcctagcatctgtgagcttctctcagggaaaagctcattgatctgcatccccaagacctgctggggaagaatctatccatctaaactcgctttaatttgacaaatgaatcagttaagagtaggaaagctgcctatgggcactgctcaatgcaacgtgagcaacaaagggagacagaactgaggccagaaaggtgaggggggacagaggctggcagggaggggagcttgtcagtgcagactccaggaagaatctatacagaaagttactgagcggcctgagtcccccaagtgagggctcgggacaatctcccgcctgggtgagagaatagggagaccctgaaacgtctctgcagcctcgggctgctccagaagcgcccacagctgcagggttttggtgtggatgggacctgctgacagggatgcggtgggaagagcccctcggcgcccgttctcccaggcttccccttggccaagggtgctcctagcacagggccatgaaagtaagatgaagaggcttgtttttctcctagataccagcgggcaagcagaaaacaagaggctcaagaggggcagcccccgcatagaggagatgcgagctctgcgctctgccagggccccgagcccgtcagaggccgccccgcgccgcccggaagccaccgcggcccccctcactcctagaggaagggagcaccgcgaggctcacggcagggccctggcgccgggcagggcgagcctcggaagccgcctggaggtaactgggcgagggccgcgcagggaagggctcagcaggaggtgcaggccacgggccgctgctgagaggtcctcaccccgggcccccttgttcccgcaggacgtcctgtggctgcaggaggtctccaacctgtcagagtggctgagtcccagccctgggccctgagccgggtccccttccgcaagcgcccannnnnnnnnnnnnnnnnnnnnnnnnnnnnnnnnnnnnnnnnnnnnnnnnnnnnnnnnnnnnnnnnnnnnnnnnnnnnnnnnnnnnnnnnnnnnnnnnnnnnnnnnnnnnnnnnnnnnnnnnnnnnnnnnnnnnnnnnnnnnnnnnnnnnnnnnnnnnnnnnnnnnnnnnnnnnnnnnnnnnnnnnnnnnnnnnnnnnnnnnnnnnnnnnnnnnnnnnnnnnnnnnnnnnnnnnnnnnnnnnnnnnnnnnnnnnnnnnnnnnnnnnnnnnnnnnnnnnnnnnnnnnnnnnnnnnnnnnnnnnnnnnnnnnnnnnnnnnnnnnnnnnnnnnnnnnnnnnnnnnnnnnnnnnnnnnnnnnnnnnnnnnnnnnnnnnnnnnnnnnnnnnnnnnnnnnnnnnnnnnnnnnnnnnnnnnnnnnnnnnnnnnnnnnnnnnnnnnnnnnnnnnnnnnnnnnnnnnnnnnnnnnnnnnnnnnnnnnnnnnggcagcctctacgtctggaagagcgaactgcccaggtgcgggggctgcgcgcgaccggaatccgcgccctgcgggcggagcttgggcgagccgggggcggstccgtgctcatgggcagccgcgggccccctgaacttactgtcccctccgtagggaccatcccgcggtcatcaagcgacgcttcaccagcgtcctggtggtgtccagtctctcacccctgtgcgtgctgctctggagggaactcacaggcatccaggtgcgaaggaggcggggcaaagggcaacggcggtgagagctcaggggtctttaggggaggaagcaaaactgatgccccctttcctgtggctcagccaggcacatccctgctcaccctgatgggcttcaggctggagggcattttcccagcggcgctgctgcccctgttgctgaccatggtgagtgctcctgctgtattttttcttctggtctttgttatyagcctgatgggcagtgccgtggactcttgtttttggtttttggttgatgggagacaggacttttgagatggccccagggtcctccggtatgcatggtctggaaatcgtggctggagaggatttcaagcttggagtctcagggagcatgggcaaaggtctgggcaaaagcggtgggttatggtgaaagtgttttcttgccctcagattcttttcctgggcccactgatgcagctctctatggattgcccttgtgacctggcagatgggctgaaggttgtcctgggtgagtcttaaaggctgaagggaaaagtaggcacaggcagtccaggacattggggcagggagtcagcgggctcagggtgtgatctggacacgtgaaatgtcatctctctgggtgtgttttctcatcagtaaaatggaaacatagagctaggtggcctctaagggttgattgccaacgtccaaggagttccctgggaacccccagcagtatttggtgtggatcagagagcactgtcccctgcttccccaaccagagctagtcttgcttaaattttggtgtctccagagtttacttccaggatgcccttgcctcagctaatgccttccattcaggtcatctcaagacattgggtttatgttgggtccacacccccgtcctcagcagtattgatgcctaacytgagtttggccagggtaaagttgtgggagagsagcccttggagcctctggggtctcactgtctgacrgcccgtcactcacagcttgtcctgaattccctctgcagccccccgctcctgggcccgctgcctcacagacatgcgttggctgcggaaccaagtgatcgccccgctgacagaggagctggtgttccgggcctgtatgctgcccatgttagcaccgtgcatgggyctgggccctgctgtgttcacctgcccgctcttttttggagttggtgagtctggccagattagtcctggtgtgttttcagcatgagagctcagaagggggcttgaggtgaggggcagtcctagaagggaggctgggaggaatgactgtgatgtgattgtcacctttttcccagcccattttcaccatattattgagcagctgcgtttccgccagagcagcgtggggaacatcttcttgtctgctggtgagtcctggctagctggcctgggttagggtgtatgatgatgtcgctaatggccactctggagaaggaattgggaactgagggccacagtattggagaggccactgaccgtgggaagttggggtgcaggacagctgtaggtggtggggcaggcagctactgccccggggggaggggatggtcggtctttggctgatgggtatgtagtgtgggggcaggaagggcgtgcaggtgtggtcactcgtggcctccccgtctccagcgttccagttctcctacacagctgtcttyggtgcctacactgctttcctcttcatccgcacaggttggtcctcagtccctcatgggtccctgggggcccacaggagcgggtgggagaatgggaatactgtttgttctaggaacaaaagttcttctactccagtccttgagacaggctgagccagagccctcagcctggtgaggtctgagaggtggaaaggagcagaggccgtggtgtgtgggtggatggctggggtagtgggatcttgatctcctgtttcaggggatgagggtcactagccctggaagggccagaggaggtggtarggctgctccctgagctgctgtctcttttccccaggacacctgattgggccggttctctgccattccttctgcaattacatgggtttcccagctgtttgcgcggccttggagcacccacagaggcggcccctgctggcaggctatgccctgggtgtgggactcttcctgcttctgctccagcccctcacggaccccaagctctacggcagccttcccctttgtgtgcttttggagcgggcaggggactcagaggctcccctgtgctcctgacctatgctcctggatacgctatgaactctcaccggctccccagccctccccaccaaggggtactgcaggggaagggctggctggggtccccgagatctcaggaatttttgtaggggattgaagccagagctagttgcgtcccagggaccaagagaaagaagcagatatccaaagggtgcagccccttttgaaaggggtgtttacgagcagctgtgagtgaggggacaaggggcaggtcccaggagccacacactcccttcctcactttggactgctgcttctcttagctcctctgcctctgaaaagctgctcggggttttttatttataaaacctctccccaccccccaccccccaacttcctgggttttctcattgtctttttgcatcagtactttgtattgggatattaaagagatttaacttgggtaacatggccttgggcctttgggaatcggtctatttgggatcttgtgtgaagactctaggcagctcttgggagtgtgcccaccacctgtcccagctaccttgaacactgacatctgggcggtgcatccaggcgggtagttccctggagtacaggatgggctgggagctctggttgctgggagcctgtggcttcctccttcctgaaccatgccccaaagtcctagtgtggttggctctgagactgcaggtaccaggtgtgagcccagctcatcctggggcctgtgccttggctgacgggtcagggagtgggaaccatggccctggccctgacctcagcgatggagcctccgacgtatctcctctgaggggaagatgactggcctgaagcctctgccaggacctccacagtctgccagtcttgtttttcacaagaggaaataggtccctgagtcaccataagtagaggcttttctggttctctccacctctgacctctgccccagaggaacccagaacacaggctgcagccctgagggcagcagggactttgccaagcaacacagtgactccagggtccttctcggcacctgcaagtgttctgcctgctctccatcatttttggaagggctctcgtttccctgcctgtgctcttttaaaattagattcctgaaagagtattagccctggattacttgaggtcaggagtccgagaccagcctgaccaacatggtgaaacccgtctctactaaaaatacaaaaaattagccgggcataggcgggggcgtggtggcaggaggctaaggcaggacaatcacttgaacctgggaggcacagattccagtgagccaaaatcacactactgtactccagcctgggtgacagagcgagactccatctccggggtggggggcagggggggcgggggagggaagaaagccctttaggtcccattccccaatcaaggaggttgtcccaaggtcccttctctgaggctggccactgagggaaaaaggatgtgcggtcactcccccacgatgcctgcaggctggccatgacaacgacatccacccggatggaaggggcagcatcgcagtcatctgcctcctggggtacatctaggacatggcggtccagaaaggaagaggctcaagcccactgtgagttgcccatcccagaggttggactggctctgggagcactgggcagaggcctgctgggtgcttcccatccagaggctgatttcctgcatcggcctccccacacccacccctccatctcaggaactgcccagcctcctgctcccttcaccatcctctccctacctgtgggcaggtgggcaggagggcagtggtgcaggcagggttactgtccccactgcaggaaagggaactgagcaggagtctggaggggtggtcatggggagtggcagggttagaacctgagaccctggacccggtgctccccctcacctcccaccaacattctcacatccagagcacacacaagactcccggatcaccattcccgagggtcttacccactgcccacaaggtggtacctgcttgcatttacctgctaactgaggtgggacgctggccttgggttttagaaaataaagcagcggggttgggaggcgagtctgccaacggcctgggtttcatctctctctcttactacttgtgaagtcctggacaaattatttaatcttcctgtgacttgatttctgtgtccataagaggatgaaggttaattccctgtgttaataggtgttaaatacttagaacaggccccacccctcaagcaagttcagtactactagtcctgtttggggagtatacacagtaggcacccaatagtgacttaaaacagggccacgatggtcattctcactaccctctgaggagaacgacacaactgacctgcccacccatggggagcttgaaaggcagccccccactgctgagtggtgcaggctgggggctgcacaggatccagcatggagggcaggggaaagccagctttattgagtaaacttcccaggacctgggacatcttagatctccccttcccccaggagataggacccctaaacctcccctgggtcctaggaccacctgacccaccacttgtagtctccagtgaggaggggacccttatttggcaagagatgaacatgtaagcagctgtccgccggaggaaaggacgatggctgaaaggaatgaaccaccgcaggcggtgtctctcctgtccagctgtggacaggacctccacggcccggccttcctggcctcgggcactggctggcctgggcctgccgtggcagcacagcttctgttgaaggcttggggatggccaggctgccggtctggggcaagatcactcgatctccaggatgaggtcgtcaccttccagtgtcatgtccttggtcacatgaaccttgcggacagtaccctccatgggtgaggtcaccacagtctccatcttcatggcactgagcacacacaggggctggcccttggccaccttggcccctgccaccactttgatgtctatcaccttcccaggcatgggcgccccgatctggcccttcacgtcctttagggccttggggtggaagtgcatctcctgaagacacagggcagaggggacatgacatcctgggcccagccaagccccaccgcctggctggccctgggggagacaataccttcatggcctgggtgtccttgaccaagatggaccgcagctgcccattgagctcaaagaagacctgcctctggccggcccggttcaggtcgctcacggccagggctttgatgtgcagcgtcttgccccgctccagctccacctgcagggagggtgtgcagactcagagctggacgccaaggtgggagagcagtcccccggccctggccataggaagtccccacactgggccttggctcctcgttcctaaaggcctagctcccggtctcaagggtcctttctgctcccaaagcttgcgaggctgggtgacagccaagctaaactccagagctctggggcagggggccagggtggagtgtggagaagcgccagagccactgacctcaaactcctctgcgatcttgggtccctgcaggaagaggcgagtattcaggctatccagggggccaaaggtggcagtgaagtccttgaagtgggcaaacacatcggggtacatagctgctgagagcacatcttccggcgtcacctcctccccatgccggtctaccagctccttctccagtgcctgcagatccaggggagggagggaggctccaggccgcccctccacccttggcaggtccttcagtacctggggagcaaagcagaggatcagtcccaagtcctgcatccagcccccaccctcacaccatgctgggccttccctaccttagagcgaaagggttcggggaaccccccatgggggacaccgatgtagccctgcaggaactccaccacggagcggggaaaggacagctcttccgcctgagcttcggcctctgcccggctcaatccattctgcaccataaactgggccaggtcccccacgatcttggaggagggcgtcacctgaggagaaggccctggaggttagggtgccaggcacctcaaggaggccagtggcaggtgcatgcagggctgggtcaggtaaggagcaccgggccgggctcaccttgatgagatcgcccagcatctggttggcctccacataggccttcttgacctccttgaacttggagccaagccccatgctgtgggcctggaagtgcaggttggtgtactggccccctgggatctcattttcatacacgtccgagttgccagacttcatggtggccgtgcagtcgaaggccgcgtacagtccccgagccccctcccagtactcactgtagtcaaacacgcgctccatgggcacctctgcagggaggccagagtcagaggaggccttagaaatgtgtgactcttccaggacccagggctagctcaggtcccatgtctgactcaggtgacagaaggcggcaaggccagagcagggcatctggatcctaggcaggtccaacactactgggactggtggtggctgcggctttgagaggggtgtggccacgggctgctgttcttcctacctgtgtccaggggagtccctctggtacaggccaccagggcccccatgctgggctgtgaagtcatcccagacatggaatcagctgccacatccaccacatcagctccagcctgggcacaggccagcatggctgccacgcctgcccctgacgtgtcgtgggtgtggatgtgcagtgggaggtcggggaagcggtcccggagggagctgaccagcatggtgcaggccgtgggcttcagcagcccggccatgtcctgggggaagtgggagagagagagagagagatggtagagagggcaggatgtgtgcctgtgggtggcggggacatggccggggcagagagggagggacggacaagtggcccaggcaccttgatgcacaggatgtgggtgccagctcgcaccagctcttcggccaagcccatgtagtactgcagtgagtacttggtgcggctggggtcggccacgtcgcccgtgtatgagatggcagcctccaccacgcctccggcacttcctgccgcctccatgcccagcagcatgttgggcaagtagttgagggagtcaaacacacggaagacatccatgccattctctttggccacttcacagaacctgcaagggtgagagagcccagggctgagccccaccccacctccctctgaacagtcttccctggctccttcctgacccactctatggcccctggggaatgagatctgagggtctcgcctggcagggggtgtggcatccacaggcggggggtggccacacaagtgtggaccaggccctggaggatcagctaggccagtggcaggctgtggaagagggtactgagcaaggagtcttgaggcctgggttccaatcccagccctgcaccgagtgacccaggcaagtctcagaccttccactgccccaggagtgagggagtgatttagaagcctgtctggttctgcaactccaattttacacttctcgatatttccaaacagcagcccctgctgcgtgtggccacagagagacttggtgtcaggctgaccgtggagaacagaggccatcacgacatggctcggtaccctctgggccacaccaggtagcgtctgcccaccccaccccaggctcacttgaagaccacgttgtctgggtagttggtgtagcccacagcattggccccccgcagcagcatctggaaagggatgttggggatgagctcccggagctcctgcagccgccgccaggggcactcatacaggaagcgcatggcgacgtcaaacgtggctcctgcacaggaaccgagaggcccagatcagctctgcatgcctggggaactccaccaggccttggagctagctctgcagcacaagcctctggccccaataccaggtcctgctcatcttcgccatacctgtgttccctgctccaacccccacagatttttcccttgtctgatctctaagggggagaccaggctcatttgtgtcccttctatgccccctttataatcccatcttctcctctacctctctgtgctataattaacaggcaggtgtctcctcctgaccctggacctcccaggatgcacctggtctcagctctgcaacctcgtgccggcaccaggcctggccggagagggcgctgtgccttcttcggtccttcctctttggtgttcttcgtgtcagcgtctctagcttgtccccagtggcctaagcctgtgggactggccacagagcgggcgcccattcctaccaggcgctgcgcagcatgccagcctacctccccagttctccatgctgaagagcttgctgaagttgtgggcaacatagggggcgatctttttgagatcgtgggtgcgcacacgagtggccagcagtgactggtggg

SEQ ID NO: 97190 - DNA, 47875 bp, Homo sapiens
ctccctcctccaccccataccacactggggggtctgagccacccccctcagccccgttcggctcagaccgacccccactccatccccagacctgcagcacaagtgcgcgggcctgtcctcccaggggcctgggcgactccatatgcaatcagtagcgagcagccgggccccacagaccctcatgcactctcttacgtgccattctccccagactttttttgtacttaatgtatgaaagatccaaactaatattgctgtaaaaaggagagacaaattaatatagcttattctataaatatatctgtatataaaggtttctgtatattgtatagagctgtgtataaactggatgtagaagcacgctggctgcctcgaatgtctttgcatcaggtggggactgggtagaaatttgatgtcgaggttgcagcagagcagggggttggcatggggccgggggccgggggggcctctgccactgttccctggatggaacagaaagcctaagggggaaacagattccttgggaccagagcccgtttcacccacaagacgcagggtgtgtttgggtggttcaggtccagccctttgtctgtattgggttagaacttcgtttctcaaagttcacggtgctcatgactcactggggcgcttgctaaatgcaggtgcgggtttagtggtccggggtggggcccaggtatagatttcttacctgctcctgctcggctagtgccctggcccggggccacactttgagttgcagggagggagtagaagacccttgaagccccctgtgaatgagggcagccacttgcggagtcctgcctgtgtgagagatgtaccagcgggtgcacgttcatactacagcctggaaagatacagcttgctggcctccccttcctccctgaggggtctgagaggattagctgcccaagactgccaagctggcgactgggggaccaggctagtctgaccatgcccacctccctccccaacaatgcagacagctagggcaggcaggggtggaagatcccagtgggacagcactgaaatgcaggggccactagaagtctttgctgagggctttcctgagagggcgcaaaatacctggccagacccagtgcagcccaggaaccccaggccagcatagcttccgggcagtgaggcctagggagtggctggaaggcccaggtggtggggcctgccccctctacacagcaggtggcgctgttcagccagtcagtcccgccttggccgcagagtctggcctcggcactgacccagccaagctgaccggacctttcccttcccctgaccctgcccccatctcggcccccagtgtccagtggctctatttggtgaggggctggggagagtgatagaagaatgcccccagccttagagcctgtcttcacccacagccactgaacagaagcagaaacgggccaaacaagggtgaagacctgcccaaggtcgcatgggaggtggggacagactggggaccagaatcagggcctctcagcctaggactctggcctccaccacacctgatggctttcagaggttctttgccctcagtggtctcaatggtctgcaaattatcctgtccagtgagcacagcacaggcagaagaaactgaaggccagggaggctctgtggcttgcccggggctgcagccagggtgtggcattggggagggtcttgagagggcagtgctgggaagggctagagaggcactctgcctcacgctccactcaatacctgcagcagccccctcctgtcccggtgcccctgcagtcaggaaggggtctaccctgcaggaccccacactcaggtgtgcccttgggccctagtccggggaagctggaccaccagcctcactggcttgctggattgacactcaccccactttgagccctcctcttcctctgcgaaatggcctgatgccagtgctgtgtgggtccacaggaggccaggagagtcccacggtggggaggacagggctgtaccttctcctgggctggcctctacgcccattacccattaaccctcaggtgccagcatccctctccccagtgctgccttcggtctaccacctcctcctggccctgctcccactcaagggacagtgatgggtgctgagagctgattggaactggagagggcaccatttactgatcactgacctggcactttacctccactgtaaggcagggatactgagtgtgctttatagatgaggcctctgaggacagagggcaggccttggggactaggtggagctggctacaggggacagccatgtctgctgggctagggctgaaatctcagcccctcactcactgtggctcggtagagaagccaggggcacagatgaggactcatctccattgatgggcccccctaggtccttgtatgcaagtcccctgggctactttcaccggcccagccaccttcctgccccagcctctgccccagcgctgcttgggacccaacttcattatggagttggcagatggcagcctcaactcttggctgagcccttgagtctgggacatttcagccacctctttcctccagtccagagatgaaaatccctggggacagttgctcctttgctcagtgacctagtgtaacaggggagatggcagggcctgagctcccttagccaggtcagctgctacagggttaacaggaggctccattccaccccttccaacttcaaggctaccctagagattgaataatctatactcttaattgattataatgcaatggagttggggcgttagggacaaagtacgagtcttcccttctacctccagcccttgctgaccaggacagggacaatgtgtagctcaacggatggtggtgagaacttagatgatggtcagttatgcagtatgtgggatacggaggaaagatccgtgggtatgtggaggcttgtagagaagctggttctgtggctggtcccaggcgactcgtaatgtaaatccgtttctcagaatcgcgtggtgtaggcgggtgtctactttgtccgcaggcaggcctgaccccgggtggaggaggggcagggtggagaataacaattgtcttaagggagtctgcggagggagaaaaacctctggggtgtatcagctggaaaagaataggagtctcagtgtggcccctctcccccctctcagcccagcccctgcgggggcggtgagggagctgcggtcagcacacacagctggggcctccagcaaaatcccattctatatatctaagagcaacagctctgagagcggcccccagagggacaaaacctcattgtgaggcacccgccggcctcagcaccccctcccccaaccccagaactgtcgtggcattgacccttttcggcgggccaccatgggcctgctgactgggccacatctggggctcaggcattggctgcccctcccccacggctggccactgagaactgacagggaggctggggtgggagcggcttccaggcctctcaccccatccccacggggtggcctggcttgtgccccaccctccctggggatgctgcaaggcagaggtgagagtccgaagctggctacgttggcatcttgatctgccagcagtcccccacacctctggcctctgtttagtggcttgtcaaacagtggttgggtggggtaggtttttccagcttttacgtgctgccttgaagggtcccgagaggcttcaagttgagccactctgaagcgggatgattctctaggtctgggattccagaattatccgctcccaaggtttcagaggtccaggattctgtagatttttgtttgtttgtttgtttgtgtttggagacagggttttgctctgtcgcccaggctggagtgcagtggtgcaaacatggctcactgcagcctcactgcagcctcaacctcctgggctcaagcgattctccttcctcagcctccccagtagctgggatcacaggcatgtgccaccgtgcctagttaattttttaattttttgtagagacagggtcttgccatgttgcccaggctggtctcgaactcctggcctcaagcaatcctcctgcctcaacctcccaaagtgctgggattacaggtgtgagccactggagcctgactggattcggtagtttgaagatgccaccatacattcattcaacacatttattgagcacctactgtgtgccaggtcatgttcttggtgttgaagctatagcagtgaccgatacagaaaaatatcttgccctcgtagggcttccattctagagcaagaaggataataacagaaactaaataggaatcttttacatggtgagcaagaaaggcctaggtagggagaactgctttaggtaggctggttggggacatgacatttgagctgagaccaactgctacaaagaagtagccatgtggagacaagcattgtaaacagatggaatagcatgtgccaaggccctgtggcaggtgtaggccttgcatgtttgagcaatggcaaggaggtcttggtggctgttattcagtgagcaatggagagaggggaagagctgaggccagtggtagaggcggggcctgagaaaccagagcaagacattcagatattgttttgagtgcaaagggaaacttagttttgcaaaggaatgacatgatcggatgtatgtttcagaaagggtgatttgggagaactgaaggggatatcagtgagacgagaggctgtgcaagttgggcaggacagagatgtggaggcagtcagtcataagggtgaaggcaggggcacaaggacaaccgctttatcctggacttatatcgagttagaacctccaggtttcattataccagacagggccacggcaaaggagagttcggattcccggggcagccaggatttggctctgaactttaatgaccttgaaactcttaggcagggcggggagcggtggctcatgcctgtaatcccagcagtttgggaggccaacgtgggctgatcacctaaggtcaggagttcgagaccagcctggccaacatgaggaaaccccgtctctactaaaaatacaagttagcccagcgtggtggcgcctgtaatcccagttactggggaggctgaggcaggagaatcgcttgaaccgaggaggcagatgttgcagtgagctgagatcgcgccattgcactccagcctgggcgacagagccgaactccatctcaaaaaaaaaaggagcttttagacctgcattgtccaataccacagccacacgtaactgtttaattacaattaaacaaaatgaaaaaatcagttcctcagtctcaataggcacatttccagtgctcacttgtggccagtgactaccatactgaacaacacagggaacatttccatcatcacagccacaggacagggcttcctggcagtccttaatgcattgagcctcagtttccccatctgtaaaatgcaggtaacaacagcatctccttgataaggtgcctgtgaggagtacatgagataatgcctgtgtggcctggcacataacacacgttccctaaatgcaggttgttattgttgctgagcggggtgtgtgggtggctaacgagagggatgggggctgtctctgaggtttggattcggaatcgtgacatcttgtcccgtgcaagacgaaggcgaggacggcgagggcacacccttccagtcccgaccccacagaggccaagcggcccttcgcccccaccccgacccgggaaggccccgcgcccctcaagcctgggacggtctcgcgtcccccgacccgggacggccccgcgccccgcaagcctaggactgcccagcgctgagcgccgcctgcaggagtcgggagcgtggtgcccgcggccgggctgggcgcggcgcgggccggcagggggcgctgggcgcggcgggcggggcgcgtggggcgggcaggggccgggccagggacgcgcggggggcaagcgcggcggcggaccgggcgggaccgtagccggagcccagccgggactgtcgcgcgggccgcgccggcgatgccgcgcccccgggccgggctgtagcggggccgcggctggagtgtgcgccgggcaggcgggacatggaggtggtggacgagacggaggcgctgcagcgcttcttcgaaggtgagagaccgcgggctggcggcggcgaccctctggcgctgggaacccccggctgatctccccgggaactggggctcctcgctgtgtttccgcctcctctggctgggaccctccttcaggctggcaccagcccgccaagacaggctcccggggctgggagtcccccagcggttaccacccaccgccgctgaagttgggctccccctccccgctcctcaactcgcagcttccttgggactgtgtccccttccaggtccggactcctttgagccttccaggacccggaactttccctaaattgtgacactctcgcccccagcaaacttcccgagtctggggaccctctactttgcttccccagaaccccaagcgggatacaaccccattcaaggcccagacccccggygtgccttctaggaccttccgtacctcttgaggctggaccccagcctgcttcccagaatctgtgacccccgcctagagaccaagaccccctgtgtgcccttctggttggcgccatcccccatgacttctaggagctgggacctccccactgtgcttccatgagggtaggaccactttcgagcctggatccccttggagactgccacctgctttccacaatgctgcctagtgactgctctcctgtttggggctgggacccccctccctagcatgctctcctggggctggaaccttcttgaagctgacatccctgccaccggtcacctctgctctctgagacccttctagtgctgtgaactgcatcccaccagccctctgaggctcctcagcactatgtccccccaaccctggagctgtgcctctctgacctcgccccctcaaagagtgacctcacccccacttgaccgaaaggagccctctggggtggaattgacatacaccccataatatcttcttctgcccccacccctacattggttttggaggtctgctcctccatctaaccaactccctgtcttttcctggacgacccctgcccctcctgcagggccaccactcctcctggtgctgggttctggagggatgggaccrcagtgggagggggaggggaagttctggctgactgcctcccagcccactccgcttctcagaacctccctggaacatctagccagaccctctggcccccttttgtgcccctgtctaccaatgcagcgagmccagcccctgccccgagctccctctagtccctaaggccacatcctgctccttggtgcattgagaaccttcccttcatgtgtgaacctatcagggctacagggcagggaaccaaggcccaagtttcaagccccagattcctgtggagtcctgtggaggagagaagcaggtcttccrgtgcctcagtttctctccctctgtgacttgggaggcaggaacccttgttcacacctgctggctgagcagcccaggcaggggcacccctaagcctcagtcatcccactccaggattctggacaccccacagacccagaacccaagagttcaggcttggactagattgaatggttgactctgcatcaggtgggccatctgagggtcttaggcagccctgcatctgtcccggggctctggctctccccagacactgttgatccataggagctctcgaggggcctgacgcggtttgagaccttcagggaagaggggaccagacattcgtgcttgcttgggttactgtctggagtgccttgagcctgctaggtacccagaggacccgcaggccaggctcccttgacctccacactgcctgccccaggacgctgggccctgacagagagcagaggggtgggcctggctggcctggactccctggctccctcctgaccatgggttggggggtgggggctgacgccacggcttagccatgcagcggcctggcggggggaggctgcgctactccctccagagagataagaggagactcaagaatgtctgtggggagcaggggaggggtgtgaggctgcccgtctaggagggctgggctggaaacagctcccagcccctgcgatgggggaaggtgtgggtggcccctgaggcctagggtctccaggccacttgggaggggaaggcccatgtgggggacccactgtaggtgtgagagaaggcctgggagtggcagggcctggtgtgcttgtgagtgtgtgaagtgcgagggagcgggaagttgtgcttttgagccgtggctgcgtcactcttgagtgctgtcacactcggggctggggctggggacacctgagctctcatcctggtccccacttggccttggtcatccctctggacagtgggtagcagtccctgtgctctcggctctgggctgggagactgggaaagggttttaccgaaggggctgcagcacagcgcgccccctcacctgacgtggtccccctccctgggcacacaccaagcataggtgctgggtcctgccctgtgccggtggtgggctgggggctaaggcgctttggacctcaggtgggaggccgggacagagcggccccctcgaggctggtacagccgggcccccgtgaccgcccggctaatcccctagagagaggcaaggcagcccagatcggcgggcacagggcctgcagagaggggacccaccgggcaggatgcactggcttccagcaggtaaccgggccatggtataagggggctttggactccagagccagkgcaggcacgggacagggcagtgtctgagaatcctgccaggacctcagagttctggtgcaggctggaccactgagagtggggtgaccgtctgtgcctggcagggaacccccaaagagctcttgccctctttaagtcctttttcctcacctgcaagacaggagggggtggcagagaagaacctcagctctgaagaagctcactgcccagccctgggaaggagagacatgttagagtatgaatggccgagcctggaaggggtgcctgctggccctagattctaggggcacatgaggctcgagtgagcaaccagtgtcccccagaaagcaggtgggtgtgcagggagccttggaggatggagggaagtcgccttccagcaggtgctggaaagaccacttggagtttagtgggcctctgcccggcctctggagccccaccagggctggaggagggaggcctgggatttcgccccttctgaagctgatgggtgrctggactggtgacttccttctctggcctcattcccctcccagggtaagtaagtgggttggaccagagcaggggcttccaatgtgattttttaaccatcaaacaaactcatagtctcctgataggacagatacagtggataatgggggctgggctcctcacagcccctgaagcaccaggatactggtttgaaagccacccttcccggctgtgggatgggtaaggggaggggaatggcgctggctgaggctcagagagaagggagttggccagagttagccagagtggayacctagcccccagctccctactctgccaccagtaccttggggttgagggggctacctgtcagggaccaacatctctgcctccagagggcaggaggaggtcccaggtagagactacctgatgatttggaagagaggactcccacctggacaggaatccgggggctgagctgggcttcgtgatgggggtggcactgtggcccgtgtcagcctgtctctgtctgtccctggtgcacccagggagtaagtagatgggaggggtggccaggcacagggtttcctgagcccaggcaggggaggaaatggtagtagggggtctgactcatccccatgtccccagcacccagtgcagggcaggggtggggggtgggcaggaagygctctccrggtcaatggtgacaacaatgggtatgtgaacagaggcggcgggggtgggggacgcaccccagaaagcacctctctggagggcctggggtcagtgcaggggtgagaaacaggcagttaccaaccctttggcctcagggactctcctgagactggaaggctggacagagtgctccttggggtcttaagtagagccaaggagggcatttgagggcagaatggccttttccctgggggcctgactccccamttaccaactcccaaggggttacagactggagggccctggcagcagaggctgctgggtaacagcccagcagagctgctcattggctgccacccttggactttgccctccctgataaggaactgggagcagaaattattaacygaatcattaactgggtggccccgccctacccaggcagcctgccttaccttcccaccttcctcttcacggacctagcaccttcctgggcctcagtttctctcattgccttgggtgctggagtatgtggggcctcctctcctatctccaggccttcagccccggctgccacggggtgtgggtacctcttggttgggtctcggggtaggatgatgtaatggttctgtgcattcgccagcgagggcagctggggtctgttcctagctctcctgcttacccacagtgcttctcttggccgtatcagggcaccgctgtgcctccgctttctcatctgtaaaacgggagtgcagttgtaatggcagggcctccgtcccagggtttctggggtgattaggtaagattgtgcctggcctggtgaacactccattggtccatggcaggtgttctgcgccctaccttgaagattactrgtccccagggtaggtcagtgcccctaagcttagggggcttgttgarcatgttctgtggttctgtgtgcaaggcctgaaccatgacagctctggcccagcgtggcctggtcctggtccctggcacatccagtggggcccgccccacctccccctctgagatttgggttctgttcttgctgccagcaaggaggaggggcttggctgtattgtgacttcatctgctgcacccaggctctttgcacgttgtcttcctggagtcctggggtgcagtggaagcgtgggtgacggcctcccatttctgagggggactgtgaggcaggacaggaaggcgatgatgtgtcaggctccctcaaggtggccacaacagagctgggactggagcctgggtcccagctctgtgccagcctgggatgggcagggaaggggcctctcctcctgacatgctgaggggtggctccagcacgggtggccacgccaggtgatgtccgtgcagcctccttgacctctctagacctcagagccctcactcacatggtcaaggttgggtgatgttagcagttagatcccacgagtgccaaggcctggagtgagggggggaggggcaaagcccctgggtggggagtacagttgggtccggagccccctgccggcctagagtatggagggggctcccggacattctgtcctccctgtgccccaggtcgcatcagtgagggaagttctccctccagctgaccggggtccgtgcagccrccrgagtgcacaaccacagcctctgtctctcctttgtggagtttgaggatcctatctccctccggcctccctcactcccctctcttctcyctcyatggctggggcaaggggatccccatcccctgccctgctagcttggaggagggaagttgtgcctgtgacactgagttcactcagtggggcctggctccagccggagctgcttagggagggtctgacagcaggcggggagggggcttggagggaagaagaggaggtgggagctcttcctgggtggccactaacctaacccatgcatgtgacgctgtgcctgtgggcctgggcctgtcgtcgggtcagtgagygtttgtgtacatgcgtgtcctggcatatacacctgtgaagtgtgctgaggtgtgaacatgcacaggcatgctcgtacctcagggcttttgcaccggctgtccccgccatctggaaccttctagaatgctaggcattttgctgctctcgtcatctgactctgctccctagaatgtcagctccatgtgggcaaggcttttgtcccttttgctcactgctgtagccccaaagctgggcactatgcttgcctggcacataacaggtgctcagtaaataactgctgaatgaatgaaggcacacggatgaacgctkgtgtgcgcatgtgtgtgggtatatgtgtggggcatgccactgtgtgtcagtactgtgtatgtgtgagtagggggcaggtggtacgtgatcatgcgcatgtcagtggatacctgactgcagggtgtgcccttacatatatgtgtgtgtgttggcagtgtgcctgcgtggggccacrccggtgtgtaggcacagatgggcacaggtgaccctggtggagacctgtgtccaccccaagctgcagggtctctacctggcacctggtggcctgcctgccctggtccctgtgggagagagtaggaacaggtcgcagctgctggcctcggtgctgttggacctggctttggagcatcttggggctgtgagttcagccttatgttgacctgaggacagggcggcagcttcatggggacttggagtggatgtagccatagcccaagggtggctaaagattctgggtctcctagaagagagggttctccggctgggccagtggctcatgcctgtaatcccagcactttgggaggccgaggcaggtggatcacctgaggtcaggagttcgagaccagcctggccaacatagtgaaatcccgtctctacaaaaaatacaacaattagccaggcgtggtggcaggcgcctgtagtcccagctccttgggaggctgaggtgggagaatcacttgaactcaggaggcggaagttgcagtgagccaagattgtgccactgcactccagcctgggcaayagagtgaaactttgtctcaaaaagaaaggtaaaaaaaaaagagaggggtctctgtaggcagcctgtgggggctcttctgcatttttggtaagaagctgggagagaacaaagactactgtgactcagatcgaagaacctgataraaaaacggctcaagagccccatctttgtcaggtgtggctgctgggcccaagctaactgagatttgatgcggagaggcaaagggttgcttgcacaagcaaacatctgacctgaaggcattttgactaagacggctctggtcacaagttgaagcctgaagcagggcagctagcagttatagattttttttttttgagacagagtctcactctgtcgcccaggctggagtgtggtggcacgatctcggctcactgcaacctccgcctcccggtttcaagtgattctcctgcctcagcctcctgagtagctgggattacaggcacgtgccaccatgcctggctaatttttgtatttttaggagagacagcgtttcaccatgttgatcaagctggtctcgaactcctgaccttgtgatctgcccacctcggcctcccaaagtgctgggattacaggtgtgagccaccgcgcctggccatagatcatattaataaagagagaaagcccaaaccaaaggaggtgaggccactgtgccttgcccccatgtaaactggttgggagatgagccacagcactgggggccctctgtgactggggcgatggggaggggctgccagggcaggcagggaggcagtcgcagaaggctgacccactggaagggatggytggggccgaggcccggaggctggactgtgctgtgcatgtgtaagaatagcagcagagtgctgaccatgcctcagagggacttaggagaaggtgaggatgtccctcggaggctctggagcacgtgtgcagcaaggcggaggggcctgggggagaggggacagcstgggcggaggygtgcaggcaggaaaggagatgggagtcctaagagagatggaaacagggcggttcaccctgactgcsgaatggcctcctgggggtcwcctcgtttaaggttcwctccatggcagggattcgtgctccatctgatggagaaggaagccagggctcakgtcacttgctgagggtcatagccatcaagtgggaagtccacattagaaamcaggcctctttgactctggaggtctctctgggcatcgtggttatgcccaggtgggctgtcccttgactgctaccaccctggccctcagctgctgcctgaagctagggcatccttcaggttcagatgctctgagaggacactcagagcaactggggttgtcggaaataggcctgggccctggtgtcctctgcaccccaggttcagatccaccaagcctggccagcatcctcgggccccggcccaccctacccacagccacgtggctgacgggatttccgccatgtttggggcatgaattgacaagtgcctcattgacggggcaggggagggggtgggcagggcacaagcctcccactgtgccgtgtccccaccctcccccgttccccgggacaatggccgagactcagccaacggmcacagctggtgggggggggggcacataagcacaaggaggggcggaagggaggggtcctgggtggagggaccacctgggcccytgcctgctctyatcstgcacctggcttgggtgccctccgttcctttcctggccagctggggtggccttaaggagacgaggagagaagagcggagsggaggggarggggctgcyttcccatagtctggatcgcagcctgcctgggaaggggcagtgtctgktycctgttccaggcaggtaataaagggcctaattaatgaggagcagctgaggcacacagctcagcagggcaggggcaggacctggaggggccccaggtagccccggccctggccacagcatggcctggccgaggtccctcactggccacttggctcatccactccgtgaacatttcctgggtgcctgctgtgtgctgggatactatatcccagagagacagaacagggcagcgctcatagcccagtgcctgcccctgtaagctatgggcacatgcccatcctttctgagcctcagtttcctcakctataaaatgaagaaaaagaaaatcacctaccttgtaggttgggatgagaattcaatatgagccatgtaaagtgcatggcacagggctgggcacagagtggccactgggcgagtgagctgtgggtggtgggcgggtggtggacagacactcatcctgcccagcggggtgtgtgtaggcgggaaggtaaagaactgatgaggaattacaacgcccctgcccatcccttgctaaacagaatgggagagtcagagatggcctcttgggggaatttacatttaagacaaaacctaaagcctgaataggacctggctttctcaggcttagggaacagcatggaatggcatgtgtgaaggccttgatgtgggatggaggatggaaaggagscaaggsctgaccacggagaggaggggaggcaggggacctggggaargagaaaaggctgtygggggcaggcaggggaccatgtcakgccttggactgccagagggctccgggtgtctccccagcagtgggaagttgttgaagggtttgagaagggaaggacagagatgctggtttgtgagctcatggtgctgttttcgggttattgggccctgggcagcctcgggcagcctctggcgggcccggcttcccttctctcagagaggtcttgaggatcagaacgagccatatggcccatgttccgcttcctgcctggcaggtacccctgcttgggctccagtgatgttctggggctcttttgggagcagtggggaggggcgctcccgagagtgtgcccatgggaccctgcccctgtcctgggttcttgggggctctatcccagcttcggcaagcccccacccttgtcttgtccacctggaaagtctgttagaaatctccagtgtggttcacgggcgggctggggsscgagcggcgtgggaaagagacgacgcggcctccagggcttccaggagaaggtgtggggtcagcgttcctcaggaggccctccgagcccccaaccctcaaacttcttccccacccactggcctccccgcaacgctgccccatcagttccctcctcccrcctccttcctccatcctccgtccgcccggaccctggcacgggagggtccctcctcccccaaagcacatctggttctcgttagggtctcccaggatgcctctgcctgaggccccctatcccgagggaggtgggcaggaggattaggggcgattaggagtgctcctggccaggagaggagggggctgggtctgttataaatagcaacaccatgactgcatcagcccatcattcaccgtagattccaagttcaggctcaaaaacttgcagcttcagcggccagggtgggggcgacgctccaggtggggtggggaaggcacagcaaccgccagtcacactctccctcgtggagtcagacccctgcacctggttggaatcctccttgccgtgttgccttgggtaagagacttgacctctctgaacaggggatggtgattatgttacctatctgaacatccccactgtttagagagggaaaatgcataaagcacttagaatcgtccctggcstggtaggcagtcagtgtgagctgcagtcactgtcaccaccactgtctttgtcatcatcgccatgatgagttgagaagcactgggagatactcactatgagccactgtcaagtcactgtctctgtcatggtcagcattctgggctgggaggattgagtaacacaccgcaggtgaagagcctgcaggatgccttgcgcataagaaacttctgtgattaggctgggcgtggtggctcacgcctgtaatcccagcactttgggaggctgaggcgggcagatcacctgaggtcaggagttcaagaccagcctggccaacatggtgaaactctgtctctactaaaaatacaaaaaattagccgtgtgtggtggcgggcgcctgtaatctcagctactcgggaggctgaggtgggagaatcgctggaacctgggaggtggaggttgcagtgaaccaagattgcaccactgcactccagcctgggagaccgagcaagactcagtctcaaaaaaaaaagaaataaagtaaagaaactcctgtgattattaatgtatttgattcacaaaatgcctggcacacagtaggcactcagtaaatgggacccgtggttacrgcagggtggggcttgagcagaggcakggtcctggaacccaggcacacagactggccacgcccagctcgagaagctgctcttgccccggccacaccgccctggacggccattggtggtgcgtggtgggtgtcccttgttcctagctgggcgagctgggggtgggggtcagcaggagggccctggcctgtcgcaggcagcgcgtgactcctaggagggcttagccgctcattaatcacctaagcggggctcagcattcttgaaatgccggctgaggccagggaggggcctgggcggggggctcccggggaccccagggctctggggctgggaagtgaggacggctgttccgaccgatgagcacccactaaagtggctggcacttcacacacctcatctcgtttcatactcaaaacagccccttgaagccatagctgtacatgtccccattgcacgaatgaggagactgaggcgcagagagtgcatgtgacctgcccaaggtcactcagcagggagtggctgagccaggatttgttcctggacctgtctgagctcaacaggagagggcagaccccagactcaggctccagaggcctgtgggaggggccytcctgcctcagtggggctggccagcccgggtcagccgtgtgggtggggctgtcctccattatcggggttgacgcatctcccacgtcagcccccttatcaccccgccctctggctccccctgcaaggtgaccctgggaggggaaaggccggyacctcccccgtcctccctcatgatgcccaagagccctggctgcctttcctctaggggcccctccccttggtggggccggggccagcgcagagggcccaggagagggcggcaggcagaggagtggagctctggcggccatcattccctgctgggaggccggggcaagcccttccttctctaggcttctgcctcctctggaaaaagggggctaagttcccccgcctgtgcccaacagggtgatgggcatatccaatgagggtgcagggagctctcctgattctgatccccactcccgcctgcggccagggcctgggtgcaggagactcccacagccctgtgggcccccaggatatatggtcccactcagccaggcctcgtgctcctgcgttcctggagctgggccatctggactgacccctggaggacacggcaggacagtgcctgttgggtccgagccatcccatcgagggcagtgggcacccackgggctctcgactcagtaagcacctcatttgtgcctcacagcaccccataagacagaggcacagtgaccccatttgacagattagtggaaaggacttgttccctgtcacacagctagaaagaggcatggcaggatcggcctctctgtacccagatccatgccctgggcccctctcctcctctgagactcaaggtggccttgtggtggggcgggkgggcattatcagtgcttcctggaggggtgccaggcagtggagggtgagagccggcccccacatggatacctgggtgggaaggagcaggggcatctgttttggagggccagcctgggcagggatggagggctgggccctgaagcccagggtctgcagggagctgggcctcttccctagcccatctctcctgccctgcaggccacgacatcaacggtgccctggagccctccaacatagacaccagcatcctggaggagtacatcagcaaggaggatgcctccgacctgtgagtggccccctcgcccggcctgcacccgcccagccccagcccttcgcctcccttctgtcaccagggaggtctgagggccggacctggggtctgctgtggtcccacctctgaaagctgctcctcgtcccttcccagccactgactcctccgaaatctccatagttccctgcagggagggggcggctacttccctgctggggctggggtcctggctggagctgagccgccccccttccccgcagctgcttccctgacatctctgctccagccagctcggcctcctactcccacgggcagcctgcgatgcctggctccagcggggtccaccacctgagcccccctgggggtggaccctccccggggcgccatggtcccctcccacccccgggctacggcaccccgctgaactgcaacaacaacaacggcatgggcgctgcccccaagcccttcccggggggcaccgggccccccatcaaggctgagcccaaggctccctatgccccagggtgagtaagggcagggagtagggggatacagcggcataggggcaggcagggagcagggctgtggccgtgacctgggaggtgctagacactggcctggcatgggwtgggctgggtgactggctgtgcgtgggcaggtgagggaagggaggatgagtccaggtcaaggggggactcctgggctttgttctgaggcagtgggcagccacaaagcttcyaagcatgggagtgatgagggctgacgtaagtgctagaaaaatctcgatgctgtgtggagagtggacaggaagcggcgggactggaggctgtgactgtytacyttcatgggaacacctgcatacccgtgcacgcgcgccaagcccacccacttacgcatccagctgacgtgtactgtggccacaggagctggcccatggctcagatgtggcacctcagttcccccctacccaagcaagcctcatggggcccagaacccaggcccttccccccatctttctgaggagtccacaccaagggcctgacccagggctgaaccttaggcctggctttgaccaaaggttccaggcagccacccggccagccagactccagggcagctcccggggcacatgctcacagcgggaggctgggagcatgggtctgcaggggagctcagggcaaatgtakgggcccctgtctctgggtggaagagcattaaaacactaggtgcatgaactctgtgttcagacagcctggctccaacttcagcttccccatttatcagccgtctgcctcggtaacccatggcctcagtttcttctgtgaagtgagccctcaaatgcttacccctcaagattatcgtgggaagcaacaagggcacagaggatgccctgggtgcatggtggccatggacacatggccggccgtgcttcctgagctccctggcttttggggagaagggagtggaggccaggcttggggtgccaggggtgaacctttgctgcagaaggcaaactgtttgcttgaggctgtgaggctgttcctaaactacaggcccctgggggcagagggaggagaactaacatttggtaagcgcctgctggtgcccactgctgtatcatgtgcctatgattgcgtgagctcatcagccttcctgggtatccagctcctgggagaccccacaaggagccctggccactgctmccgtcaggattttaatggcacactgaggctcagagagggaaaggggcttgtccagagccacacagggactctgtgggcagggccactccaggaagggacccagggccagacctgagtctaggtgataaacaagacagacatgaggctgggtgtggtggcacacacctgtaatcccagcactttggaaggccaaggtaggcatattgcttgagcccaggagttcaagaccagtctgcaacatgatgaaaccccatctctacaaaaaatacaaaamttagctgggtgtggtggcgtgtgcctatagtcccagctactcgagaggctgaggtgagagaatagtttgagccagggaggtcgaggctacagtgagctgtgatcatgccactgctagggacagagtaagaccctgtctcaaaaaaaaaaaaaaaaaaaaaaggccaggtgcggtggctcatgcctgtaatcccagcactttggcaggctgaagtgggcagatcacttgaggcctggagtttgagaccggcctgggcaatatggtgaaaccctgtctgtactaaaaatacaaaaattagttgggtgtggtggcgcatgcctgtaatcccagctacttgggaggctgaggcacaagaatcgtttgaacctgggaggtggaggttacagtgagtggtgattgtgccactggactccagcctgggtgacagagcgagactctgtctcaaaaaaaaaaaaaaaagaaagaaaagaaaaaaaacagacacacggctctgcagtggctcctgaagcctaactggggagaggtattcaccagtacatctccaagtagaggaataatcaggtgccagaggaacttaagaggagagaacacaaggtgctgtggacttggggcatgggactgcagggactgcagggtgtgaaagaccttaacacattacagaaggcctggccattgtcagggaagtacaggacggagtggcagcccagggggcctgaggctgtggcgaggagtatgggtttgagtccccatacacgtttttgtatcattcacacaaaacytgcagggtctgtgttcttgaatcgttgtataggtttctacatgaggccccgaaggtgggtgggtggctggcacagggatgcagggggactctggagccagccccagggctgtgtccacaacagggccatggcctctctggcagttccctgggcatgggaatggggagttgctccagatgtggggaccagggatggccaaagagctggatcccatatggccacagccttccacttgctgggtgagcacagggttcacgcaggacgtgttgacctcttgggttgagtttgttctttttcctgaacactgataaaagtgaaacctgcaagaaaaaaataaacccasgcccggtggtgctggctcccttcccagtccacacctgcctctggtggggcagccccccatgacctgctgaatgccctgaggcccagccccctagggccctgtgtttccaggaagctgtggggcttcagtgggtgcaggaagagagaagaastcctggccttyggtctggggcgggagtctttgagtccctgtgccatcatcaaggacactagtaactgccccccaagtgccctgtaggtctgaggggatcctgggcggtcccctacccacaattcggccccaggccctgccaggcaccccaatgtgggtggtgcrgagaaatgcccctaagggtggatgtgacsaaacctcagtgtcgccagcttctggggggctgtgggaccctaccacgcaragaagctgcccagctggaaggcagaagctcagctgctcaccccccggccccttcccctggctctcgcagcacactgccggactctcccccagactcgggctccgaggcctactccccccagcaggtgaatggtgagtccagcgggcaccgccctcctgctccagggtttgggcaagtagttggggcggccttatcagggaggtaggggaggagggagggggccagcggctgcccaacgggctgagattatcgctggtcaaatactccctggcgcttggctattgtttccccacgggcgggtggggagcctggccctgcctctgagcaagtatccccgcggtgatgccacccgcctgcccgcctgcgccatcatggacgcacccttcggcggtaagtgggtggctggggaaggccgtgggtgcagcmtgggtgcaggcttcccaggccgggcccacctcaccttagagggtgctcakgggtgccctggcccccaggtggccaagagcagaaccaccgcgggagcaggctccccgcagtccggattggggtcaagagttctgtttatcttaccaaaaacatccctggaatgcctcctggggaacaaagggagctggggcctccccgctcaggctggggggctggcccctgagagcccagaagagggactgcctgccggagaggggaacactgggcaggcctgggctgggggtctccggagackccttcctgaggcccagaggaggagcaggcctcagaggagatggggacggagggggacctttagatttgggttggattctcctggtccagcctgggggcaggaggtggytaggatgaggtgaaaggctgccccyccttgggcaggtktgtgcctccctgcccaggcctctagtaggtggctgaccaacggccctcccacctagggtaggtggggggcagcccccgggcttggctcaggacggggtggaagcaggagactctgccttggggaggacagtgcccaggagcctgagtgaggttggtctcagatgcccgctcccccatctctcctgcagagccccacctcctgcgcacgataacccctgagacactgtgccacgtgggagtgccctcccgcctggagcatccgcccccacctccagcccacttgccaggccccccgccacccccaccacccccacctcactaccctgtcctgcagcgggatctgtacatgaaggccgagcccccgatcccccactacgctgccatggggcaggggctggtgcccactgatcttcaccacacccagcagtcccagatgctgcaccagctcctgcagcagcacggagctgagtaagacgtgggtggctggctccatggggtgggaaggtggggtacagggaccagggtgggcagggcggcgggcaggccagagagggaggtagggaccgggatgcacccagggagggcagaaggctctgcagggcagatgggggtaacatatttatacatgtttacccagcaataccttgaggggtttacagccatggctaattgctcacaactaccttatctggtgggcacaggtaggtaaactgaggctctgatgggggaaatgtcccgtccagatcatgagccaggggcagagccaggactgggcccggggctgtgctcttacccagaccccagtgattttgcagctgtctcatggaaccctcaggtttctgaggagtcttcttcctagacccaagcccccsactctgactcaacctgcacgattgtcttttcatctgttttacatgtggagattccatgaaaggtttagttcaaaggaaggttctgctgtcaaaacattttgtaaaccagaaggggaaggagtgccgtgcggaagctccccttccctggtttttgtggcccaggccctctgtggcttgtttctgatcacagggcctgctctccatrgagcccccactataaagggtgaccttgagtgtgacactgcaggcagggacaaactcattcattcctcaagcgattgctgtgattctgtaagccagccctgttgctgggcatgatggagacaccaagtcaggtgtggctcctgtccacagtctgggggaagcgaagagtgacagaagcagaaaatgacagcacagagcaatggggagtaggaggaggcaaagcctgagggcttcctgaaggaggtgtcctctgggcggggcacatcctggcccaaacaggctagagaggggagagaggtggatactacccagtgggaggggctcggggagagccagcccccacggcgcacacttctgtttccccaggctccctacacacccctccaagaagaggaagcactctgaatcccccccsagcaccctcaatgcccagatgctgaatggaatgatcaaacaggagcctgggaccgtgacagccctgcctctgcaccccactcgagccccatcgccaccctggcctccccagggtccgctctccccgggccctggttccttgcctctcagcattgcccgtgtccagacaccgccttggcacccgccaggtgccccctccccaggtacatggctggccaactcttcaaggtggggtgtgggacccaaggtgcagggcccacatgggcgttccctccctccaggcctcctgcaggacagtgacagcctcagtggctcctacctggaccccaactaccagtccatcaagtggcagcctcatcagcagaacaagtgggcgamcctgtacgatgctaactacaaggagctgtgagtgccctacaacactccccactcctccaggcccccccaccttgggacgccccagcccaggaccccatcaaggtcctggagcagggcctgggagcactcatttcacagaagagcaaacaggctcagggaagagccaggactggcagtcagggctcctgactcctakgccagccccaggcctccctgagaaggtgatgactgccagggaggggcagctgggaaccaagtcagggagaagtgggcagatgggtgttttttcccccrgttcctccttccccacctcctccctctgcattccaggaaggtagccggaagctgagcccaagctgggccctcccggcagccccctccctagagggagggaggaggggctggggaggatccggtcagaggctgcctgagcattcctagcaccccctcaacacccagatggctccatctttccaggccgcaggccgggagccmtgtggggaccactcccstggctcacccagaaggccagtgggcaggtgacagggtaactgtggatattgccaggcctgggccagtggattagaccagctgcatggagttgggtgctccaggctttgggggaattcttagccagcagtcccaggcctgggggcatctggctgctggggtggctgaagggtcccatgaagtcctgccaggtgggggtgcagtcgtatggcactccagcctctctggcatggggaggaaaccccttactcttactgccatactctttgggccacccttgccaccccaggccccaaggccaggaagcttggcagctgcagccccggaagtggcccaggcacttcctgggtgctttgmtaggtcaggcaggtgggtggagctccaggagggaagaggtggtgagcccaggcctttggcaacactggccaggcccagaggcctcttcccacaagtttggaagcattctccctgcccagcttccgccaggccagcactgggcactcctgtgaccactcttgtgcctggggacctgagtgagggtgcgctaagccacaggccaacagttgctctttttttttttttttttgagacagggtcttgctctgttgcccaggctggagtgcaatggcatgatctctgctcactgcaacctccgcctcctgggttcaagcaattctcctgcctcagcctcccaagtagctgggactacaggcggctgatttttgtatttttagtagaggcggggtttcaccatgttggccaggctggtctcaaactcttgacctcatgatctgcctgccttggcctcccaaagtgctgggattacaggcgtgagccaccgcacctggcccagttgctctttttactgtcaactagaggtgtctcaaaggggccaaacatgggacactaaacccagcaacagatgggcaaactgaggctgagtctgagggagagtccaggagtgccccttccctccccgggcagacggagggagtaggaatgaggagggagtgggaatgagggcatctgggggcttgagcaagccggtgggcaggggctgggtctgcagcagagcaggcgcctggttccaccgtttccagggcaactagctgtcaggcgctgtgaggctctgcagacacagtccctctcgggtgagtgagggggcttcaggcagccttctgggaaggagccgagtgtggggagggcagtcaagccctcccccactcaggagttccctccagtctggtgggcctcagrgtctggccctgcttcccccatcaccagggcggggcggtggcctaaggcatggggtataggagagaatgttgtctgaggagtttgcagccctgtactagaatcctctccgggactcagtttccatttctcaggagtgggggcagccrcattggtggtttgargatgcaggggtgtggtgtgggaaatggttttggaacccagcaggtaggaggaaccgatgttccaggcccggctctggggcctcaggggagtgccctcacccgcccccccaggcccatgctcacctaccgcgtggatgcggacaagggcttcaacttttcggtgggcgacgacgcctttgtgtgccagaagaagaaccacttccaggtgacagtgtacatcggcatgctgggcgagcccaagtacgtcaagacgcccgagggcctcaagcccctcgactgcttctatctgaagctgcacggagtgaaggcaagtttggggctcagcaaggaagggagggcaggagggccctttgggggcactgaaagaccccagaaaaagcaagcgttggctggatgctgtggctcacgcctgtaatcccagcactttgggagtcaggcagatcacttgaggtcaggagttcaagaccagcctggccaacatggtgaaaccctatctatactaaaaatacaaaaattagccaggcgtggtagtacgggcctgtaatctcagctacttgggaggctgaggcaggcaggaaaatcctttgaacccgggaggcggaggttgtagggggctgagatcacgccactgcactccagcctggcaacagagcgggacttcatctcaaaaaaaaaaaagaaaaaaaaaaaagcaagcatctgtgtgcgtgtgtgtgtgtatgtgtgtgtaaactcccccactgctactgccaccccgccctcccgccttttatccctgtgcctgcccctcagcctgcctccccctcgccctgcgcctgcctccctcttgttgggctcatcaacctgcctccctgcctccctttcgccctgtgcctgccccttaaacgttagactcctcagcctgcttccctctcgttgggcaccttaccctgactctgtgcctccttgcctccctgcctccctctcgccccgtttcctgctccagcctgtgattcccaagtctgcaaccccagtcaaracccatctcctgggccctctaccaggtgcctcagctccaggtcccaaactaaactccctgcacacttgcctcccaccctgggctcccctctcagggaatggggcgcagggccttggttacmtgagccgcaaatctgggtcagggccctctttccccaacctcatcatgcatctggccttgctattgccctggaagatccctctacctggtccggtcctcgcctctttcctgtccatcccctggtctgggttacctcccttccttgtcggaatgtccacagcagctgggacccccaactcctgccccacttgagactcagggggccacagcactccctatccttccaaggcccccagtgtcctcccagcaaagccccggcttccaagctgcaccacgggggccttgggggccctgccctccgctccagctctgccacttgtggtaccatcgcagcccccgccctccaccctgtggctccctttgccttggatgcccttcccaacacccatccctcctctccaggcagactccatgctggtcccctccccaggggcccctyccctaagacccattgggaggcaccacagcacaaccccagtagtggctgattttgagtctatgagctccctgtgggcatggctgggtctgtcggcttcggtgtgatgagtgagccaggcatggtaccttggcatggctctgccagtgcacgtggaggagtagaggagacgtgggtatggagaggatctggggagtgagtgggcctaggtgcaagtggatgggcttggaggctgctgtgaggtgtgtgggtatggacatgagggagggtggggctgtgagtgtgtgtgtgtgtctgtgtgtgagtgcatacatgcagaggtggggggagcgtgtgggtgtggaatgggggtgtgggtgtttggggagtgamtgcatgmgtagctgtgcagaagttgggggagtggtatgctgtgaggggtgaggagggtgtgggtgtgaagtagggtgtgggggggtgtgaccatgcagaaggcatctgagcttgtgggaatcgcggctgagggctgggtgctgccctgtttcctggtgagctctagttgggccaggcctggctgagagggggcaggagggcaggaccagccgggtagccccatccygaggtgccactggcttcactccccacagctggaggccctgaaccagtccattaacatcgagcagtcccagtcagaccggagcaagcggcccttcaacccggtcacgtgagtgtctgaccctgttgggggtggtacctagaagggtccacaactaaagctggcttgggaatggaggggccagggaggtacccagggtgtccgcctcatgtacgttgctggcctgggtgcccctcagtggcgtggctcttgcagcctccctccctgccccctgagcaccctgcctctcctctgcagggtcaatctgccccctgagcaggtcacgaaggtgactgtggggcggctgcacttcagcgagaccaccgctaacaacatgcgtaagaagggcaagcccaacccggaccagaggtgagcaggtgggggccctgccccggagcccctccatttctgaggcaggaagacacygccctgggtggcacaccaggcacagagtcctacaggctgagccatttcacagatgagagacctgagatttagagcccttcattgacttaaggatgggaagagcagaagcctggcttctgggttgagaaacagccctggcttcttgctgtgggccctggggaatttctgccccctggtggaggctcgggttcctcctctgtaggagggggtgagatgaacatgcatctggccagggaaagggtggccctgggggcgggggcaggccatgagtacttctgagacccctgtgtgtcccaggtacttcatgctggtggtggccctccaggctcatgcacagaaccagaactacacgctggccgcccagatctcagagcgcatcattgtgcgggtgagggccacctcctcccagggcgtagacagccctccccaggactgggagaaacagcaagcagaagtacccgggtactgagagtcaggagtgggcatgctcatcctgctaggcactggctgtgtggccttgggcaaagctcccaccctctctgggctgcagggtctccacagtaaagcagggaggtggacgaagcmtggtagcttctgggatcccacaagtgacmaaaagttgtcacagtgggagggacagttcaagttgggcttggtgcagtgagaaaccctggctggaaggggaggggctgctgtggagtttccccctgctcccagggccctgcaggtcccctccctatcccccaggactgatccagccccaactcgcggtaggcctccaacccaggccagttcgagagcgacagcgatgtgttgtggcagcgggcacaggtgcccgacaccgtcttccaccacggccgcgtgggcatcaacacagaccggccggatgaggcgctggttgtgcacgggaatgtcaaggtcatgggctcgcttatgcacccctccgacctgcgcgccaaggaacacgtgcaggaggtggggacagggctgtgggggccgggcgggtccagacgctggagcgggccgcgggggcggggctcctggggagggggcgtgactacgcggaaaggcggagctgcgggggaaggaagggagggaggctggcctcgaatcccgatctaaccactccagtggtggggtctcctctccacactgcagcctccaggctgccgccctcctgggctccggggcctgctccgggacggccgcaggaggggttcattcccgggcctggctccccgcaggtggacaccaccgagcaattgaagaggatctcgcgcatgcggctggtgcactacagatacaagcccgagttcgccgccagcgcgggcatcgaggccaccgcgccagagacaggtagggaccgggctggtgcggactggggtccggaaacccagaaacctcgggcctcagtgaccttgccccctgtcacctggaaatcctactcctcttgactcccggaactgcgcccctgggaatcatgccttctagaagtcccgcccctcggaccttggaaaatcgcacctctccaggtccccggaacctcgccccattgtcagtggaaatctgagaatcacggcccagggaccctcgcccttcgcgctagatgaatcctacctttaacctgccagaatactacccacttgccctgggatccttacccccaggaatccgccccaccccagcccaggaacctcacacctgagccctggaattgcaatcctgtgaacactggttcgtgggatctccctgctccagggctccttggaatccaaatctctgggttccagaacttcaccctctccagtcttgctcccactgtacattacaaagctgtgagtagccctttaccacccccccacccatctttggcttgtcccctgcccccaggtgtcatcgctcaggaggtgaaggagatcttgcctgaggctgtgaaagacaccggagacatggtctttgccaatgggaaaaccatagagaacttcctggtggtgaacaaggtctgtgggtgsgggaawgggagggagcccagaggcaagtggggagccagctggggaacactcatcacctccatagatactgggggcactgcaaagcagaggcaggagcaccctcggctctcatgctgcctccagagcgccctctgcaccccacagggaaggggtgagtgttcaaggagatgagtgggtagggatttggcccctggagcctgtgtgatcaagggcaagagaaaccstgtggagggccatggccttccacccccggtaaaatgagggcggtaatagaactgcacagacatcctcgtatggttacctccaggctgaaatacgtggtttattgtgaggacgacgtttgtcacttacctgtcctgagtctgggcgccaaggaggcatgtaataggtctccaccccagctgaatagtgaagtgctgacatctgagacaccagtcatccgaggggcagatcccggggctgcagccttcaggcttaggagaggagagctctggcagggagtggggagggccattcaggcaggtgggacagcccaggtgaaggtgcagaggtggaggtgttgctcggagacaggcacaggagctgtgggagccgaggctggattggaggggcccgcccrggtagggagactttgagggcctcccagtggccaaggacagtggccgcccctcctgccccctgatgtctggcagcctggggctcccggggctgactgggccctctgtgttggcccatggcccatggcccatggcccatggcaggagcgcatcttcatggagaacgtaggggccgtgaaggagctgtgcaagctgacagacaacctggagacgcgcattgatgagctggagcgctggagccacaagctggccaagctgcggcggctcgacagcctcaagtccaccggcagctcgggcrccttcaggtaggggtgcggggtgggggaaggtgagacccttcttcccagggacacccctgatcctggccctcttgctgcagccatgcagggagccagttcagtcgggsgggcagcgtyccccacaagaagargccccccaaggtggccagcaaggtaggggtgagcagggatggcaggcrggttggaaagggggcctcccttgtggcctccctttctggcttgcagttctccagcctcactgcctctggtgcttccctctccttgtgactctgtagccctcccagccccgtttctctttcttctccctttgccccyggggaaatggggcacccccttaaccgctcctcygacctccagcagagcccactggggacagcctcagcctggccctctttgcatttgcacttttcctcttggtcctcagtcatcgtccgtggttccggaccaggcctgcatcagccagcgcttcctgcagggaaccatcattgccctggtggtggtcatggccttcaggtgacttgtccccygggctctcatggtggctgactaggggagtggagctgcccrgtggagtcagctgcccatgggctcaggcctgggggaagaggaggatgtagcttgggagatcaggcagctgaggtctcggtgaggtgggcctttctgcmtcttcccytctggggtgacccattttgtaggcatcacstgggagcccagcctcaggagcaaggaccacagccttgtcctagagagagggcactggatggtggctccagctctaacggtcacccttttctgtggctccagcgtggtgtccatgtccacactgtacgtgctgagcctgcgcacagaggaggacctggtagacactgatgggtaggttcctggaggccaagccaagctgccaggccaggtggggctttggtgggcagtcccaggtcagagagccatgagactgtcttctctaaaggagttcatccttagcytsttagcctgctggggtgctgtggggatccagggagggcctccttggagggtgggcagcctttcccagtccctgctgacgctgatgtttctgtctggcctgtttagtgcccctccaggtagctgggcctgcgagtcagggctgtctgaggggctggggttggaacatggggtaggaggaaggagggccagggcagggccttgggctctgtgagcccactgtcacccccagctcctggggccacctctgactgtgtcttctcttctcttcccctttgcctgtctcaccctttgcctttttgctgccccttagctcttttgccgtgtccacttcctgtctcctggccctgctccggccccagccccctggggggagtgaggccttgtgcccatggtacgtgctgaccagcgcccctctcctctggctcctgctgcccctcttcctgcctccctcccctccctctctgcctcttcctgccctcctgcctctccaggactgtcaggccctctcccctcaagctctcccagcccctctgagctcagcccatccttccccagcaggtccagccagagctttgggaccacgcagctccgacagtcccccttgaccacggggctaccaggcatacagccctctttgctgctgggtgcgtgtctgggcaggtctgggtaggacagggaggttgctrtgttctgtctttggggcttctctggctcatacagcctctggcctcctcagtgaccaccagcctcaccagctcggccccaggttctgctgtccgcaccttggacatgtgttccagccacccctgccctgtcatctgctgttcctcacccactaccaaccctaccactggtcctagtcttggccccagctttaaccctggccatgttctcagcccaagtcccagccccagcaccaaccrctcaggtaaggctttctgtgggctggggcttggggcgggggctacctgcgtagagagaaaggcccaaatactcattgrtgggagggtctcctggagcctaraacgargctctggacaatgactgggaagttcccctgagargaccaasagacacatggggttcactcagtcttgtggggccctakagacagctggacaggaagcagccagcttccagcttcttagcctrtgcctggttctatccacaggccccagccagawkgcccttctgccagtcaccaacatcagagccaagtcctggggtctttcagtcaatggcattggccactccaagcatcacaagagtctggagcctctggccagccctgcagtccccttccctggggggcagggcaaagccaagaacagtcccagccttggtttccatggccgggcccgccgaggggccctccagtccagcgtgggccctgctgagcccacctgggcccagggccagtcaggtacttgctgcacccctgacactacccagcccagcctggcaaggctcactggcmagggcccacctcagcccagtcatgtgactgtctgggttcagacttgtcagtcaatagacgtttgctgagcacagaataaggatcaggaatcaggcctgcagccttacrtagatcatcccatttagtcctcacagcactcctgcaagaaaggaattgttgttcctattgttcagctgaagaaatgggatggagactaaggtgaagtgacctgcccagggttatacagcccctccgaggcagggcttgtatttgatcccgagcctggctcctccttcgccatgccagcaccaggagggtgctatactgggtctcccctactatttcccaaaccttggatctttggttttaacaaagctacagaaccttttattgtagttttcaaactgggttcctctgaggtaccctgggggctgcgctgggggctgccctgggggttgaaggggaggctgggaggcttcctggcttcaaccaggcagctctgctctcaccaactttcatctgatggattttgtggcttcaagaaaaagaaagcctggaaaatgtggcttacagagatggaaattcaatgtgatgggggaaccccatgggggagatgtttgccaggcacctgtttactgagctgcctgccactctgtggctggctctgtacaggggactgggggtgatgaagatggacacgcccctgtccccaaagacctcacagagatgaaaacacagcagtgtgatgaggctctgaggggacatgcaggtagctttgggactggggaggacacttaatccggacgaaggtggggaggatcagggaaaacttctctggagttggtgacatttgagctgactctttaaaggacctttggaatttgcccagaagggatgtgggaagggcaccttccatctcgtctgtatctgatacctgtcctgaccacacagggtgtcctggatcctgttggggtccttgggtccctgggtcatgcctcagagctgaaaacgtaccaggtccagcaaatgttcagcggccccagcttcccccttcctgggtggatagtcaggcagcagcaagactgtatgtgaactagatgagcaagaagtcctgtctcccccatctgacttgtcacacttcagtcccacccctacccagccagccagcctgcagtcggtttgttcagggaggctgcgaggagcagcgtgctggtagcggtgtaatcatcggcctcggggcagaggggagcctgatttgtgtgatgctgtcaacactgctgatttcaagctaccagtgtaactgatgtttctgaacccagaactgggagagatgcccgcagtcaggaacacaggcctcgagcgggctcctgcacacctggcaggggatgtgaagacccatccctacttctgggtgttccagttcttttgaggaggcagacgtcaggctcatgggaactgggtagtcctagggctgctgaggaaagggtgtagtgtgatgctggccattgtggaggtctggaaaaaaataacctggaacttattcatactaaggtgtgagtgactgcttcaagtctggcaaggaaagacttgccagcttctcatttgtgtcctgccttgtcaccttactcctgccccaacagcctctctccttgcagagccagtgccctccctgacctccatccaggtgctggagaattcgatgtccatcacctcccagtactgtgctccaggggatgcctgcaggtgggctgggctccctcccctcacccagggaggtcctcaggtgacatgagcccaggtggtacagatcacccggaacttgccctttcagggaggagcctcccccataaggaagggtagcccctttccaggctacccttggacactgtctcttctggagggctccagtacagattgggggctgaggagtccctggtgggggtggggggtggcasggtaccctcaggctaaggtgccagttttgcccctgcaggcctgggaacttcacctaccacatccctgtcagyagtggcaccccactgcacctcagcctgactctgcaratraagtgagtgccggtgtggggaagtgggaggcaggagrggagccagggagaatctcccgcagagcytcagaacagccgagtctgaggacagccggagagtctctggtatttcctgcatggtgggataagtgctgacttcattgcctacttcgtggttaactggctaaatgacctggcctcatgggctgaggaccacatgggatggtcgatgggaaaggttttgttcgagggccctggttattatgcggtgtttcaggctgggtggagattcagaggcgtgtggcaggctggctgggagggggctggggttgagggactctagaacctcatttctctgctaactgggcctgtctacagctcctcctcccccgtgtctgtggtgctgtgcagcctgaggtcaaaggaggaaccatgtgaggaggggagccttccacagagtctccacacccaccaggacacccaggtaggtgggactgggaagctgcgggccggccaggcccgagctgcttctctcctggcacaactgggccccmaaatgggcaaggagcagaagctgggagttatagagtaaagccttctccacaagggacactctggggcctgggcctctgtgtcccagggaggggcacgcgtgcccgtgtttgttcattgcactctgctgagcatctcccagccctgccgtgctggagacgtggggaagacagcagatcacaggtgctaatgtggatgagtgcaatgatggaaacaggcaggtgtctgggagcccatggcggggagggctgtggctcactggaggtgtctgcagaagcaggaaggagccgacctcatgctcaggttggggaagtggcacagctagatgtacagcatcagagggcccctcaggttccatgtttggccacctcttctgggagaactggatggtgagctcctccctggccaggtaaccggaagttatgactgtccctggggctgatggacccccagtttcttcttgagcctaagaggccatgggagaagacgctcaggacaaatgaagggaagtagtgattattttttcttgcccattcatgtgtttactcagaaaatattgattggggccccatctgtcccaggccctgtgctgggtgggcctagctgcaggggagagaggtggagtagacacaggttttgacttccaagaacgtactctatagtgagggagaaaagacgtgcagaaagcacctgcaacagaggtgggggtgcttctgagggaggcccgagccctgtcgccctgcagaagagacagkgtccaagacagagggagagcccagctagacacacagcagacatggtgctcgggcctgaaaccacatcacagacgcacagccaaagcctcaggtagatgggcaagctgcctgcagccaggctgcatgccaccctgtgagggagacagccagacagacctgggtttgaatcccagctgtgtgattttgccacactgtgtgatttttaggaagtggctcagtttcctcatccagaagatggggctagtagcagcactgtgtcactggattgtactgaggatggggctaatgaaatactttgatgtgcccagagcatagtgggtgagggaacccascacaacaggactgggaaggaggcagggsccasgtggaggtggctgtggacctgccagtcccgggcacggtctgcatggagtagctgccattgctccttctgccaaagcagaacatgctccttcctatctcttcaaagttctctgcttttttccttcataaaactccccacagaccccaggactgcgacggccgtggtgagagatgctggttgggataagggcagcagtctgtcctgacccctctctcccttctctccagggcacctctcaccggtggccaataaccatcctgtccttccrtgaattcacctaccacttccgggtggcactgctggtgagcaggggcatcccacctaccctggaggtctgggcacccctgtctgcgacgtggggcttgaggaatggggggtttgcacagtatgtggtagggctgggggcacagtgtcaagcaatgtcagcagggagtgccatctgccccgcacccccagagccacctcaccttcccactgcccttccacccagggtcaggccaactgcagttcagaggctctcgcccagccagccacagactaccacttccacttctaccgcctgtgtgactgagctgccctcctgaggcagcaccacaccagggaccaggggtgcccaggcaccccccaacactggatgcaatggtgttacactggagcccgctgcaggccagctctgctgttcactggccctacccgagactggtgaaactggaagtcttcacactggagttgctgttccagctggtcgcccctcacggcwcagarggaacctgagagccagagacttcttgggccttcctgcctgccaccccctaggggccaggacaggaccagtttacctctttccaratatggtggttggagggctggttcaggtgccctggarggaaggggaagcctgtggccctgatttgttcasarcccattctcccttgcctccccttttgagactggagccaacccttttggagagaggacctgcccacctttgagatcagcagggggctcggatccagccctaagagacttgggtggacccccatgagtcaatggagggcagacggctctcccccttaaagctgttccctgggggatggcttggtagtggactttctggggtttgcctgttacgccagactcggacttctaagctttaagtgtggcccaggaggtttcttctccctgggagggcttggctcccaagaagtcccagggcagccgaggccagccctgcctgggttggagaaactgactttgtgccttaagtctactcagtgcctggtgaagccaccctcagcccttcacaggcctgaaccagtaggggccagtgggccaggtaagccctagagccttgaaccaggaatatccaggaagaggaaattccctttgagcccccagatggtattgcagcttcactgcctgcgttcctgggagcgtctggagctcacagtgatcagtgaccacatcattctctctgagcagaggagcaggaatccctcaagcagcagcctggtcttggctggtgggcagatgcaaatagcttttgctgttattaatgaagtaattactaaatgcacttaaaccagggcaggaaggaatggaaggatggagctagaaagctcagagtgggccagagcaggggtgtgacacttgcaaagacagggctctgactctgatccctcccagggagcctccgacacccatcccactcccaaccaccaagaccctgggttagggaagaagttgtatcttaagtgccaccttcaagtttcttagtggtgcctggtgcattccgaggctacatccaggctcatggaaggagtgtagtattcatttagccatgtctgccatgggtccagaaatgggaaagggaattgctgtccttgccctgtggtatgctgccacctctttgggaagcaggccttgcccctgtcccaccactcattctcagctttgaatgggaggcctttctatagtggaggcctttccttgaagcctatgaactgcaggcccccttttgccattgatctcaaagcacttgtcctcaggatagggaagagcasggggatgcaggaatagcagggatagcttgctcccagccccctccccaatttggttccgttgacataggaattttacgattcccaaaccatgcaggggctgagccttccttatgatgactttgttctccctcccactgggggaatcctccctatgccttaaaactgccgagccccactccatgtaataggattcctgggcttcctcaatgggggttcatgttcttggactgcgggccctcagtccttaactggaaagtgaccgtccactgccccatggagcccatctggacacagcacagccccaaaaccgttagcagctggctctgtttccaagcctggggaggggttcctcagtgcaggagttggggacaggctggggatccaagctgcttgagggggtcaaccttggaccaaagttgccttaagcctgtggtaaamrggcttcasggaargtaagtgggccacctgctggaagctgccagctgcccggctggcaatggtgtgagtgtcttggccctgtccctgccctggggtycagcaggtcatcccwcccttcwtctctctcctttggcgtttgttcctgtagtcactgsgctaatctccccctagcttcaagctgtacatagggcctcccagtgcaaatcctcctgcccataccgtgcacccttagaagcctgcgtgtgcatagagcgccccctacttcccagttaactcccagttcttctccctgagcttggtatttgtcatgtgccaactctgactctgaggtgggcagtgarggaagcagccccgggcctgcttgcttcctgtccccgaaatgttcgtttcttctgaagtaaatatacatatataaataaatgtataaatactgctttgtatctgagcttgcctccttgtctcttcttgggattggtctggtgggagaggagtcacctataaggctagggccaattggaattcaaagttcttcctgagaagcctggaatctctgagcgcctgaaccagagggccaaatggatgcttcataccccttatcctcttagcttcatattggggctaggagtggactcatcagcctctcccatggccacaccttcccctcctgcgcacccgctgctgcccacctgcattaaaagtagccactgaggagaaaagccttcttagggggagaagctgagcctggtgaggatgccccagcacagagaatggtggctatgtttatggcagggactggcctagggcagaatggaccgatgtgggttcccagagaagtttgtcctagaaacaatagaaaagggtaggcccagaccctatccacaggtaagccttaaattccaatgacaaaacaccggtgctacacaaatctcatcccccttaagtagatcagcagcaggaactgtgaaaggcagatgagaaatgggaaagggaagagattggggaagcaatgtaggtcccagcacccaccacccctgcagaatgggccccagacaggactgctatacatctgcatttattatgagcagcaggtgggacacttccagcaacagtaaaaaaaagtaatttacaaaagcaggtttcagtgaagccatctggttgttacctaaaagaggagaggggtatcaaaataagaccaatggcccttctttcctccttctctccctgcacccctgtgctcctggggcaagggctattgagcacacacctctgaggatgagccaccagagctgattcctagtggcctgtttggtggattgtctgcagcaagttttaagccctggatcttgaccccctttcagccagctgacttcccagcagcctctccaagtcactggggtctgacttctaagaatgtaaatgtacagccatgggatgcctgcgtccacacttctaggtggtacatcccaaaggcagatcgaggccttgggccatgtgagctcagaactgagagtcacatttggctcaaatccgtatgaggggcagggaaagaggcacaaatgtctagtgtccctacccattccactgagtctgtctccatcaaccaaggggtcatgctggtaagagctttaaggaccctgctgacctgactctggggaggcttccctgggctgtgccttggaggctcacgcatccatcccattgcagctcttacccttgggtgctcacacgtagatgccaacccagagcagcaggaagaggactccaaagcccatgaagagtgaggccactaaggagatgaggagctctttatagatatcacgagtgtacttggtagaggtgacctcgtaactgggcacagcagttaaggcaaagcgaaggggtggactgtggagtgcagagagcccagcccacggcaatctgaggagaaaagcattggctcaatgccttctgggaggcctatctggctcagagcagccaggcagaggggcctaagagatgccttggactctggtgctccactgccatgaagaaaatgagacccagaggagttaggtcacttgccccaggtcacacagctcatgagggccggagctgggactagccctcagacctcctgacacctgagtgcacccttccttataccacctttccaactgtagcacccctattccccacctccactccagccaggtcccctgctcactgtcctggaaatccaaagaacaaactgagctcacctgaacttgggaaataaggctataacctgcccctgggcatcactagccctcctctcctccttaccttctctcagccccaatccaatgtacaaaaccggcggggtccatgtacctagcgtggtttctccctgagcttcccacatcactaatgctggtcctctggctgctcagtgaaaggatacacgaagaaccaggcggtgaagaacatgccaatggccaaaagcaccacggtcagatgggggaagacagctgggttcactgggctggtatatctgctcatggcctcgagctcctagaggagggaaagagatcagagctatcaaagaatcccacgatttcagcctggagagaacatgcggttatcaaggagcctggtgctgccgtgaaacagaggctgattttagcccggaaatgtagctgcagatcaatggcccttattagcattttctgaggccaataatctgaccactatgaaaacgtgactaaaggtacgaactctctgcctgagaaaaaccacatacaagaaaaagtttgcctacaatttccggagctttgtggaccagtgtctatagacaccaagctgagaacccccgctataagtcactgactggtggtacccagatctcaatatcttttttttttgacggagtctcattttttggacggcgtctcactctgtcgcccgggctggagggcagtggcacgatctcggctcactgcaacctctgcctcccgggttctagagattctcatacctcagcctctcgagtagctgggactataggattacaggtgcgcaccaccacatctaatttttgtatttttagtagagatggggttttgccatgctggccaggatggtcttgaattcctgacctcaggtgatctgcctgcctcggcctcccaaagtactgagattacaggtgtgagttgccgcgcccaggctcaatttttttttttttccagacagtcttgctctatcgcccaggctggagtgcctggagtgcagtggtgccaactcggctcactgcaagctccgccttctgggttcaagtgattatcctgcctcagcctcccgagcagctgggattacaggcgtgaaccaccatgcccggctaattttttgtatttttaggagagacagggtttcaccttgctggccaggctggtcttgaacttctgacctcctgatccgctcgcctcagcctcccaaagtgctgggattacaggagtgaaccaccgcgcctggccctcaatttctaattcagtattttcctcactacctatgctattatggaatcttgtgagctatggtcaagacattcaagttctggttctgagtaatctgagtctgagtaaagcgactgtaatatctatttcacagaactgaaaaataagaaagatgatgaatcaaagcatctagtgcctagcagggagtattttgctcaacaggtatttgcttccttcctaaggctgtagggaagatgatgagataatgtcttttatgaaagagggctgtaaacgtaaagatctgtacaaatgttaacttcattgtcaccggtcagccaatgcttctaaaatccagaacataacaactctagagaagtaaactgcccccattgttctgagacactggaattcaattcagtaaacaatcacggcccccttcccccaaaatgataaagacaatcactgccatttattgagcttccaattacgggccctctgtttggcactgagaatacaaagatgaatagacatcatcccagagctagatgcgcgtcagacggtggtcactaggaggcgtggccgaaaacaaagaagtccatggaacgtggccagagatctgtacagaggctgtgggcgctcctaggaaagtctggccaagtgcctgagagttggaagtgcttcaccaataaacatttgcccagggcattgtaggatgggcacgggttcggcagaagaactttccaaataaagataacacaccaccgataacagagatatacaaactggaaggtattcaaaattcgccccacgcctctcgcccttagaaatcgcgagctgagaaacctaaggagttcatggcaaggggcttcccccttccccacccttcagcccaagccggaggttccaggagcgtctagccctctggatctccggcgtctgaggagataagcgcggtgtgggtcagaccccgaggggtcctcgcatctccgtctggaactcccctcaacgctctcaccattttgccccgcgaaggctaatccgccgctccgccaccggaagaacacgtcggcaggagcaggcgcctagcacaaccggaaaaggaagtgcctccggcgcaagtggcattgagggacttgtagtcctgcgatttcgggtgtagagggagcaggggcctgcggggacctggtgtgggtggagtggggacaagcggtggagaagggtacgccagggtcgctgagagactctgttctccctggagggactggttgccatgagagcagccgtctgaggggacgcagcctgcactacgcgccccaagaggctgtgcgtggcgagcaggtcacgtgacgggagcgcgggctttggaaggcggctgaacgtcaggccacccgccgctaagctgagaagggagagcgagcttaggaccgcctgcccggggcaaccccgaaccaagctttagccgccgaggccgcgtgtcccaaaggccaggtgagaccccatgggaagcgcctccgggagcgacggggtccgcttggcgctgggggccgtggggagccggggtctggagtgcgcgggattcgcagtcaagaggtcccgccacttttccccctgtgagccttgggccagtcgcgtaagctccgagcctctctttcctccattgtagaaaagcggtaataagttccaccttatggggtcgtgttgtatttttcctaagaccttggacgagaaacatttctgacacttgagttgtttaggcccctttcctgcctacctgtctgtgggacgccgtgaggggatcaagggctacatggtctggtcctcagtccacactccagcagcgcggccggcttgaggcaagagccgaagggttgaacaggcctggagaggggacattagaggtttctgtctgttgtctcagttaaccctggcagcagccctgagagacaggcatggtaatcgttcttcttctgtagacgagaaaataaacctcagtggcttggtaatgtcacacggatggtaaatgccgcgcctagattcaaggccagagcttttgccgctgcagttcacaggggaattattcatattaatcaaatgaataattcattgtcaattaattattaattgattaataatccagggatggacctggaaggacgcgtgagaggatggcgagaggagggcacagctaaggaaaagtgggaaaaggcgggccttattccagctttctgttgagatcccagaatgtagggttaggttgggaaccagaacatgaaagatcgtgatgccatgctgaagtgtttggactgaattagaaggaagaattgaacagtcattgatgctctagaaagaaccctgtgaagaaagagtgggaacaatgaaaaggcctgatggagtctttcgtttcttctttctcttttcttttgtcttcttttcttttcttgacagggtcttgctctgttgcccaggctggagtgtggtggcacaatcatagctcactgtagcctggaactcctgggctcatgtgatcctcccaccacggcctcccaaagtgctgggattactgcccagagcctctgtgcctggccccagtagaatatttcttggagtattggacacataccaacagtgggcacaagatgagttttttatttttttgagacggagtctcactctcttgctaggctggagtgcagcggcacaatctcggctcactgcattctctgcctcctgggttcaagcgattctcctgcctcagcctcccgagtagctgggattacaggtgcacaccaccacacccagctaattttttttttttttgtatttttagtagagacagggtttcaccgtgttggccaggatggcaagatgattttaaattgcaccccctaaaaatcctttttaatagttatacatttaatacatattaaaatataactaatagaacacaaatattattgcttatgagttttccagtttag

SEQ ID NO: 97191 - DNA, 15688 bp, Homo sapiens
gacctttcccagggctttgtctcatgttccctttgccaggacaccctgcccttccttctccacccgtgaaatctgacccaccccctggaagaggtccccagcccccatcctgggctcagtttccccagaagtgctgagagctctgtgacagtggcagccccccaatccaccccactgcagaatgtttaaggcatgaaagtgagaagtctgactcccactgcccttctgcatcccttgggacatcacgatagccctgtggtctgcctcaaagcccattatccaccttaccacatctgccggggtcctcacagcctcaaagctcatccccatctcgtagaagaacagtccccctagaaggggacttgccctactctcaggactgggcagtgagctcttcctccctcaaacagccgtgcagctggcagggggcagggaagtgcatgccagccccattttctaagaagggcccggtccctggcacactaccagggccaccctgtgtgactcaggaccagcagccagaggggctgtcctccagggcttagactcggccagggccagagtgaacaagtggctacaggtagaaccctcctattccaggttcttccagacagaaaaggaccccacctcatgttgggtgccacccccaaaatgcatctcagtgtctggtggacaatactattattatcaatacatctcatatacgcacaccgcccctactgcgcaccaggtacagttctatgcacctagcatcttcgagcacacaaaggcctcctaaccagcctaagaggcatgtgctgttgtcactcccattttacagatgaggacactgagttacagggacacttcgtagcctgcccgagatcactggagccaggacctgcttgcaggcagtgtggttgcagcgtcctgtgacctgggaagcagggagcggagacttctgccaggctcccggctcctggcctcagccacaccccattgtggggcctgggataactctctgctttccagacctcagtttcctcttctggagaatggggattgcaccagccccacccatggcaggctttgcttacaaaagatgggcgttcatctgggaacagaaggcccccaaaatttggggatgcatgggcctccccacttcagtgtgctgacacccagccccagcacttctccggattcccaaccctaccctgggcctgaggcccccgaatggtgtgcagagcggggagtctatgggtactgcccctagtgtttccctcccacctctccccaggggtctggacctcaaaggcagcccaggtcccctgctctcctgccccaagcctccgtcagcaccccccaccccacccccagggccctctccctgttcccacttccttatttgggtttatcacagtggaatgaaaagaagaaacttttcccttcaggccagcctggggggaggggtctcccccggcccctggggcccccaggcaccccacctcgcacacctgccgcttcaggccacgcccccatctcctccccccagctcccacgcctaccccggggccccacccagccggaaaagagcccagagtcttccaggcccgtggcctgactgggaaggagctgcgaggaagctcaggccggccgggtggaggccctagggaaggaagggcccagggggcagaagaggatgcacccaggatggggatgggcagccgaaggtggggacacaggcatttgggaagcaccaggggcaggacagggaaaggggggccaggatgtattggggttcaaggtcccaagcctaaggagtggggagcaaagttcccaggggtggaggaacttggggggcaaagtctccactagggggtgactgggtgctcccatctgaacagggagctgggctgggatccagaagcagggcgaaggggtgccaaccagaacagggggaaaaatgatgaatggacgaggactgttcaggcagggcaccggggagagtaggggcgccctggcacacacccagaatgaggatgcccccagccagcctggaagtcagggtcctgcagccggggagtctagtgctgggcaggggtctgggcaccaggccaggatcggggaacgagaattagtctggcagggagcggtgggaagaacgaatggaaaacggggggacggggtttattggggttcaaagtctctgcgccaaggagtggaggcaaattttccagagctgagggactgggagttggggggacaaagtcttcattacggagacgatcggggacttaagtttccggggcgccgccagactgggatgagggtggcgccacgggcaggcgaggctggggtgggggtccccagcgtctggtcgagcttgactgaaagagtcccgggatttgggcggagcaggggcccgcgcgcttacctcgtcccatttgatgaacttactcccgcgccgcagggtctccaccacggtgggcggctccaactgcagcgcgtggacgccgggctgggcgcccgccatggcccggccaggggcgggtcggggacccacggagccctgacggggaccgacggcgccgctgctcccaccgcgcggcccgctccggccccgcggcgtcagtgcccgcccgcccgccagtctgtcccggaccgaccagagcctcggcggggcccgggcggggcggggacggggcggggcctcccgggccccgccccctcccaccgcgtcggctccccctggcggccggggcggcgactgcagccggagcggggattggggcaggggcacgcggacgggtcgggggctttgctgcggggctcagcagaacctgattcttcaggcctgtggtggaaggagggcgctgggggccgaagtggctgttggggagcagctggagggactgggtgtagagggcgctgcttaaggcggtccgggatcagcccactgaggtttccgagcgactagggctgcagtaccagcggagggctagacttgggccggggggtcgctgcacagccctgtcgcccaccctcttctgccgcacttagctgaatgcaggaaaagcttcttccgcccccctctgccctggcttcgcctcacccactcttatgccgcgcggtcccccctccctgggagcacttagccggctaatggacctcccgccggcaggcacccctcccccgtccctagcccagggaggccgggcgcctgccacctcctttaaggacccaagcatcctggtcttcgagagtgagccctagaacagcccccttcttgttgctgcagactcccatgactggagcctgactgtgagcctcttggctgggaaccgcggggggaacgctgttgtctgcccagaggggtcagaagctttgtggatgtccccagacaggagggttgaggaggggctctgcagtgcctggcccacagcaggtgccctgaaatctgcgttccagagatgggagcggggaaggcgcatgggcaatgggatgggtgggggctgcagcccctcccgcagggcttagctggtggggggggttcctgcctgggggcccctgtgggagcccccccaatacagaggcagtaacagcagcaggtttaaagtagaactcatccagaggggccagccaagtcacctagaaacccagaaagagatgcagctggctctgggggaggaggggtcagcaaaggaggagctcccctgcaggcccctttgccccaggctctgagacctccacaaggagccctgcctggccctggccttcctccacaccccgccaagttctccatcaactctaacctggcggatctcctcgctctcagccctggccctgtggggtgtgattatgatctccacttgaggcccagagaggggaagggacttgcccaaggtcacacagcttcttaggaggatttcaaccctccgacttcctgaggcccaggagcctctagacctcattgggaaaacagaaccatgcaaggtggagcttggcctctgccctcacaggctggagttcaaatccggctcttgctagcagcctcttgctagtggcagaacctagtctctctaggtgcctcagtcaccttgtccagaacctaaaggttgttgtatacataagcaaatgggtgggagatgccaaattgacatgagtagctggaagctgtgggtataccagggagggaggaaagggcataggtcagctctggggcagtggaacctccagcttgtgccagggctagcaaagcctggagccaaggcctgagcttaggggatctgagctgtgggccctaggccttgtgcaagcgtactttagagaagcattgggcagcagctccttgtggaaaaaaacaggatgggcacctgtttcctgggcttaagcctctctcctcccccaaccctgtgtctctggaggccagggcagcccccattacagggctccttccttcccagacactttcttccatccttggtaatggtaatagggtatctcagcaggcagtaatggtgaaggcaggcagcctttccggactctacccttgattgaaggagcggtcttgacccacaggaccctccccagagcctctgcttcaaggatgcactctaatggaggggggctggggccctggaaggggtagggctggggaggccacagactgaggctagaaggaggaggagcagtggtacactccagtcccagtagggctcatgcaggagggccagggctgggcatgggcccccaaccacaggaggtcaggaccataagccccctgaagaggctctgagcaggtaagtgacttgcatacagcctctcagcccatggggcagagccaggatttgaacccagtatttctactccaaggctaaggttctgtggcccagcttccaagaaggtggcaggccagcatgcccacctgcaccaagtggtctcgggtggatagccatgggaactggacaggaatctgggtgtgcctgggcatggcgcggtggggggaagagggagagtcagaaagaatgcctgacctgtggacacggacatggctggagaccttcacaccaaccctgagggaggacagacagaaaggtcagggctcagggtcacagcatcttgggggcagagctagggctgggggtcttcatggcctgcaggccccacttccacagaagctgttgggcattaggggctgtttgagggtcttccccctttaatctgtgtgcaccctcaaggtacaaacaatgcttgggttcagagggagctggcctggcctggtggggtgtggtggggaatttggactggggtaaagtgatcctcctatcaggccaggcttagggcaggaggccaggccacggatagggctcccggtggagagggtggatcctacctaatccgcaagagcgagggtcagcccttcctcggcacccagactggctgaagggaggctgaggccggaggaggggcacgggaaggggaggggtcagctcactctacccttccctgaactgagccctgtgagcccattgccttcacaatgcccagcctctgtcttctcttggtctcttctctctgactatagggcaaaggaggagcccaacatcctgggttggagtttggatgcagccccagctgtgtgaccccggggccaatcccaatccatctctgaaccccacccgctgcagagggcttccccccacaacatccaaagagtgtctttgaggggctggagcagaaacattgcctctcagatccaagaccctgtttggggtggcacaaggtgagcctgccttccacagaaacatcccccgggagctgcgcagccttattgggtggtgtctacagggtagtgaggaggttgagtagagacttcgtgtcagggggtttgagccacacagcctgggttcaaagtctcgtctcccgttttatctagcagtgcgacttaattaacctctgtggtgtagtaattgaactttccacgaattttcctatttaatctttgttacagccttctgaggaaatgcaggcacagaggaagacattcattctttcaaaatcatttgttcaaccaatgcagcggcctactacgagtgtgacatagttctaggtgctggagttcagcgggagccaggtaatttgcctaatagcagtggatttgaagactgttcaagcctggtagcaccagcagaccaggtcggcgcaggcctcagccccgtggcactcacaatctrgaagtgggagacagacaatacacgaatgaatgagaccatttaaagatgcagaaaataaaatagagggagggaatgggatgcgccgtcggcttattggaggtgggccagggctatgtgaaggaccgaggagccgcagggcgggggtgcaggagccccggcacggcgccctctctgcggagccgactgggcggcggtcccgacgcacgctcctagggtcagccgcaattaccgcctttattattataagtcgcggcccccgcactgcccagctctttgcgccttagtttccccctctgtgcgcactcgggtcgcgaggcgcagaggacgccccaaacaactttgcgcttcccggcctggccgcagggcgggggaggggcggcgccgggagcggactccgtttcccacaagcccgagcctcgcgccatcttgccggtgggcggtggctgcccggggttggccgtttgggccggccgggtgccaccgctcacccccagccccggcttcttccgctgggggcgtgggacctgctactcggagagtctagggacccggacagctcctgcccgccttctccactcttcctttcccaggagcccagtccacgtgtcggtccgtgcggaggagcccgttcgctcctcgctggccgagggctggaggacctggacatcggggaccgcagcgtctcctcaccagactccctgtctgcacacgatgtccactcccctgcattctcagatagcccctattctcagatggcctcaatgaggacagaatgaggaagggtccaatgaagactagggtcctggcgtgagcgcaaatcgtcgtcctgagcgcttagaacgcctgggtttgggactggaaggttgcgtttggggagtacggacagctaggccaccccctgccgaatagaccctcccctacccctgcccgggggcggagtaggggagaggggcctgtagaggggctggccctttaagggggtgtggtcggggggcggaggaagagcgagacagagaaagcgcttcggcggctgcagctcgggcggcggccgcgggggacaaagggcgggcggatcggcggggagggggcggggcgcggccaggccaagcccgggggctccgcaatgctgcagctgcccccgggcgcccccgccgccgccctcgccgcggagccgcgcggagcggacgccggcgagctaacccgagccagccggcgggcgtccccggaggcggtggcgcagggaggggcccgacgctcgcacgtggccccggcggccgccatggcggacagcggcaccgcggggggcgcggcgttggcggccccggcccccgggccrggcagtggcggcccaggaccacgcgtctactttcagagcccccccggggccgcaggagagggcccgggcggggcggacgatgagggcccagtgaggcgccaagggaaggtcaccgtcaagtatgaccgcaaggagctacggaagcgcctcaacctagaggagtggatcctggagcagctcacgcgcctctacgactgccaggtgtgttcccaccccgcgccgacaccccaaaatcggtctcgcgccggtccgcctggcagctccactgtgagctcgcctgtcactggagtcaaagggcgctttgcttccccgcgcgctcccctcccctctgcactcccgcccccaatatatactctttcttgcctgacctaagtcacttctgccttctccgttgcctcggaccctgccccccatcatgccactccccaggtcaagcctagtgtcctccagacgcctcaaggggtagcctgagccttgggcaagaggcaagggggctatcctgggctggcagcggcaggaggtctcaccgcctggtgcccgctgggttagactgtggttacaaggtgctggtctggtaggacggctgcggctgggctgttctgtgggctagcctggagctccatcttggcgtgcgtgcaggctagcccgctttctgggctctgcttctccacccccatgactcyctggttgttcagacggtgactcaggccccggggggcagggtggaggagtgggtttgcccggtgctgcctgcctaccctagcccagccctggaatgcagctgactacaaacaggataggggcttcctggggagggtgtggcagggtggtgggcatcccctccctcaccaaagcatgggctctttgtttcctctttgccaggcctgggtccttcccagtgacccctcagccttcacttcctcctcactcccggggagctgtgacaggtgtttgggggaggggaggggggtatgataagctgggacagctgcacccaccggtgctctggtgagatggggggcccggatgttggggagacacatctgctgggttcccagcccaaggtccccaaccctggctgtctggccttgtctgtcaccccccgtgcccactggcagggacaggaagctccccccccaccccgctttgggcagtttgccttggcacgggcctgatcygttttcctccccagagcagctgctgttctgtctgctgggcagagggctgggttcctccgaggtaggcaggggcctcaacccagagcccctctcacaccctctctccaactcaggcttatgtctctycctcctcccccacccccaccccaggaagaggagatcccagaactggagattgacgtggatgagctcctggacatggagagtgacgatgcccgggctgccagggtcaaggtgagggggctggggggcgatgggttgcctgaggcactgccccgggaaagtgaggctgtggagccaggccctcaagccccagctcctgcctcaacagaatggggccaatgcctagctgtgaggttgttgtggcatctcctgtgcctcagggtggccccagtctcttggaagtgggtataggcgagctccaggcccccactcctgaggactcacttatccttcctcccccatcctctgctaggagctgctggttgactgttacaaacccacagaggtaagagatttcctggggggctggcgggggtggcagggtgaggggagcccggctcctgtcatcttgggrtctggtctccttaatgtttaccctcccaccccatccaggccttcatttctggcctgctggacaagatccggggcatgcagaagctgagcacaccccagaagaagtgasggtccccgacccaggagaacggtggctcccacaggacaatcgctgccccccaacctcgtagcaacagcaataccgggggaccctgcggccaggcctggtgccatgagcagggctcctcgtgcccctggcccaggggtctcttcccctgccccctcagttttccacttttggggttttttattgttattaaactgatgggactttttgtgtttttatattgactctgcggcrcgggccctttaataaagctaggatacgcctttggtgcagctaacaggctcggctggtctcttttaggggggcacactgctctttgacttctgccagctcagcttctccccaggtgaccacaggccttcctaagggccacgtagccatgacgatagcccagtgctggctcccagaccaggagttgaaagtggctggggagctgtgggggtggggggagcagtattgctgttggcaggcaggaacactcctttttctctgggcaagggccaccatgtcattgagcctagacccccaaggctccacagtcgggaaaggagaaggtggtggggtatgctggagctgaggtctctgagtctctcagggcccacaaacacacacaggcttactccttgggcttttaagtgtttttttgtttgtttttgttttttgttttttttttggaacagtctggtccctgatgggggcctctccccctgcccctccccagtctggttacagctcagttcgtcgctctattttgagcagctccacctcgaacaccagggttgcaccgcctgtaggggagaaggggagtcaaaatgccaaccagggccacagggaggtgggctggctgcaggtgatgggaggtatcaaaaggtttactacctggaatctttgggggagctccccgctctccataccctgttgaagatgcacaaagaaacagtcagtgatggccaagctcccttccagtgtgggcaaagggagagtgttccgcccctctcagcaagaaggccagaaatggagaagggtaatggagatgggaagggggtgccaaaggcctggcaagggcagagtggggccactacagctgagtgcttcaatgatcttgccctgtactcactgctagacacagccaaacttggaggaggcatgtattgtaatgaatggatacggtgaagaccaatgaaaagctgaagcagctttcacccttcccagtcacacaccccaaactcgctctgcaccctcaggaggggcctcttacctagctcggatgggatcaccagcttgcgcttttccccctcacacatcctgcaggaagacacatgctcagcccatggcagcacccagggcccttgtcttgtatccctggggcttgcctcccacagcttacctcctgggcggtggccatgcacgcccccactcccaagcccattcccccatgactcaccccagcagcccctggtcccagcccttgatgacctggcctgtgccaagggagaagacaaagggctggttctggggcaggctgctgtcaaactctgtcccatcttccagcttcccctgtggaaccatgagaaggccagtgaggaagaggggaccacccctgacaccccctccctcagctgctttccccatcaagctgcccccccacgcccacccacagccctggtggtcagtcctttttgttttttgagatggagtctctgttgccatggctggagtgcagcggcgtgatctcgcctccctgcagcctctgcctcccgggttcaagcaattcttccacctcagcctcccaagtagctgggattataggcgcccgccaccacgcctggctaattttgtatttttagcagagaaagtttcatcatgaggccaaactggtctcaaattcctgacctcaggtgatccacccgcctcggcctcccaaagtgctgggattacaggggtgagccactgcgcccagctggtcatagttctttaagaggacagagccttgggcagctcacagtacactgtcactgcctgctggtgcccacctgggcagtaggcaagggcaaggcagaaccatggaaactggcttagaggcgagaggggacttgcccaaggtcacctacctggcttatggagaaccagactcccaagcactctctggtcctcggaagccccacccactcccaaaaggcccgcccaacccactcaccgtgtagtgcatgtgcaggacatcccctttgcgcgatttgatgggacagtggtccacccgcttcttgaccccgatctgcagcttccttttgccctcggcccccgtggccgtggccacggcgctcaggcagatggacagtactgtcaggacccggaaccagctcagcctcatgtctctgtgggcacagaccccgaccgaccgactgaacgtgggggagggcagggagagtatggaacacgggtaggtaacaggagggttccaccgccactgtatcttccttgccccgggggatcccctttgtcccgggtcaccgccctctcccccgggctccggggccacacttaccagtccagtgagaagggggcttggccgaggaccccagcagcggggggagggggtcaggggaggccacagcagccagggacccgcccctttgctcacccccataccttccctccctcccagtccccacctccgctcttcagttcccgcctgtccctttacgcaaagtccagaccctatctggctgcactgcagttgccccgactgggcggccccactcacgccacacccagctgcccccggtccagcacaccaacacctctgcggccgctgcagggggccggccccgaggcacccacacatccccactgggtggctccgaggagcccgggtcctcgggagataccccccagcctggccctgtgcttccgcccggggcgccgccccaactctgagcccttgggggtctccggggcacccagactggccctgtgtctgctggccgccgagcccgctccacccacaccacctctcccggtggagttctcggcctacggcgtccccaagcccggccaccacggagaccacccccgcgaggacgcccggggccattactcgggccaggctcctcacttggctccttggcaccgcccttcggaggacgcggtaccgcccccgggcctgcagccccgccttcgacagaactagaccccttttccggagccgtagccacgccactcaccggctgaagccccgcccccagcgcctccgctccgtccccctctgcttccgaccccgaggctccgcctttcacctcctccagctcctccttcaagagccaggctccgtcccccgaccctcctagctccgccccccgccgccgggctccgccttccactggcaccagctcggaggtcccacccgtcccggttccacgtcccgccccgagtcccaggactccgccccgtgcggcgtgagaaccctccccctgcggcatctccggacagctccggcccccacccccaatttcctcgtcacctagctctcgttgacactcggagcccggtccgcttctgcccggcctgatccagcctgccctcttgcaccccggctccccccagcccgggctgtggcccccgctcacctcctcgccgcgcccccggagtcaaccccggtggtgctgccgcctctgcgcaggcgcgtcctcgtcgctaccaggccgggccacgccgccctcccttattggaccgtgcgaaacccgcggccacacgcccgctggcacgggtctttcccgagccccgcccccgcgacgccgctgccctgcgtcacttccggcggagcggtagtctgtaaggttaggtgaaagtgacttccgaaaaggccggagacacttccggccgaggtgatagtaaggtcaggcgggcgtgggttcccggagggggtcttgaggcgccatttcaagtcgcccccagcctctcccacagcactcctgttttcccgggcctcatcatggcccacggccctcagtcgctgtggagcctgggcttcacagtgacactcacgtttgaactcccggtcggctgtgtgcttggtagaatttgtcatccaatacaggcgtgtaacacgggcttgatgacacccaccccacagggcccctgcaggaccgagatgatgtccaatgacaagccctggcttccagccaatgctcctgcccacatctctctcccaggagccaggcttacctctacctgtgcacctgggctgtgactcatgactggaatgatctggctgggcctgttcccccaccagacttattttcaggcgccccagcagccaccaaacatctgtcaactgaagtaatgaacctgcagttgagaggcagctaaacctaggttgaaggttagggagacagctgagttgaggtcaaatccccccggccagttagcctttctgagcctatttcctcaattgtaaaaggaagacaatcatgatgctgacctcagaatcgagcgaggaggaagtgaggaggtgcatgtgaagcattgtgcgtgactggtggggctaactgggctctggaggcggtagctctggggccctaacccctttctgcctcatgctaattgacctatggcatgtccagtgacatcatgactgagaaaatgatttgaaagtagtaatcgctgtcaggaattgtctcctggttcaacccactcctgccttaggcccactaagatcatacccacatgctctgacccaacacctcagagaaagcctccattagggtggctgcccctcccagtggctgcccaattgagttaactctgcccctgaatgtcctgcttcagcaggcaaagcagtggtgcccaaggttggcctttcatccaccccaaaccactcagccctgggcactggaggctgcagggagaagggtaggggctgggcttgggctaggatagacaagtcaggagaatctcaggcagcaactgatgaaggaagctgcaggatgcaagggaggcgagggtggagaaaactgtgtgggttgggcgggcgcggtggctcacgcctctaatctcagcactttgggaggctgaggcaggtggttcacccaaggtcaggagttcgagaccagcctggccaacatggtgaaacccgtctctactaaaaatgcaaaaattagctgggcatggtggtgggcacctgtaatcctagctacttgggagactgaggcaggagaatcgcttgaacccaggagatggaggttgcagtgagtggagattgtgccattgcactccagcctgggtgacagagtgagactctgtccaaaaacaaaaaaaaacacaaaaaactgtgggttgggttgaggggagcctgccgcccaaaccaggcccaccagccccagacttgcggtgcttccctttcagggaggtgggagtgaagttaagacagggcaggtgctgaggctttagattcaagctgcagggaacaaaaagcagcagatgctgaaagcgctgcctggcaggaagaacaagtgttcttttctattacgtaaagatagtctcaaacttctctggggcccgaggacgccaaccacagcaatcttctgttccctctatgtgcacatgtggaaactgctgctcagagaggcaggggtagtgacaagcaaggtcactcagtagatctgggtcctaccccaagctctctggccacagaaggctgtctccttctagaaaagaaccctggtgaagagcaggagggcaggcagtctgtattgactgggctatccctgactcccatgcgtggcaataacttgaaagtgatgaatacataattctggccctgcctgggatctgctgtggggccttagtcctcatttcctccatctgcacaatgagggagcaagacaagctctggatttagtgatgcagacattcatgcccaaaccagccagcctggacagtgacaaacagtgacacaggcagggacagctccttccatctcttttatcagggttgggggtcacagttcttgtaccaaagcccaaatcccattatgcagaggtttgggtcttcttagtgaggggaggaagagccagttgtaagatgcttacttgcacagagtggttagaaactgagacagtactccattctcccctgagctggtatgtgacccctcttgctgcctcccagtctcctcttccaactctgtcctgtttgatgatggcctcagggagacaagggatggcagaagagccctctgagaggcccaggtcctagagcagcttctgcctgggctgaggtcttg

SEQ ID NO: 97192 - DNA, 43073 bp, Homo sapiens
agccttaagagtcatggtcaggagcttggattctggtctaagtgtgggggtctgagaaaaggaggtccacgcgatcactctgcctgttgggtggaaaataaccttgtagggaacgataaagtgagagatgatgatggtttggactaggcaggtaacaggagagggggtgagaactgagggccagacataagggtacactggttataggacacttgagctgggccctgaagaattagcagtctaagtttgccaacagggtcaacgtctcatctttgcagccaaaacacctagcataatacctggcatgacgtgtgttaaatggaactggaaaagtagtaacaaatattctggaagaaaaatgttttcatgaagtaatcttgaattttctatttcagaatgctatttaatctttttcaagatggctatatatataatagaaaatttgaaaaattgtaatgtcaaagacgggaagttataattcctcatagtcccaccgcctggagacaaactggtattttggtgtactttccccctagtctttccatactcatttgtaaaaaggtgggtatttcctctttgaggagcagcctagtctaccagaatcaagttggttagggtctgaatcccactctaccactgagtggttttggacaagccatttgctctcttgtctatccccaaaatggcgatagtaacatctgattattgtgacctaaatgactgatacaaagtacctaaaacgatgcttggtacatagtaagtgctcaatatacagcagctgctattaataaaaggaagtccaaattccacaaatccaattataaagaaagctttcaacatctcttttaggaaataaaggctttgcaaatctacaatctaatcacatgtactcttctaaagaaaaacaatcataccaagaataggaatttgccaaaaaagatgtaagcaataccaaatatttttaaaaccaaattttacggtaacacaaaacagaaatggtgccaaaaaccccagaccctggcctgtttaataaatctctctcctataaagatgacatacttatgggattaccatttacactaataacaatttaaagggcagacactgctcacctgccaagaaatgattctttcaggttttccatcttgagttgcgtctgtgtggtgtgacagagcacagcactgagtgagggaggacacttctgctcacccccagcctctgccatcaccaagcagtgcgattctgagcaagccgtcctctccggtactctgtcaaatgagttgtctacagtttccacaactccttccagctctaaaactctaccactatgaagaatttacagttcaatgtgtgtaatactggtgtgaggaagatgtattacttacatatcaggtaccttaacaacctgaaatagcatgctgaatatcacagttgtttttttttgtgtgtggtgggggggacggaggatgaatcatacattatatgggtatacttgtaatactaagataaaagctacattttcactgagaaggaagtgtgagactaacctaatacttggggtcataaagttgcacagtacacaccattttcaaaggtccaactactgttagcaaatgccagtttctcagtggcttcaaacatgtttcaactggacctatattggcaatgatggtggtgaatttggcttagttttatataccatcatcactcattaacttaatgaggtaatatgtggagaaacaaatattgctgtttttataggtttctgcaaaggctgttacctacctctttgacctcctatattcaatgctgtctttctgcaaaggctgttgcctacctctttgacctcctatattcaatgctgtctactactctgagctgcaaactgagagacacctcacagccacacaggttctcacacagctttcatccagtggcagagccgggcaaacctggaagcacatgtaaggaccccccaacccagatttcagggctgaggaagcccctaggggaactggcatctagactaaggcctgtaacggtgacaacacactacacatgctgcactctgttgatccagggcattgtctctggtcagtcagggtactctccactgtactcccctcacaccgagtttacctctaactatggtgaacaaaagttgtggcgcgctgtagacagtctgttttatctgttgtctggcataactattaatagtgcccccttacatgctcgaaagtgctttggttaagaccatcaattatagggttaccctacctttagacctgatcctggcagactccagcttgcttgtttggctctcccatgtgactcagcttactgggggccgggggtcaatcttattctcctgtgtatccatggcatgggctgtatgtcattcacatttgtatccatgacagccttgtgcctgatgccaaacagactgagcaacataggttttcaatatgatattcaaaattagaatgagaagcaaatacaattaacaacaaattagatctgcaaatcattatatcatgttgggattctggatttacctttcactagctgtgcgaccttctgattcttaggttttcacctgtaaaatggggataatagtaccttcttcataaagtagagaagtttaaatgagacactataggtaaagtgttttgcacatagctggcatatattgagcaccgttaacagcagctgccgctgtggacaatgatgactgctgctgccacaaccctgttttggtgtgagaaaactgacacctaacaagcatccagtagaaactcagtaagtgtgcactaaaggaatgcttggtctcatgctaggtgctggcttcacatcagaatcttgggttacgagatgcattaatcaaaattacaatttagaagtcaaaagttttgactcctctaagtccagctttcataacaattcaaaaaaacctcctcatatccataagaagcatagaacacagcagcactatctggctgcatccttagatgtgtaccaacatttaaacttcacctttgttataactatactcttactcatataagaatgccaacttggatatttgggtccatctcttctctttttgaactgtcaacctctcaagttgtatgtgattaatgtatatagagaaaagtagaaaggcctcagattgagtcaacagttttcttgatccctcaattacaatatcctctttaaagtatatccttgttgaacatttggaatgaattaagactttaaacttccagatgtttaaactactactgtaaattcaaactcattaaaaaggagcagatttactacctctacatagttttgaagtctgttgttcaccctgtccaaataatttatgaaactaaatacagtggcaggtagtgtattctatttacatagtattcatggtgagaaataaggggcattttaaaaaggtctggaaattaactgccatttggccaacctatagatcacacttattgttacttctaagctaggaattgtttcctgaaactgatcttgtggatatttttatgctaatctgtactaaaaattactttactttttctggccacaaaaagctggctacagagaagcatttgattatggcaagacagctgcatccactctcatgaaataaatggacctggatctagtcctctgtggtaatgtcttggcagccaaacaaaggtggcagcatttctacacccagtttgtaaagtctcagaagtttcaggctccattttttttttctttgcaagaaacccatgtcgactataatgagtgcattttagagatgctgtgctgaaagctggcaatggataaagcaagaacataaaaggaacctattcctaaagcaaatattccttttacaaaccttaagaatgaagtggctttcacaatcaattttaatatcgaagcactggactgaagtacctgcctctggcacttacttgccatttaatttgaggcaattaattcatctctgtgaacatgatttctcaactgataaaagggggttaatacctgtctgaatttttctgagaacttgaatgagatcaaagtgctttgtaagctctaaagtaacactgcaagtacaattttcctgttttatgacttacttaaaatagcacttaaaagtggctgcccctatcaaacagaaataaacctgatccaactaagttactgcagaggaactggtctcagaaggaaggctctttcaacccaaccaactactacttacttcgcaggaattattctaagaattaactgaaaattacatagaattattaataaagtgtttgttcccacttacctcacaggtcacacatcctacatcaggcttcaactgtgtaactttttttttccaaaaaaaagagatatgtcaaaagcaaaaattcctctgattagatatgctaaatcttgaatgtctttcctagtacatttgcaaactatttagatatgatacagatcttatttttaaaaaactgtacgaggcttttgtggatactctgtatgttattttcctttcctttaatttcaataaatcggatttactgaagtctatgaagtttgtgtgtgtgtagttataagtacgtacaattgcatgtacttatgggccaactgtgggccaactctagtctgtaagcttggtgagtcagaaaatgcactgggtattgccagcacttagccaaggagcctggcacacagtaagcattcaacttatatttgtggaatggtcatgacacctaccactttctaaattatctcatcttgcaaaagacaacctgtttcatcagtgcactgattcaacctaccatcaaagatcagtttgttgaaaacatcttttaataaattaggtttttaagctttcagtagactcccaaattagagaatatacatacattataaaaacaaatgatgggcatctttaactaatgcttgttgcatgaatgtttttggatacattattgtggcagactgaaaagggggccattattttgtagctcctcccaacaaaaggagtctatttcctcctccttcgaatctagactggccaagtgacttgctttgactaaaagaatgtggtgaaagtgatgctctgaattactgagtccaggctttgaagccactgcctttgctttcctggtactcttgagaccaccattacatagcgcaagataaaagaccacatggagaggcccagtcatcatattcagtccccagtcaccctcccagctgaatgcagacagcccagatgagactaggagaagaaccactcaaccaacccacagaactgtgagaaatggtaaagtatttctttaaaccattaaatttggggggaatgttaagcagcaataggtcaccgatgataaattaattaaccctcatagcacaaccttaaggtaggttgtacagctgaggaaactgacccaggttaagtaatctgtcaaggtcacaccactctttttttccgccccacaccactcttaagctccctaagaacaggatgaatgtattgaaacaccagctttgtgtttccttcattgtcatcctgccatcatgaacttgatcagttctttctgccaaggacagaggcatctcttagagccctggctataagataaactcttgttatctttttgataagccgcatgcataatgtgtcctgatttgacacatctgtgggctttcctaggacagagaaatggactgtgggctatcattctcagcagttcagcaaatacacaccactctggtttctgaagctcaagtaacacttactcccaacataaaataattcattaacacctctgcattcattttagccagcaacaataagacaaactctgacaatttacatcagggcccacacagtacatttaaaaaaaaaaaaaaaacctagttgggtgaatcttacatttaacactttcttaattgttttttttctgtaacccaagtagtaaaccacatacaaaagactcaccttgaattgtgaagctgtttatcaaatgtttaagagaatttacacaagaatgttttgaccccacaaaaaataatgtgcctaagctttaaacaaaattcacattttatttagattgaaataaactatacaaaattgattttcttcaccaaaaataacagcaatattttccatatttttctagataaaccacaacacttattttgtaggttttccaggttttgcttataaatcaagatgaggcagtatataagagtcatggaaaaagacagagaaaaaaaacagacaaatcagttgtcagtatccatggcctctgattctgtctcaaccatgaaacagaagtgttcaacatatacctgctaaaaagcttaggaagatgtaggctccacaaaggaatgtaaacagcaacgagatgtggaacaacagcaggcttttccattcaaactttgtcatttgtttctttaagttcaagaaagacaaaatctacactgaaatccttgtttggtgagctcacaagcttttctccggtaatttcttgtaactgtccagtatagatttttaacatacttaaaactcctattagtcaaaggtcaattgtgggcttcactacaacattttataaaatgtattccttcctcccacacctcttcaaaatatatttcttcaaagaattcataacacccaacaagtagagatccacagtgataataaatgctatgtctaaaatgacttaactgaaacaattccagagtgccrtcaacagagatcacgcaaaaggaaacatggmactttcaacgttctcttctggaagaacaggtaggtcttcaaagcttgagagttcaaacaggggccatttaaacaggtagattatcaatggctaatgtattcaatggagtcctataggcaaagatatttagtgattaagtggtctacatacaccttacggctttttcttccaaatatcaaatataagaaagcctatttttaaaagtctcttaggyattttccacagtttcggaattatctgtaggaagctctgacttacttgtatagagtttaatatatgtgtccaccattaaatccaggtcgtgttttatatcaaaatttatgttaagcaaagccaagttacttgacctttggtctgtcaaagtgttcctcaaatatgctttaagacgctttcgtccattttcataccgctcattctcaaccttcatcacaggaagaatacacaggaccttcagcaatgcatacacattaggaaaaaacttgatgtcaggcaggtggagggcttcatagatggtggacggaagctctatatctttccccctgtgtttccatttgattctccaacaatgaagctcagctgacagcgtgtcaggattgggtaagtcacttctatacatgtcagcatggtgttcctccgacgtattgaatttgagttgtcccatgactgagggtaccagagataagcatttaagagctttgaggtgctgttctgagaatatatctttaagttcctgaataatgtgctccactgttgggacacttagggtttctttatagtaactctcagaggttagctgagattccaagttaccctggtgagctctgcggaatttcccagggagtttcatttgaatatcaagtttggttgccaaatttgtggcttcctcaaaccaaaattcatgataaacttcaatattttccatcacttcgttgagtgaatgcagtactgcagtcaagctaccggccgcaaagaagacatcagaggtttgcccctggaggtttttcccaaaggctcttgtaaaagataggacatttttaagaacaacaatagtaacaatgaaatcaaaatctgacactgcactgcagagtacaaatgctcggccagctatatagttattccatctaatatttgtgtcactatttataccatctaaacataaaacaagtgcttgcaggagttccactaaaatttcaaaagcatcatgcctgcctgtccactgagaatggcagatttccttcagttctttacccctttctttactgttctgaaaaagaacagaaattacgttgtcaagttctaaaagcagttgtggtgatcgatggaaaaaagaacaaacttcctcaattgttcctaatgcaacagatactcccataacaggtactgattttgccaaccacatatttaaggcacaggaagagcagagtgtgtagatagcttggggatatttctctaaaagtctagaagcaacaactttcattttggaagaaaatccactagagacaatgtaagcctggccacgacaatactccatatttaatccccacttctcagttatcatagtgtgaaatttcacagccaaaatttctgcatcrgcttcataaggcaggaagcctataaattcctctcttaggttatgagattcatcaacaaacctcaccaacacaggtaggtgctcttcccctgctatgtccactacatmgtcagtgataatggaaaagamgtgtgagtctctcacttccctgagagtttcttctcgaatacagctctcacagatctctagcatcygcctctgctgtgtttttgaacaaaacaacgtgttaactgctgttgtctcaaaccgctttctcagaacctcttcaccagaatttatccgacactccagcagtgcctgaaagttatctggagtaaagagaccttctgggatttcatcagcctcatgtccatccagaggtatgttttgctttcccatcagaatcaagatttcaaatagagattttaggtattctttgttttccttctcttcaagggttagaggtaaaatgtcctcatcttgcccttcaccctcttcttcgctggggttctgagcattgctattgttggtttctttatgtttttgttcctgctcagaagtttcatcaactggaaaacaaagaattaattttacaaacaggctcatgaaaaaccatacacaacaaaaaatattacatctttggttaaatatttaaaatccacaaactcattcattcaatattcatagggtatttactagaccacagactaggacagagattaaaataagacactaagataagacacatcctagtgggagagacaaacagtgtaaagagatatattttaatcctagatgtaaatgctgttacaagataggaataattttttttttttaagaagtagagsggggagtctcactatgttgcccaggctggtcttgaactcctggcctcaagtgatcctcccacctcagctccaaagtacaaggattaaaggtgtgagataccacatccggcctaatttttaaaatacacttaacaagactttccacatatgtaatgaatgacagtccatgccctcagaaaaacaaagtgggacagaactaattactaaggtactgtgcttagtattttatatgcatcacattactctctgttcaggcaggtggtatcggccccacttgacaaacaaggacactaagtaacttgcccaagatcacaaatacagttagaagaatggaagtaaagttgaaatccaagtgcgtctggctccaagatccatgctgatgctgtttttatcaaaccattatgccacacatttatatgggagatgggacagctgtacaaaccagtataatataaaggagattaatgtaactcttagggctagtattagaatatcacacatcttagcctaatctcttcacaggggataggaaaactgaggccctacaggctaaatgccctgcccatagtcatacaggtcagtggtgtctgcaggaaaataatccaaatctgaggaggcacagttaaaacctagttcttagaacataagactagggccgggggtgcagtggcttacgcctgtaatcccagcactttgggaggctgaggtgggtggatcacgaggtcaggagtttgagaccagcctggccaatatggtgaaaccccatctctactaaaaatacaaaaattagctgggcgtggtggcacatgcctgtagtcccagctactcgggaggctgaggcaggacaattgcctgaacccaggaggcagaggttatagttagccgagatcgtgccactgcactccagcctgggcaacagagtgagactcygtctcaaaaagaaaaaagactatggagggcggtggggagaaacaaaaattcagaagttgcatttgatgacaaggataaataagggggacatgaacaaggagggcatttcagttggtgagaattattctagcacaagcactaaggcagaagagggaagcaggctgcccaagtacaaagggaaatctagtctgaccggagcctgtgtgagccatgcttcagagcttcataagggttcagaaaaatgcagggagcatccttccttcacccctcctcaaatcagatgacactgctattcattatatgtgacacagcagtggttctatactagggaggcttcccaagccagaaagcaagaggttatcctggacgcctgcctgtctggctccctccctctctcctccattatttctccacttccaattaacaagtactaattctcttgcttttatttttttcaaaaagaagttcattaaagagcaaagagttcaaactgaaaagtcaagtccctcttcttttggacatctttttaggtgtcataggtatacaaatttcttaagttccttgaatctattccctttactctctctaccattgccttaattcaaggcctttcaacttttatttggtcagttgacagtctaactagcctccatgcctccagtgttaccttttctaatccaacagagtactctatgtaccatggaaatcaggtccctgttatcacctacttataaacccctcagtggttccctattgctaatagcccacaagtctgcaagttctggcctctggggtcctctctaggctattttctaaccataatgggttatcacaaactttaacaacactaaaatgagtgtagttccccaaaacagcaccctgtttcgtgcacagaatacctttccctctctttgcccaagtccatatctcctcatccataaagagggaaataacagtacttatctcacggctattgtgagaattaaattaattaatacaagtaaagcacttagaacaatgatttggcatcagtaagcactcaataaaatgctacgttaataataacagcaataggaggaagaaacagaggaggaggagtaactaataactgacaagaagaaaaacagcttctagccctcgtcctttggtgacataattcggacatcagcacctccagaaaggctgttgtgaccactactcacaatggcactatgtgcccccacagcatttagtccttaaacatttacaaagaatttattacataccacaactgggtggacagaaaaagagattcagtgcatgcctctactgttgcccttccttccctacaatggagcactgtgtgcctgccacccctaccacactgagagaggaggcgtcacctccatgaggcctgcatatagcatagtgtgtggcattgcagcactcaataaagacaaactaaaattagactttagtctcatagataattccaaaacacaggacaaaattgagcacactcctacattcattctcaaggtaggttttcaacacagaacatatttatttgtccttaccaggtcaaggcctttttaaaaggcattcagaagttgagtcattaacactatcacttactttttttctgtttcagtgtcctgatttcatcttcactctaaatgtcaagaaaaaaaaagaaaaaaacaaatcatctttaaaaaactgayctctagtgtatcatcttagactcacaaatacaaatgcctattctgagtcaatttaattctttcaagagcataaattctttatatagtacacattcttcaaacaaacagacaatgagaaaaccagaataagctgttaatgactccaaggttataacaaagtcttagggaaaaaagaatacatcattttgcttattttctacctaaatcatcgtaactttgggttataagtgtttactggctaatgaaaggcacaaaaatacaccatggcacttggagttaaattcaagaggacacaaatcatcttacttcccaatttaaccctggagatgtcccataagaaggaggttgctgaatctcaggactcaacacaaaagtgatgagaaatccctgagaagcagaaggtgaaagtaccagcatggaagagatacacagagcatacacagagcatagtaggccaagtggcaccaatagggttagacaaaggaagaactttccagctgcatcctttactttccttccaaccctctacaatgcttaaatcatgagccacctgttactttctgtggcagaaaagcagcaatgccagtgacagctgaagacagcaggatgcctgttgggcagcactggacatggtgctgataacaagaaacatcagcaggctggtcaacctggacatcccctccttatcctacggactgcacgtttataaggatggtgggtcaggaagagtatgcctgctgtgagatatgtgaggctctctgagggacagactacagggaaatgatagctacaggacagcaagtgattgagctcctcatcctgatacatattacacttcatatctrtggatttaaccaaccatgcattgaaaatgctggggaaaaaatggatggttgtatctatcttgaacatgtacagactttttttctcattcttcccctacataacgtagcataactatttacatagcatttacattgtagtaggtgttacaaacacataaatgtattaagtatcataaataatctaggtattatttgaaaatggatggttgtgccgggcatggtggctcacgtctgtaatcccagcactttgggaagctgaggcgggaggatcacctgaggtcgggagttcaagaccagcctgaccaacatggagaaccctcgtctctactaaaaatacaaaaagagccgggcgtggtggcacatgcctgtgatcccagctactcggggggctgaggcaggagaattgcttgaacccgggaggcggaggttgcggtgagctgagatcgcacccttgcactccagcctgggcaacaagagcgagactctgtctcaaaaaaaaaaaaaagaaaaggatggttgtgtctatactgaacacacagatttttgttcttgtcattattctctaaacaatgtaacagaacaactatttacatagcactacattgtattaggtattataaatgatttaaagtcacgggaggatgtgtgtaagttatatgcaaatactacaccactgtatataagggaatcaagtatctgtggattttgctctctgagggaagctcctggaatcagtcctccatggacaccaagaagaaagctgatatggaggactgtaatgtaagtgtcagtattcatctaagtcccaggaaaatagaaataaacaaatagaggggaaaatgcataaagaaaaataaaaactaaggatttcycagaatttaaggtgtaagtcctcagttgtaagatgacaaattaaggtacataaaaaaaaaactcacatctagatacaggttagcaaattttaaaatgtcaaatataaagaaaycttctaaaaagctttgagggagaaaagaagattacctaaaaaggaacaagaatcaggctggcacagacttgaatagcaataatggatgcaaaaaaatcagaaagaatcaacatcacatagactatatgtatcctctacgtatctcttaataacatttaaaatttaaaatatcatatagcaattaaaaataattccacatctggaaactaagaaaaacaatcctatgttaacaaaatagagaaattacaaaatacctacagccagacatgacaacactatatgtctaaagttgtagggtatagctaaaatggacctaagagagacttttatagctttgaatacacataaatatgagctaaacattcaagaagctagaaaaagagtcaaaaaataaatcaccctaatcaaagaaaaaccaataaaatagttcataagtacaacaatcactgacaaaactactggttctttgaaaagattattaaagtttcataaacttttagaaacattaacaaaacacaagaaagaaagaaaaccaataaagatagcagaatggcaatcaaaactttccctcatccaccgcaagccatctaatggttttaccaagttctaccttactttcaagagcagataacatctacctacacaaatttttytaggagaaaaaaaaaaaaaagatacccaacttattttatgaggccaatagaaccttgatattataactgggtaataagagtacatgaaaagaaggctacagaccaagattcacaaatgtaaaatcctaaataaaatattgaccaattgaatccaatggtatataaaagcaaatagacatattgcagtcaactagagttcattacagaaatgcagatggttcacagaaaatccattagtattacttattgcattaaagaatgaaaaaaatgaacttgtctattaaatacatgcaatgaaagcatgtgataagttaaatataaaaacagaatataggtcaggcgtggtggctcactattgtaatcccagcactttggggagctgaggtaagaggactgcttgagcccaggagtttgagaccaaactgggcaayatggcatgactccatctataaaaaaaaatacaaaaaaataagccaggcatggtggcacacacctgtggtcccagctacttgggaggctgaggtaagaggattgcttcagcccaggaggtggaggctgcagtgagcagtgtctgccccactgcactctggcttgggtgacagagtgagaccccatcttaaaaaaaaacaacaaaactctgaatatgggagtagaagggaatttccttaacttgataaaaactatctaacaataccaacagcaaacattatacttaatggggcaaggcaagtatgacattactagaattgttcaacatagtaccagggatcttgactaaacaagacaggcaacagaaaaaattaaaataataagaactgaaagagacaaatttctccttatttgcagatgatacaatcagtaacagaggaaaaactcagaagacttactaggattaacttaaaaagaagttcttcaaaagtgctggaaacaatttcaaccagaatatatcatctataccagtaagaaccataatgtatttaagaagtgatctaagaatgcatacattctcatttaaacaactgtaacaaaagctctcaaaatttttcgttttctgtactcctaaaagtattctaatattcttttcaaaaaactagtatttagttttgtcaatgattgctgttatttgataggtattttatgggattttttttctcttcatggatagaactagttaatactttacaatagtttatactgtaacagtaaactagtaatattcgtttactaacagtaatactaaactagtaataaatttacaatagctaatattgtaaagatgtcaattcaaagcaattataatgaaaatcccaaaagaagttctaggagaacttgacaaaaggactttcaaattcatatggaggaggccggtggctcacgtctataatcccagcactttgggaggccgaggtgggcggatcacttgaggtcaggagttggagaccagcctggctgacatggcaaaaccgcgtctctactaaaaatacaaaattagtcaggcgtggtggtgagcgcctgtagtctcagctacttggaaggctgaggcaggagaattgctggaaaccgggaggtggaggttgcagtgagccaagatcatgccactgcactccagcctgggtgagagtgagactctgtctcgggggggaaaaaaaaaatccatagggaagaataaaggtccacaaatagttaagraaaagaagagttaaacaatcaccttatttgaaagtaagatatattacaatgccatggtaataaaacagtgtggtatagttgcaaacaaataatacagtgaaatggaacagaactccccaaaacagcctcatgtaaacttgttatataacagaggtggcattttataccagtggacgaaaggaagaactaacagaccatgttgggaaaacagyttctctataaggagaaaaagttattatagatccctactgtacatcatacatactaactccaaatggataaaatatctaaatagaaaggtaagcatagaataaggaaaattagataaatgctatctttaaaaagcacacagtaggtggactgataggacatatattaaatacactagcatggacaccaactggtagggaaaggaatggtaatggtaatagtgggtgaagaaggaaaaataataaagcaaaataagggccttgctagtggcaatgatgacaaaaagccatggactaaggagttactgtacttctgttcacctaaggtcaacaaaatacagataggtgtcaatcctcagaactgaaggatatccaaggaacataagaatatgtgtaaattatgccatatacagaaatttcagtgtttttttctaaaccctgtacatatttaatagtgatagaaaccttatctttaaaacattccatgtctccacttttacactttccctttctttattcctttgtgctgaactctggaaacacctcagctctattttccttactatgaaagaaaaggtagctttttccttcttctccagaagggaatgagctagtggcctgtaattaacagcacactctggaccaagtcaacaagtatcaactggctaactctgagggagattttccaatttaaatactaaaactcatcatctcacatctaggctatttaacaaccataacatttatttcccgttacattacctctgaaatagagagtaatttggattaattttaacataaatgcatctgtatttgatttcatagtattatgggggaaggygggaaagctgaaagtacatagacataccagttcttttattcgttttctgtgtctactatgtgggttgttcaaatgactggtaagatcaaatattgttggtattgcattatctcgaagaactgtcctataaggactctgaaaaagaaaattgtgttaattcagagatggtccttataaatatattacacatcaataaaattctatgttaatgacctccacaatattccttcaactccagctctaaagtatagagacttacagaatttgatgtcagttcaggtcagtctactatttccaactgtgcctgcatttgcccttctggcaatctattataaattaagaaactgaattgaaggtaggcataaaatataaaatgtacttgcattttgcatatctgtttctaattcagcatcccagctactttatctgtactgtccttccatgagcccaccaaatctacaggaggtacaagtctcccaaaataatctgcactcttgtatgttccataataatgcatccctattttacctaatgttccacttttgctaatattactgagaagcatcaaggcacagtgaaaatattggactgggacccaggagacctaggaactagtccaaactctaccagtgagtgactcactaagacaccctggctaaattactttccctttttgggccccagtttctttttctgaataaaattctggtattgaactagatcaacatttcctaaaatgaaattattcacatactaatgatcacaatgcttgccatttcagttatattaccatctgtatttttacacaatctactcattttttagttaacactgtcttaagtaataaaactgtaggaagaatgatctgatgttatcttatgtttttaaaaaagtttttaaacatgtttttaacacatactacaaaacttctaaaataaaaattgattcatctgccacatgaaaccaactctcacgccacaagtgatactgatatacataatcacatttttgcaaatgctaatctaggtatttctgtatctctttcaagtcctaatcatcttatgaaagaatgatcatactctaccctacttcctgttaatttcatccaacttggctagaagctggatgcatacttagatggtaacggtcctactgccagccctgaggaggctgagtaaaagacaagaagcttattaagagggacagtaataaataactgctattacactcccctcagacagtccaaagaatagtgcctttaatttcttcctgaatttggaatgataaagataagacatacttcatttaaataagctttctttgaagcagtgattatttcaaaatatctaagcatgctcaaagaacatgccaaacaaaaataacaacttctaaatttgttcacccaaggaagggaggttgggaagacatgaagggaaaacatgtatctaaatggaacacactatcttgggttgtacccaaagagttgttaaacacatttgggatgaatttctattcagagtcaatattttctagttcaattccatgccataatagaaaacacaaagatgattctctgacttcctagtaacactcaacttctagtgctgggctcgtgatcctgagtctactagggaggctgaatgaggaattggttagggacacaatcactgaagggagtacaagttattatattcaaagctcccccatctttcacaccgagcaaatgtccccaaaataagcaaaaacacatacacagtcaattcttgatatcttactaattattaaataaggaggggaggaataaaacattttaacaaatttttaaaagtcaaatcaaattgattttctatttgcaaataaagcaaagatattatagatcagaaaacagaatgtatgaatgaaaaaaatgacattttacaaatatttattttggccaggaatgttggctcacacctgtaattccaacactttgggaggccttggccgggtagacggcttgaccccaggagttcaagaccagcttaggtaacacggcaaaactccatctctacaaaaaatacaaaaattagcgaggtatggtggcatgtgcctgtagttccagctacttgggaggctcagcggggaggattgcttgagcctgggaggtcggggctgcagtgagccatggctgcgccactgcaccccagcttaggcaacagagtgagaccctatttcaaaaaawaataataataataaaaaatataaatatctataaggacacatgccaaaaaagacaatattcaaatactacgtatgataccaagtatctcagtatcaagatttaatctttaactgctgaattaaggtttgagcataaaagaataatcttactctagcatcaaaataataaaatatttggctccggccaaattcagtagtcatgaatgtttactgatgaaatctttttttttttgtctgtttaaagacagggtctcaccaccatgttgcccaggctggctctgaattcctaggctcaagcaatccttcagccttggactcctgagtagctgggactacagacacgtgccactgtgccttgctactgatgagatcttcaatgccaaactaataaagccaaaactcttaaacatttagatacagatatcagaaaatccaggggtttttgtttgtttgtttttgagacacagtctcactctgtcaccaaggctgaagtgcagtggcacaatcttggctcactgcaacctcggcctccttggttcaagcgattctcctgtttcagcctcctgagcagctgggattacacgtgtgcaccgccatgcccagcaaaattttttttgttttgttttgtttggtatttttagtagagaaggggtttccccgttggccaggctggtctcaaactcctgaccgcaaatgatctgcccgcctcagcctcccaaagtgctgggattacaggtgtgagctaccatatccagcccagaaatccagtttttaataacaacatctcctagacgtatagaaagaacattttctcacatttgcgttcatttattcaagattgaagaatcatttagaaattaaaaaagcaaacctggctcatctttctgttctattctctaactaaagaatgtaagaatgaactatcctttaaatttctcacaatctggttagaattatctaattaagagaccatatttattactaaaataaaaatgcaaaaatgcatatggcaaatgtatttaaaataatttgggatatttttacttcatgtcaagaacataaaagtagtttgccttttaaacatatgaaaccttttattttggttgatcattattacccttttaacaaatcaaggcaaaaatattcctcaaatatttgtgattaaactgttgaaccggaattggctcacctcccaatgacttcacaagtatctgcttcaattaattttgagaaataaaataacccaatcattctttagttttctgatgcctctgcaaaatgtatctgaaaaaaatatcaaaataaattgctgcataacaacatatagtgtacctttgaatcaagtttatgtctatcccaatatctgaggtgttacattagttacactgaaacaagtctgcttcatttcaatcaaatttgccttatttgtgccttttataaatcacagcaagagaatcacagagggttaaaaatcttagaactcaggaattacctggcctaatctccttattaggaactggggcccaaagaggggaagtgacttggccaagctcacacagttaacagtaggtcctgatatgaaattacatattattgatgaaaatgtttttccacattacctggataatttgtttaccattatatctaccacataaaaattaaaagttggttctaatagtacatacaaaaacatgaaaacaagagctccattccgagatgaaaattttactcataaaaaagctctaaagagctccaaataaaaacaccaactttaccttaaataaacatatacttttataatcatctaaaattttcctgaagactaaataatatttaaaagtggttacctcagccgggtgtggaggctcatacatgtaatcccagcactttgggaggccgaggtgggcgggtcacttgaggtcaggagattgagactagcctggccaacatggagaaatcccacctctactaaaagtacaaaaattagctgggcgtggtggcacaatgcctgtaatctcagctacttgggaggctgaggagagagaatcgcttgagcccaggaggtgggggaggtggcagaagttgcagtgagctaagatagcgccactgcactccagcctgggtgacagagcaagactgtctttaaaaaaaaaaaaaaaaaaagtagttaccttgggtgagtagaaatggggcaccaggaaccgaagagttttgttttgttttgttttgttttaatcattttgagttttttttccagacaagcgctcactctgtcgcccagagtggagtgtagtggcatgaacacaactctctgcagccccgacgtcatgggctcaagtatcctcccatctcagcttcccaagtagctgggactacaggcatacgtcaccacacctcgctagtttttttggtattttctgtagcgacggcatctggccatgttgcccaggctggtctcaaactcctgagctcaagtggtcttcctgcctcggcctcccaaagtgctgggattataggcccccggcaaaatcaggattttaagaacaaaacagatacttttcagctccaaatctgtcttcatcttaaagtggcaggatataggaataccttccaacattggtaaatacttacatttccaaccagacacagtgagagagagaaatcaagtcaaacagagagacaccaagctcttctattactcacagttctacagatcatagaggtctcaaaatgtttggcacataatcgataatgtttatttagctgatcaggtgttttatcttctaagtctgctctcctacagttctccacccacttctggcatctataaataaaaccaaaatacaattatgaaaatgagctcagcatttaaatttcagccttcagttttaaggcaaacatacattaataacaacggattcctgctcccctccctgagaacataatttggaraatttgattaataacaaaataacagttggaaaaaaccttagaagtcatttagtaccaacatttcaattacagacaaggttaagaagtaacttgtttggagggaagtacaaaatcatcagcagaactagaactgaaacctgcatcttccaactcccaaaacatcagagaagattcamccatcagcagaacaagcagaaagctgcatgcacagccacaaggctcacagcttaacattcccttcaggatttcaacttcaacaagcatacaaaacaacactgtcactgtagaaaatcagcaattaggccgggcgtgttgtcacgcctgtaatcccagcactttgggaggccaaggcaggcagatcaggaggtcaggagatcgagaccatcctggctaacccggtgaaaccccgtctctactaaaaatacaaaaaattagctgggcgaagcggcgagcgcctgtagtcccagctactcgggaggctgaggcaggagaatggcgtgaacccgggaggcggagcttgcagtgagccgagattgcgccactgcactccagcctgggtgacagagccagactccgtctcggaaaaaaaaaaaaaaatcagcaactagatgttctttaaataactagtttctaagggaagcataaaggctgtattcgtttatcttcctatgaacacaaattattatctacagtaatacgtgctgactagattgcaagctccatgaatgcagggactgtgactacacaatctagtacacaaaaagtgttgaagacagagaacaagacaaagtccatgccctctcggtgcttaaatattttcagaaaagctaataataagcacttattatgagccagacacgttctaagtcctttccaaagatgggtactattaatatcccccttgtgcagatgaaggcacagaaatattaagtaacttgctaaagtcacaactagatctttcctcaaatttcttttcttttcttttttttttttgagacagagttttgctcttgttgcccaggttggagtgcaatgccatgatcttggctcactgcaacctctgcttcccgggttcaagcgattctcctgtctcagcctcccaagtagctaggattacaggcatgcgttaccacgcctggctaattttgtatttttagtagagactgggtttctccatgttggtcaggctggtctcgaactcccgacctcaggtgatctgcccgcctcggcctcccaaagtgctgggattacaggcgtgagccaccgcgcccggcccattcctcaaatttctaagaataaaagttctgccgtggataaacagtatcacaaattatttttttgagatggtgtcttgctctttagcccagggtggagtgcagtggtgtgatctcagctcactgcaacctctgcctcccaggttcaagcaattctcctgcctcagccacccaaggagctgagattataggcgtgcaccacgacactcagctaagttttgtatttatagtacagatggggtttcagcacgttggctagcttggtctcgaactccagatcgcaggtgatctgcccaccttggcctcccaaagtgctaggattacaggcgcgagccactgcgcccggcccaacatattcctttataattaaatcacagtattttttttttatgttttaacactattgtccacctccccccaacatacatgcccctgacacttaattmtctctactctaaaaatgtcaaatcaaggtaaaatgctatgatttttaaaaaactacacctaaattgtacagcatttcatttgaccaacaagtattactgctcacagtaacgatgcctaagatgttcacaatttaatcacacttttacacagttgtacattatgattataaacatttcatgtttcaaaatccaaatattaagtataaaaacgatctcactataaaataatttgccatactgctacagttgtttgttttttaaattcttaaatctctggagaccttccacacagagcaatactgtacatattacctccgaactaagttgaaacagctttctgatatcaacagcaactcttattcagacaatcaagaacagaatgggcatcaggcagagagcctaatcaaatacacctgwctttctatatgaactacttaagaataaatctagtgaaagaagtgcaagacctctaataatctttttaaagcaaacttaaataaatacacaagtttatgaactggcacactaaattccaaagatgtcaattctccccaaacccatttactaattcaatataatcacaagcccagtaagtttgtgagagagagcaagagaaagaaatgacaaattattctaaaactttttatacacaacattaaagaaccagggataaccaagataatcttgagagagagagaggaaaaaggaggttgaaagaattacactaccagatattaagacttactgtaaagcttattaagacaagtactggcagaaggacagaacagtgaaacaaaatagagcactgcagatacttaaaggtagctctgaacagcagcaaatatggatttttcttttccaataaatagggccgagtcagctgaatatctacatgaaaaaaataaatcttaactcctacttgtacaccatacacaaaaataagttccaagtgattggagatctaaatatgaaaggtaaaacaataaagccactaaaagataacacaggagattatcttcatgaccttggaataaagatctcttaaggcaacagcacaaatgctagaggaaaagatatataaattaggctactttaaagttaataacttttcttcattaaaagaagccatttaagagtgaaatggcagaccacaaaatgtcagatatttgcaatacatatatctaacaatggactcacattcraaatatatatgaagaactcctacaaataaataacccaacataaaaataggcaaggggccttgaacaggcactttataataaaaaggttataaaaatggcaatacatagatgaaaaaaaaatgctcgatctcatttgccatcagggaaatgctaattaaagccaaaacaaattactacatacccacaagaatgactacaatgtaaaagaggtaataccaaatattggggagaaggtgaagtaactttgcccatcaacagcaggatggataaattgtggtatattcattcaatggaatactacttggctatgaaatgaacaaactatctacaatctcacaaacgtaatgttaagcagaagaagccaggagtacatactacatgattcctttgatatgaaattctagaacaggcaaaactcattcatagtgattgttcagaaaaagagttaacacagcagacctcaggctgctgtccttagaaaggcctgtttgttaaggaccttgggctggtatccgggaacttggttggtaaacagttccatacacagaaataaaatttttcctaactgataatgcagctcaatgtgcctagactgcttgtgcaaacaagcacacctgctgaacacctgccatcccttctgggaatttggaattttattatatgccaggcagaggctgcctatgtgatcaggacccagtaaaaacctcggacactacgtctctaacggtcttctctccacagaaacacggcacgtgttgccacatttccaccactggggaaaaacgggctctgggtgaccccctcatgggaaagacggagcatagggaagcctatacatggattccttcagactgtgcctgtctttttccctcatgatccagatgtgtatccttactacaatgcaataaatcttcactgtgagtacaaccatatactgagtcctgcaagcccttctagtgaatctttaaatatggggtggtctggctccgcctcaacacagtgatggaatagcagatacatttggggagggtaacaactgggagtgggcacaaaagaggctactgaggtgctgctaatgttctatatctcaaacaataataaagcttccattcattctccctcttccccccaaaacctaactaatccaaggtatgtgaagtcacagtggctaccactggggagaatgggataatggctgggagaaccatgaagcagaggaagtttgggacgctagtgatactctattttttaaaaatcccggtgaaattttcatggatatgttactctgaaaatccaacatgatgtacagttatcatttgtgatcttctgtgcatatgttttttggggtttttttttgagagagaggatctcactctgttgcacaggctggagtgcagtggtgcaatctcggctcactgcagcctccatctcctgggttcaagcgattctcccacctcagtctcccatgtagctgggactacaggcacacgccaccatgcctggctaactttttgtattttttgtagagacggggtttcaccatgttccccaggttagtctgaaacgcctgggtgaagtgatcgtcctgcctcggcctcccaaggtgctaggattacaggcatgagccaccgcacgtagctcttctatgtatacgtttttacatgaataaaattataaaaattatatatgaccgggaggctgaggtaggagaatcacttgaatccgggaggtggaggttgcagtaggccaagatcgcaccactgcactccagcctggcaagagagcgagactccgtctcaaaaaaaaagaaaaaaaaaaaaaaatatatatatatatgaccacaataagtgttttcacatgtgtattcatatgtgtattatgaatatgtatatatatttatatacatacatacccacttacatactcgtctcaaatttttaccaatgcctcccctttcccagctctccctgtcattgttctgttccctgtactccagattttgtagacttttcccttagcacagtggaatgactccccaaatccatctgcttctctccatcaataacaccctggtccaagctaccataattttttacctggtctactagtatctcttccaaactggtcatctgcccttctctaaccccttctccgtgctgcagagcattttttaaagccaatttgagaatgtctctcccatgcttaagctttyagtggcttctcattactctcaggataaacaactgtgttcacttctatcctggggccttccctgcrctgtttactcagcctactacactcttcttgctgctttttatacacttcctatgcacagttaactatgactcagccttcagatcttagcgcaaatgtcatttcttgagggaaagttttcctgactcacatgtgtacatatatgtgggtgtatgtgtatgaatatgtatgcacacagaaaactccaggcatttaagactttccacctctccatgtataatatctcaactccctacatttatcttactatattattcccacagtgtaaacatgccctaatgtctcccatctttaaaactctcttaatcctgatcctctttatagcaaaacttgttaaagcatccatttggactgcatccacttatcttgttgtactgtctccttaatcaatgccaaggaggctcctactctatcccttttccactgaaactgctcaagaaaattactaacgaccctatcctgccaaatccaacggtcactttcctgtacagattttatttcatttttaacttttcttttttttttttttttttttggtggagtcttgctcttgtcgctcaggctggagtgcagtggcacaatcttggctccctgcaacctctgcctcctgggttcaagctactctactgcctcagcctcctgagtagctgggattacaggcaccccccaccatgcccggttaatttttgtacttttagtagagatggggtttcgctatgttggccaggctggtctcgaacccctgaccaggtgatccacccgcctcggcctcccaaagtgctgggattacaggcstgagccatcgtgcctggcctatcttttatttcatttttaaagtaatgagaagaggtgtcattatgttgcccaggtgggtctcaaactcccgggctcaagcgatcctcccgcctcaacctcacaaagtgctgggattacaggcgtgagccactgcgtgcagccactttctgtacacaccttaaacaccttcagcactagtcaaccatcactgattacttctttgttttgtttttgatgtttttccctcattggtttcttactaatgcagcatttctaaaagtgtattccaaggaatcctgttcaaagaattgcttctaaaaaaaaaaaaagagagagagagacagggcctcaatctgtcgcccaggctgtagcacactggtgcaatcatagctcattctaagttcaaactcctgggtttaagccatcctcctgcctcggcctctcaaagtgctgggattacaggcctgagtgactatgcccagtcagaactgttacatttaaaaaaaaaaaaaaaaaagggaccgggcatggtggctcataataccagcactttgagaggccaaggcaagaggatcacttgaggctaggagttcaagaccagcctggacaatatagggagaccttgtctctataaaaaattaaaaaattagtcaagtgtggtggcgtgcgcctatggtccccagmtacttgggaggcagagatgggaggattgtttgagcctgggagatggagactgcagtgagcaatgattgtgctcctgcactccagcctgggtgacagaataagaacctgtctccaaaaaaaaaacagggttccacggtcaaaaaagttcgggtaatacctattttatcctgtcctacctgctcttaaggttttagacatttctgcagggcctttaaaaaagttagctaacctctctgtacctactttggtcatctgtaaagcaaggactacctcaaaatttactgcaagggtaacatgaaataatgtatatataacagagaagtatataacagagcagtgcctgtcacaaagaatacactacgtaagtactgttccagcctgggcaacatggcgaaaccctgtctctacaaaaaatayaaaaattagccaggcatggtggtatgtacctgcagtcccagctacttgggaggataaggcaggagaattacttgagcgcaggaggcagaggttgcaatgactggagatcgtgtcattgcactttagcctgggtgacagtgagacactgtctcaaaaaaaaaaaaaaaaggaaaaagaagtactattattacaactcaccccattgtttggaagattaaatgagttgatatgaaagtacttcaggctgggcgtggtgtctcacatctgcaatcctaagactttgggaggctgaacaaggggggaatgcttcagctcaggagtccaagaccagcctgggcaacatggtgagaccctgtctctaaaaaaaatttttttcaaaaattagccgggggttgtgatgggcacctatagtcccaggtatttgggtggctgaggctggaagattgcttgagcccaggwggttgaggctgcagtgagccatgctcctgccactgcactccagcctgagtgacagagtaagacccctcaaaaaaaaaaaaaagtttgaaatttgctgctcacattttagagcagcaattctcaaacttcatagtcccaggattcctttgcactattacattattgaggactccaaagatcttttatgtggattttacctaacaacatttatcagaaaaattttaaaaatatttattaattcattaaaataccaaccttatgttaacacaaataacgttttaataaaaaattgcattttccaaaacaaaaatatttagtgagaaaaatgacacttcttcatttttgcaaatctctttaacgtccagcttaacagaagacagctagattctcacatctgcttctgtatttaatctattgctatatgttgttttggttgaaatatatgaagaaaatctagcctcataacgatatgcagttaaaaaggttattacaatactcctcttttttccatataattgtgaattctccacaagtggtagtttcttcaagattagttgaaatgtgamatctgagaccagaccaatgagctttttcatgccctagtacataaaaaatcccatagtctatcttgcacttttatccatgtatgtctctgtaaaaccataaattggtcatttggaaaatattagttcagtgagttatacataccatataaatgttaatgcaattcattatacaaaaaaaaaaaaaaacacatcagtatcatcagtgatctcaccagaaaagtctttaagtattagagagctgtcaagctcacagtggcacataaattttccaaaattctaattttcaacttgaatgctcaaattatcagttgttctccttgaagtggcaggcttgtttatttctgagaaaatgtctactgaacactcagatctgaataatatttagaaaattctagaaaacacaacacaaaatttatcaaagcaatgatgccatcatgttatgtagcaacccaaaaattccactgtccactcctgagagaccaaatatgaaaaatgcaaataatatcagtgttattatgaaaatagttctgacattgtggactccctgaaaggatcttggggattgctatggtctgaatgtctgcatcccctcaaaattcatattgaaacaatccccagtgcagtggtgttgggaggtggggcatctgggagatgacttaggtcatgacggggaagccttatttgccccttccgccatgtgagaacacaacaagaaggcaccatctaagaagccaagagtgagccctcaccagatgccaaatctgctggtgactttatcttggacttcccagcttccagaactatgagaaataaatttctgttgtttaaaaatcacctagtctaaggtattttgttataacagcccaaacaggcaccctcacgagtccccagaaaaccactgttttacatttcacaaagtagagcacaccagctctcaatcagccttcattaaattgccagaagaaccttggragccctcacccatcttgggtgagttagtactagctgcctgaggaggaagaagagagcttcaacgcccatctcactctaatcagagcaattcattagctctacctgtaccatctcctggtttaggaagagctccactgtgagctgcctcacagtggcaagccttggcattaggcaagccaccctggggcaatcaagacttaggctttttttttttttttttacttaaaccgtgtcactgacctaagctgggttgattatttcacttttttaaaaaagaagcatattaatgccacgttttctaaaacaataagaactattatggtatgtgattccacaccatacactttattaattacactcttgaagtttaaattatttctaaatagctgtttctaaaagcatgcatggaatttataactgatgactgggaaatgtactgttttaatagcattaaatatattcatctttattgtttgttaacaatgttagcatttgaagactagactggcaatgtcaccttttatcaaccttccctacaacctgtttatagaagaaaaggtgggggggggggtgggttagaactaataaccctaaaaatactgttattaattcaataacacctctggaaactacttctttgttataaataacactgggcacagtgaaatggaaactatcaaatacagtagaacttaaaatcatgtagtacgaggaggtttgatttggataaaaagaccttgaacatattaagttaaacaagccagacataaaaggagaaatattgtatgattccaccaatatgaggaatctagaacaggcaaatttataaagaccgaaagtggattcgaggttaccaaaggctggaagggcaggggaatgggaggttattgcctaatggttacagtttttgtttgggataaatgaaaaagttttgaaaatagtggagaaggttgcacaacactgtgaatgtaattaacgccactgaattgcacacttaaaggttaaattagcaaattctgttgtattttaccaaaattttaaaaattaatgtatataccccaaatcgtacactttacatgggtgaattatatgtgaattgcatctcaataaacatctttttaaaaagaaattcatgatttggtcttgaagcattcaaaggagtctaacgytgaaaagggcagagacttcgtgtgatcctgggaacaaaactaggacctccaaggcctcaattacaggaggcagatgtccactcaatacaaggaagaaacaacagccaaagcrtccagaatcatcacgtgtcttctcacaaaggggaggactatcattagaggtgttttagcaagggcaaagatgcccatctgtcaggaatgcacagggcctataaaggcccataaacatctttgtcttcgaatgctaaattgtgtctatgttttttttkkttttttttttttttcaggtaagagtccttatgctagattctcaaaagggataataaccctaaaaatgataaaagtcactattattgagaaaattccagtatttcaagtgagatttcactagatctaaacacttctttcaaatctgaaactgtaaacccctatagactatactccycttaaggagtgtagtcaaaacaggattcactacatattaatacaaatgacctgtggtccasaactgactaggggtgccctcattatggaagtgaaataaacctgtaagaatgtctttgggctaaaatttgggtaaaaggaagataacgcataatggggcaaggccaagtcagactaagatgctcctctcctctgttcccaactgctactcctcactgtactgagcgagttctttcccatgtctcggaacttaaaacactgggaatgccccaggactcaatcctcagatctgttctttgctcactccttagataaccttaacccgtaccacggttttaaataccctctataaactgagaacacccatatttacaatttccggtttgaaagtctctgaatttcagacttgtatatcctattctctcttcaagacatctattttctttgaggtgaaattctcataacataaaactaaccattttaaagtaaaaaactaatggcaattaacacattcatcatgttctgcaaccatcaccactacctaattctaaaacattttcatcacctcaaaaggaaaccttgtaaccattaatcagttgctccccactctccctttcgcccagccccaggcaaccactgatatgctttctatctctatggatttacttattctggatatttaatataatagaatcatacaacatataagcttttgtatctgacttctttcacttagcataatgtttctgaggttcacccatactgtagtatgtactggcacttcattccttttcatggctaatatttcattgtattgatatacattttgtttatccattcaagcactgataaacgtggcttgtttctaccttttgactattgcgaatagtgctgctatgaatgtgtgtacatttggtttttttgaatatcagtttgcaattctttggatatacgcctaggaatggaattgctgggacacacagtaattctacatctaactgccacttgtggttttgatttgaacttctctaataacgagtgatgctcagcatcttttcatgtgctttttagccatttatatcttctgtttaaagaaagaagtcctttgcctattttaaaattgggttgtctttttgttgctgaattgtaagagttctttatatattctggatactggacccagatcaaatgtattatttgcaagtaccttcttccattcttttcactttcttggtaatgttctttgatacacaaaagtttaattttgatgaagtccaattagtctatttttctttttactgcatgtattttggtgtcatatctaagaatgtggtgccagccaagcacggtggcttacacctgtaatcccagcactttgggaggccaaggcgggcagatcacctgagatcaggagttcgagaccagcctggccaacatggcgaaaccccgtcttgactaaaaaaaaatacaaaaattagccaggcatggtggcggatgcctgcaatcccagctacctgggaggctgagtgagtagaatagtttgtgaacatcggtggcagaggttgcagtgagctgagactgtgccactgcactgcagcctgggcaacagagtgagactctcaaaaaaaacaaaaaacaaacaagaatgtgctgccaaatctaaagtcatgaagatttatctgtatttttttcctaaaagtttaatgacatagctcttatatttaggcctttgatctcaataaaagtataggccatttggagttcatttctgtatatggtatgaagaaagacatctattcttttttttttttcatctattctttctttcttgagacggagtcttgttctgtcaccctgactggagtgcagtggcacgatctcggctcactgcaacctctgcctcctgggttcaagcgattctcacgtcttggcctcctgagtagctggacaggcacgcaccactgggctcagctaatttttgtattttttaatagagacagggtttccctatgttggccaggctggtctcgaactcctgacctcaagtgatccgcctgcttaggcctcccaaagtgctgggattacaggtgtgagccaccatgcccggcctagacatctattcttgaatgtctatcaggtctctcaaacccaaacttctagtattcctctaccaaacctgctcttcccagtcttccctatctcagcaaatgctcacgttaaaaatcttgaagtcggctgggcgcggtggctcagagcctgttctagcactttgggagaccgacacaggaggactgcttgaagccaggagttcaagaccaacctggccaacatagatttttaaaatcttgaagtcgtccttaagttctctttttcttttacaatctacctccaaaccattagcaaatgatgttggcttcaccttcaaaccatatctcaaatttaccatctcctcctctattaatctggattattacaacagccttttaactggtcttccggctttcacctttgcctccccacaatctaatgagcagccactgatcctgttaaaatttaagtctctgctctaaacccttcaatgacttcctatttcactcataataaaaaccatagtgccttccaagacctacaaggtcctacctaaagaatttgcccctaccatacacacacctttctggtctcatmtcacctctctcccagtccctctccctggactcctggttgccctgtctttgccttctttggaatgctgctgcccaaggtatctccatggctggccccttcacctggtctttgctcaaattcaccttcttagtgaggccttctctaatcactgtatttaaaatagcaattgtgcgtcccttgatactacttattcccctaccctctaacctttgtttatttttctccacagtatttatcatcatccgacacactacgtattttacttgtttattccccccccattagaatgtaatcttcatgaaagcaaggacttcgatttgttcatctgtaacccccactgctcacaacaatgccaacacaagtagaccttcaataattaattgaactaattaataaataacataaattatagtcgcccgttgctgcacctgttcccttactggactgagagctttctgcaagcagtgacacccttattcacccatgaactcccagcacctaacatttgcgctcggcacatagtaggcattgattttaaatgaatgaaccaacaagacaggcctatgaaacatctcagcctttcaaacacagtccctatgctatcattccctaaatatgtcagtgtgtgggggttatccgaaggaagaggttccaataccaatttccacgccctcacgcgtacaccctctgttatccctacaatacccaagcgagaaaatgagtaacggtgacagccagaaaatgaatcctgaaccgtgcaatgacaagtccgaaggagaaagcagttgcgatgagatgaaagaaggtagcgggactcaaaacagaaacactgtcccgggggtggtggcaaggagagggaaaggccccagtggccacaaccatagagtcctgctctcttttgacagctaaggaaactaacgcccagagaggaaagcgactcccccgaggtcacacagcaagtgagccacggcgagaacccacagcatcccgcgtccgcgcgccgccccagctccctcgcgtttggggtggtgtcctccgcgcagagcccccaccagcgcacgtgctccgaggtccccggacgcccgcccgcccacggctcggggccggctccccatctcggtccaacgctggggtcgacggcagtgcgctgcgcccgcctcctgcgcccctctcagccagcccgggagcccgccaggggccggcggctggcagcgctcaccgcgaaggtgggcccgggccgcccgctctgcgcccgccgcttacctggcagggtcccgcgggaacctgaagaaggccaagtcggactgcgtgctcttccgcgtgcagttgggggcagcgcagaagttcggcatcgtcgcccgcccgccggccggcccagccctcccctccccgcctcctcagggcagtccgcccgcccgtcggggccggggaggggagccaggccggccggccggctcggcagggccgacgcgcgggggaggggcgggcgggctagaagccgcgagggccaggaggggtgccgcggtccgaggccgggctggggacgcggctccacagtgctgtgagcggccgggaggatttaccgccgccgccgccgctggtgcacctcccgcccgcccgagacgctgccgcctccttcccacaatgcaccctgacgcccgggggtgccctctcttccctcagccttcctcccccgcccctcctttccgccttctcagcaggcgggcacgcgcaaggaagcgcgcctgccggggtgtggcgaggcggaggcgggacctggcgcgcgccgccgcagtgcgactgcgcacagtctaatccgcggggagagagaattgcgcatgcgcgcctgtctcccgggacgctagagcaggcggttcctgggctgctccggtaggtttggcgtgcgcgggtttctgcagatctagggcgagcttgcacgttacatcaccgatgcatctcttcttgcttgcttaatttgccaccacttaggcctttcttgcagaattcgccatatactccttaagggccgcggaatcggagcgaccttggtgactggcaaactctcggcagatgtgcgtgcactggtttgatgcagacgtggttgtaggcgatttaatttttcccagctttgcagcgactgttggcttcccagaacggatctccccagcctcgactggaagctgagggacaaaaattcataaaagcaattactctttcccggcgaggcttctagaagagcaagaagagcgatatgattacacctgcagccctataaagattgatctgtccgtctttcccttacagtcgtggcctgttaaacgttcctgtgttgttcagtgccagaatgagtgaccgctatttagaacaaaggattagtatcaaattttgcgtgaaattgaacaagtctgcaagtgagacccaccatcttttaaaagaagcttatggggatgaagtcatgtcaagggccagagtttttgactggcacaaaaggtttaaagaaggacgggaagatgttcgagatgatgcccgaagtgggcgtccagtcacccaccgaacagatgacaatatccagaaggtcaaggacttggtttgttcaaacaggcagttaaccgtgaggatgatggctgaagagttaaatttagacaaagaaactgttaggctcattttgaaagaaaacttgaacatgaggaagatttctgcaaaagttatttcgggtgttttgaagggtgagcctaaaccacgaaaacttgactttcggtccgatctttcaaaggaaactaggaaaaatagctcatgtttgaggaaaaaggtaacaggttctgaaacatggagttatctccagggtgaagctggtggggaaatgcccctgccggtatcccatcccagagtccactactctgccagtcagcttctgcaggcgtcatcttcaacaagccttccccccagggtagctgagaattggttcaccccatggtgagaggaatgtgagttagctgaaccagaactaggatgctgcctcactgttaggcaccttctttggctgctcacgtatttttcagtcttcaccactcctccctatgtgccatggccctcctcattactctttgctggactcttggaccattttccttgctgttctccataactttgaaaaacttttggctgttcccttctggtatttgcttgttcttgatttcttttgctcaacaagtttggatttcttctctgcccagaccttagcttgttgtggctgtcctgttcctttgttctcaaccttctgcctcagaggatcatgccagtgagaagagaggaacaggatctcctggaatctgtatctctgtgcccagggaagcatgcttttctgggaggaccccaaaagaaggcttacagtttcagcctgctttgcagtcagggcctgaggtatggtacagaaggtagtagcatgctggtattactgaacagtgctgggcctaggggctgatctggcccagatgactcagtaggcacccttaggaatcaggggttggccaccaatactgatcttctcacaggcctacacctcacagaagagctgggtttgtttcattctagtcctatgctttggacctccactcatttgggtatcacccctgttggaagaggaggatctggtgctagaaaatataaacccggggacccaggcaaggctgtgttgtgtggggaggaagaccaggtggctctctagtccctgaattaagggagcctgctgcctatgtgcggattcccacacagcagcctgtttttagtaactaatgcctatagttttgagaacttgctgtttttaggacactgctgggcattgacaatgtggaggttatgaacaagatctccaagggctgatgggcttcatggatgagatggttcttgaactggatccatgaggatgggtgagacagggctgtgaaattagggaaagcttccggggcaggtggaacagcatgaggcttccaacctgcatcagtagaaaatgacactggccaggtgtggtgaatcacgcctgtaatcccagcactttgggagactgaggtgggtggatcacaaggtcaagagatcgagaccatcctggccaacatggtgaaaccccgtctctactaaaaatacaaaaattagctgggcgtggtggtgcacacctgtagtcccaactactcaggaggctgaggcaggagaatctgttgaacccggaaggcagaggttgcagtgagtggagattgcgccactgtactccaacctggcgacagagctagactctgtcccccaaaaaaaaaaaaggaattagaaaatgatgacactattggctaaaataacaaagtttaaagaggaagataatggtgttgcagcagatgaacaatttgggataatttgctttctctcctaagcctccaactctatgccacttgttgttaaattgcttcccctgagtctgtgaataggtttgtaacaaccaatttgatatctgattttccatttggaccccgacaagcagtttctgcaagttcaaactctgtctcttctcttcctgcctctgccaggatttatggaatggaacttttcccaagtgggttccaagtaataccacatagactggaaacattcagggggcaggggtttggtaatagcatttcacagaattggccagtctttgttttactcaaggatttttagatataacagctcctcttaaacaatattgcttgatagtagaggcacaacactcattcatcacagttacttttagtgctgttctttcactttctctactcacctccaaaaattacaagttcctcattaacacctgtttttgttttgttttgttttttgagatggagtcttgctctgctgcccaggctggagtgcagtggcacgatctcagctcactacaacctccgcctcccaggttcaagtgtttctcctgactcagcctcctgagtagctgggattacaggtgcatgctgctacacccggctattttttgtatttttagtagaggcggggtttcaccatgttggccaggctggtcttgaacttctgacctcaggtgatccacccacctcggcgtcccaaagtgctgggattacaggcgtgagccaccacgccgggtcaacacctgttagttttgagacaccttgaaagctagacgttgtcccacaaagagaagatactgtgtaagaaaactcttaaaccaaacaacagcttatagacctccagctccttaacagtttctagacattccatttcaggacaatgaagtcttcctacatcagatgcggctctaggttgcccacaagcacttggcaccagggacactgcactttaggaacaaagtccccaccactagttcttgcagctttgttgctgaacctcatagtaatccttgctaaggcctacccagtggtaattgttgcagatttatatgctcctggtcccaggccaggatcccacaaccatacctacaggagttgtttctaacctgttattaaacagaggtcctgagacaacttacttgtggattttattccagtcctatgaacagggctggtatgtccctgccagtgatgctggaccaagacccatggtggagtgtagagtaccagaagctatgttggtccagacatggtttagacacagcaaccagaagcaggtaattaggagtgtgaattcaaatggttccaattggctataatgaaaaggacttatccagagcaaaccattcacatttggctgctcagaatttctaaacccaagggtagagcatgatctgggcatctccaaataggaaagttcttatatgagtactcctaatgtgtccacccaccaaatctattttattgctgatgcacgttttgccctggcctgcaccttgctgcctaggcctcttgagctcctggtcccgtagtctcacacatccagctatgtgtccgtcacaccccaggctcttgtccttgactatcttcagacacctctcagtttattcttcacagtttgctcttactcctctctttccttgttgctttgttttctggtcctgggtcacatcttcagtagctgcttttggtcactttggtgtgctgatccttgtattgacctttgggtcatggttttccacttaacttacaactcttctctgattttttggatccttctttcagctccccgcttcagctgctgagtaaggaaattgtctgctccagccctggccccaggttgccttcctatcttaaagaagcagggtggggtgacatgggggaattatgtgttgattttgttttttctaagggacatgggcaccttagccaccctcagttgcactccccagaggcacccagtgtcaccagtttctcaaggaggcaatatggttacctctagtagcaagagtcatgaaacttcttcagagttataacatccaaagcccattctcctagcaactgtattttccctggcaggagaaactccacctaaccacaatagatcaagcctggctttctgtgggatgtcagtaggagagctggccatctgcaaactttctcaagcttaacaccatcggtcaatgactccgtttggctttcaggttgatctttgtccccgcccccacgctcattctaattcaaagtccacatggaatgttttatgccacagctgagcgtctaagaggaatacatgccttctggggcagatcatcctaacactgattttatgcaattctccccttccatcaccccaccctaccttgcttcatttgccccactagtaatgatcaaaaagagaaagaataaaatgttcaccaaatctgtgacttagaaaaacatgtggagggttctgccatcttctgaattctgatcctcactgagtcctcattgaaatgttatttggggaagaatgtttacctggggcctccttcccagaaactttttttcagatgaatttctagtcaaagactaagacttgcctttggaaatgcctggataaatctggatgctaaatgacttgaggacacctaataaaggaatggggtactattggggaattgtctgtcattgcattacaaatgctgctcagtctccctgctatttgcagacatcatcaccagagagtttcactaggctcgttgggattgggtctcagcaaggtcccatgtgactcaataagagcccacctttgctgctaaattgtgtatgttactgtgcattctccaattacttcttcttcagtcagcccacccagattttaccaggcgtttatatcttttctgaggtaaccatcatgtatttatgttctacagtgtctcccttatcagatccttgcaaatactgtcctagttgaatcacccctttcccagtattaatatccggaaacaaaaaatctatagtggggagctccagtgggtcccctccaaggactcacttgggcatagtccagtggtcaa

SEQ ID NO: 97193 - DNA, 12286 bp, Homo sapiens
aaggtaaattcttagtcatgtctaagttcacacagagatacaataatacacgtgggtgtaatacaaagcattatagtattttgtatagtatctcctttgttattaaaagttcttttgatatctttggtaagactcctattgatttgaaaaatgttactgtgaaaaaaatgtgctttaagagttgagaaagtaaattattcctttttttctctcagcagctgtttaaggaagacagagcaggcattggataatattcttattaaggtaaagaatctgggtgtttgagccctaaagtcatacagcaagtagtccacctggaatcatgaaccaggtcttcaggacttccagatatttgtgctgtatactatgctgcattttcaacaataattcatttatctgtgggtttgatttaatgagactcatttattcaacaaatatttattaaatgctattcttgccagtcattgtgttaaatgatagtgtaacacagtaaacaagacagatatctttccatgtcctcacgaaaccagcagctttggaactaaacaaataattataactaagatgagcattaagggagaaattgtaagatgataggaaagaatataacaggcggacttaacctgctctgggatggtgggggagtgttgaatgtgaactgagggtaggacatgagaaataacttttgggctgagattggaagaatcagcatgagttagcttaagcctaggaattaggagaagggttaggatggaacattgcaggcaacagaaatagcatctacaaaagtaaaaggaagaactgaaaagattccagtgtgagcgttgaaaagaaggataagtaaatgtagagaagaatgtaggaaagagattatgcattcttcaggattttttgacctatatcctaagggatattgggaaaccatggaaaggttttaagcatcggggtatgccatgattaaatttttcatttgaaaatcatgagtctgactatagtatatatagaagcattgttgttagatgctatttcggtaggccaggttggagatgatggttacagcagtggagctggagagaagggaatagatttgaaatttgggatgtgaacaaagccttgtatttgacagaaatgtaaaactattaatagtattgttattgttccacctatagaatctgattataagattatctctaaaatactttcaggtaacttgtacttaatgttaggaggaagtgactatattataaatataatttagaaaacatcgttccttaaaaaataatttttgaattgtgctaattcttgttattgtttgacttcattaactaatatagggagtatagggagaacttagttttaaaagataatttgacttcctgatttatacataaaacacataagtaattttggacatatatgatgtgtatatatatatatatatagtgcaggtcatcttgtttacaccacttattaatgaatatcagatttggaaggtgactctttaggattttcctattggttgattgattgaaacttacatgaagaatttaacccttttgtttcaaatagctttctattaagaaacacttttttcatgattattcagagaatttattgctggatcattggctctagagatagactgctggttaaattaaaagatgccggaggaaacattttggaaacagacttcacagaattccttatgaacttctgtactttcttaaccaatcttatttctttcatgtacctatggctgttactagcctgttgtatcagggataccatagtcaactacctatacgggccttaactataaagaattaggccatttagggaaataataatgagactggggctttagagaatttgtgctcatctaactgagtagagggacagctaatattctgctccatctgatggtgatcatgggagtattcaggctgattgttacccaatatttcagtttttccaaaggatcctaaaatacagatttttatgtaaattagttggtaattaatttaggtgtttttaagatactctgtgacaataactctacagggcaaaatcgacctgttaaatatatttggcccataggctgttgttttatagccttgaccatatagaaatcttcaatatctatttaaaagtaagaggtcaaaagtatttctaggaaaagtgaatgccaaaagaagggaggaagggaaggcataaatgagatactttttaaaagaagtacaaaactagttatctaggttatatttttaaactaagttcaaaaagaaattcactgtcctgagaataattttcatatgcttcagaacatacttctagcaacttcagccatctgcgtgtgtataactgggaactcagagtaggatgagaatgcacagggcgtagagaaccaatgaactgtagatgagagtgtagtggttctctgaaactgttgtgagcagagtacagcaggaacaagagacagttgatattggagcaaaatcaggctataagaacatagcgatctgagtacatcatgggcccctgaaagcattactagactaaaagcataattttttatactgatgatcaagaagaggtcatattggtacactaagattgaataactctgctcccaatagcacatgtaatacacaatcactgtaggaaatcaggaaaatatacaaaaagtagcatatggtttttttttaaagctaggaatgggtaaaattctaaagttttctaaaagtaatgaaaatagaacttggcaattgttagtttcctaatagctaattagtttccaaattagtctaatttggcttaaataaaaagaatattggttagctcacataagaaaatacatatattaggattagttacgccagtggctcagtgatttttttcaaggactcagtttgtcgtctactctactctttatccataatatttcctttatcccaacactgtagttgccaaatggctgctggctgcaatcaggattgtgtgtttcctccttcagatccaaagagagaaataaacttctcttggcgttctcatgggcaatataggttcttttctctgagaagtccttatgcactcctgcccccaacttgctccttattgtcctaaattagcttaattctaaatatgccttaactaatcgttggcaaaagggatgagcttaccataatggattagattaattgtggtctacccttgcagctcaggacagtcagcttaccctgaggcgcattgaccactgggagagatgtggatatagaaatccaatcatggatcattaggaagaaggaagcgttggataggctctcagcatggtccaccacagttgcattaaggattgtgtattacgttttttacttatgtgaaacaccaccttcccccatcaagcctgtaagtatgaagtcgagtccctagtgaatctactctctgactcctgtgtttcaagcaccctcattagcagagcttatatagttcggagttgaagaatttttttttcccaaaaattctcttctcatttaatagacacctgtctgtagagtaaactatgcaggccataaatggaacaaagatagtttaggaaaatacagtttcttaaataaattacttttaaaaagtatattttctctcagctcttctctccaaaggagttttgtatcataacctctgtagtaaatagtgtcatctttattgtctgattataaaggtgaagtataatttatgggataatttacaaagcaaaaaagaaatacttatttttaaagtttaaaaattttctgtgtagaaaatactataataatgcatgattttaagaatctgttattttggctaaaatatttaaccagccaaccatatatcttatttctttcagttgctagatttctgaatgttagccaaatattttagtatctgggtcacatagtcattacaaacaaatgtaggccaaaatggtttatgcttctcagttgccagctcagttctctctttgactttttattatttgtttctctttgaactaaactttatttacttatattagcacagtactgtgttaattctttgtgtagaactggtcttcttgtgtcgttttgccccaaatcaaggtaacaaacaaataaatgactgtgctcttggctgttatttagaattgttactatacaaaaggtcacacatgttaaattacctactgcagtgctaattattgtgaaaccttgttcaaaatgctagagagactgtgttttggcacttctgctgtaacagtttttaaagatccaacctgtatgcattttggtattgaaatcctcaaaactcctaaagaccctatgttaatttaaaatgcaaagttgtctcacctttttatactagatgagatagcatttttcttaaagtaaaatgagaactcttatgtgttatgatatagaggtaagggcagggaaagagagggaaagaagaaaggagtacattggagtaacaaaaattccaccttcatttataaagtgctataggctctaaaactccattctgaaatactcttttaactttgaaaggggtatgtttactgccagcttctgttaacacaggaaccatggtttttctgttcttaaaattaagaaccttataccttttggaatttttaatatttttctctatgtttgtaatgcttttaattatgtttattactaactgatgttattaactatatttataatttgtacactctattctgtttggaaagtacaaaatgataccatagatacttcctgaatttttttagaaaaatcaaaattttattcatctttattcatagcatcattggacattcagttagtaaattttccagataacaaacacctatcttctttgattgctagaatagttaatctcaacccctcttgttataaaatatagtgactgtggattgttgatgaaaatttcttaagacagtgtattcaggaagacactgcctcagggctactgaggtatgtcatagggccatttgtcctttcaaaaataattctcagtagctattgttgctttgcatttgtataaagtgtctgttttttcaaagcttgatattaattctgatagctactagtgtacagagaagggtgtctgtgaataaagtaagagaaagaatgttcataatagatttgaagagcacttcaatgagtaaagtacttggactttacaatgtttgcttttacttcactaagtcctgccctgtgcccctgctcctgcccctttatgccatagtctcttttttaacatggtacttggcagtgttccaggtagttattgtaagaaggatgagcttagacttggagctagacaaacatgatgggaattaaaacaggataatttaatagctgtgagaccttaagcaagttcacaactgcaaaatgggtttgtatatactatctctcacggttgtaaggattaaatataatggatatagtttaggaggtattttaacaaatgctagttcctttccttatactttaagataaatgacccacttactttggaaatggtatttgcctattttagtatgatgctataaggtttaaagggtcagtatccctaaaatatgacagctgttaagatctctttaattattcagaaatgaatggtatgtgacaagatattattggttaattcagtggatcagatgaataaaatgtgctgaaatattttggagactgaaaatataaatttagatgcaagaaatatattttaaataaacatggaaaacagtttttttatccgagtctaatcacgttgaaatattttatgaatatccccagagagttcgtaaattagtgagtgatttttttaaatgcaaaggtaaatacctagaaatcatatatacacttaaagtaaaatctcacagagttctcaaggccattttgcatttactagtgccacagtagtggcgttacagtgagctgcagtaacctgaaacagtactgcatggatgctctaataaattgcatgtctggaggaagcagctaactatggcgaccgccacggagcagtgggttctggtggagatggtacaggcgctttacaaggctcctgcttaccatcttattttggaagggattctgatactctggataatcagacttcttttctctaagacttacaaattacaagaacgatctgatcttacagtcaaggaaaaagaagaactgattgaagagtggcaaccagaacctcttgttcctcctgtcccaaaagaccatcctgctctcaactacaacatcgtttcaggacgcagtcttgctctgtcaccaggctggagtgcagtggtgcgatctcggctcactgcaacctccacttcccgggttcaagccattctcctgcctcagcctcctgagtagctgggactacaggcacaagccaccatgcccgcctaatttttgtattttcagtagagacggagtttcaccatgttggccagaatgatcttgatctcctttttttaaattaaaaagtaaactttaatgtcgaaaatgcaaacctggggagggcagaaagatcacacacaaggctgtcacttcacacttggaaggttgcacagcagccaggcagagaccctcctcacttcccagatggtgagggggccgggtgggggcactcctcacttcccagacggtgcaggggctgggcagaggcactcctcccttacaaatggtgagggggctgggcagaggtgctcctcactttccagacagggcggcggctgggcaggggcgctcctcacttcccagatgggacggtggccgggcagaggcgctcctcatttcccagacggtgaggaggccaggcagaggcactcctcacttcacagacaggacggcagcagggcagaggcgctcctcatttcccagacggtgaggaggccgggcagaggcactcctcgcttcgcagacgggacggcggcaaggcaggggcactcctcatttcccagacggtgaggaggccgggcagaggcactcctcgcttcgcagacgggacggcggcagggcagaggcgctcctcatttcccagacggtgaggaggctgggcagaggcactcctcgcttcgcagacggggcggcggcggggcagaggcgctcctcatttcccacacggtgaggaggccgggcaggggcactccttacttcgcagacaggacggcggcggggcagaggcgctccttgtttcccagatggggcggcggctgggcagaggcgcttctcacttcccatactgtgaggcagctgggcagaggtgctcctcacttcccagatggggtggaggccaggcagaggcggcgctcctcctcaattcccagatagtgggcggctgggcagaggcgcgcctcacttcccggacggggcggtggccgagcagaggcgctcctcacttcccagagtgtaggggggccgggcagaggcactcctcgcttcccagagtgtaggggggccgggcagaggcactcctcgcttcgcagacgggacggtggctgggcagaggcgctcctcacttcccagacagggcggcggcctggcggaggcactcctcactgcccagacggggcagggcctgggcagaggcgctcctcacttcccagactgtgaggctgctgggcagaggctcttgtcgcttcccagacagggcgggggccgggcagaggcgctcctcactgcccagatggtgcggtggccgggcacaggcgctcctcacttcccagatggtggagcagcagggcagaggcgctcctcacttcccagatggtgcaggcagagatgctcctcaggtctcaatctcttgatctcctgatccgcccgcctgggcctcccaaagtgctggattacaggcatgagccaccacgcctgccctgccgtgtcttctttctcctcctaagcaactgtcttagtctcctgaattttgatattctacttaacactctcatgttcttacgcatgttgccatgctggaggcgtccttctctttgggaagcctgacccaccaacagtgcctcaggagatagacatggaagctttgccggtgggggccgctcgtctctatcacacctcagttgcaggggaggggtcggttgcagctgcagcggtggccccgacagttttcttttgtgggacctgtggccggcagctctgggtggagaagacctacttgatccaagagctgcaggatccttgggctgcatgtcctcccccaccatcagcaagcctggagagctgggcaggtggtcttcacccagcaccttcaaggccgccttctctggccacagggagcagcccggaactggggcagggagcactgttggaagtgggtcaggcttcccaaarggaaggatgcctccagcagggctgtgtgaactggcgactccatggcccttggagtagaaactcactgcatgcacctgggccttgtcagtctgattcttttctgtcaagctcttgaggtggacatttccctccaagggcctgggattgtaccaggaagaagtgaggtttccctgagtctccaggggcctagaggtggaggctgcttccccattgctacaggggccccttttattgtcctcctgcccctgggtctctacctggtctttcacctctgttgcttctttgggctcttctgcgctcacctccgtcttcgggagcctggctgggatcacctgatcatctaatgaaggaagttgaaggttaaacttgcctctgagacaagggatccttacggggctgaggtgtccaaacattatggagttgtgaggagacagcacgggtttcttccttgagggggggctccagaccacaggacgcaggaccctctgtggggtgcccgtgttccgagggataagacacagcctcataggggcgccrtcccacctgactggaaaagaaggcccaagatgtcgctgacggttgaagaggagtgggaaacggcccacaattccccgggcaggcacaggtgcaggagctgcagggtgagcccggccagctgggaaggcctcacggacaagacgagcaggttgccgatggcatggccaggacctgcggcagaaccaggaacaaaatacgcttagcgagttgcccattttgagtgagttgtgcacagacgaaactaagggtcagaagcggagaggatactcctaagtcacccacttctctgtggctgggtgcacactgggcatctgggagtttatgacatcactatggggctggtgacagagccagtgtgtggaggagtgcttaggagcccagcgagggtgcctacaagaggagtcaaagggcaaagggtgagacccttccaccggtccagctggactctagcctcagggatatcctgctcctgggggcaagtgtgtggccctggatgggcccccctgtggggctgttgggggtgcgaggctgatccgccagagcccttccacctggcgcctggcccaggtgctggctagcacccagtggccctgttttggccggccctgtcccccaggttacagggccagaacctggaagcagagcgcaggaccagccagatcgcgccaggcttccccggggcctctccagtgcctctgtgccacctggagccaggcccgccttctccatggctgccgtggcctcaagggccaccagccttgctccgcaggtttccaaagagaggacgcagtgccctgacctgactggatgcacctcttaccacatgcctccctggcaggcagggtctccactttttacaaatttgcctgagaccattcctcaggtcattcaggtggtcatggcccagccaggctttgaacccaggctgtgcgattccacagctggcgctctggcctgtgtgcctcatgatcatggatacagcatctattcttattttttcatgtagtcctggggtacttagcaccgtggcatatctgtaataagcacatgcacacctcgaaggaggtcttcacttcaacatacgagttgaccatggcatgctctgggctccagtcctctacaaagacgtagggcaggaactaccagttgtcagcacagcaccatcccacattgctcttctaatggagcctttcaccccagatgttctttctcgtctgatgggaaggatccaagtatgtaaagattatgttatagatcagctttggtctgtcctaaaagaaatttgccagtggattattccatatggataaaagtcagtttctctggtcttcctggaatgtgtctagaaagcaaatagattatttacaagttcatagtagatcaatgtattggattaaaatatgacaaacataatttggtcattgtgagcatgccagcttggtcaactattcaccacacatgatgccctaaatataactctaggttttcttatgcccaagagagggacatactcttgggtgtctggactagggaaacatgtatgaaaaaccatttggccactctacatcttgttattggagaattgaaaccatctatattcaaagatattattaaaaggcaagaagttaaaaaataaaaaaataaattgcatgtctgttgttatggaattttataactgtacataccttttatttaatccattcacaggtcatattataggatatctttcatttaataagtatactaaatccataccttatactgttgagttttgatagtaccagagggaaaaaagaagaaaagcatggcctctatctttaaggagctatttaacagtcatatgaatcactcgattgagaagatccatatgtgtaatataatgaattccacaaaaattgcttattaaaattttttgaaaaagtaggggtgagattgaatatagcaaagctttattgttgatttttgttgttggccaggccaaatttgtgaacattttacatgatcagctatatcgaaatacatttgtatgctctactgaatatagggaacataatttaatatttaatttaaactccaggttaccatcatttacaggcattctgtgcattaaaccgttttgcctcttctttcttcctcagtaacacgtttagggccttttgatgcattggaaagaaaaggcagttgcgagctgctggctctagcaaatcagagctaatcaacctgagaataatgtttgcactttcccgctttcaagtctttgctcaaactgctctctacctttgctcccacaggttagtcctttcccccaatctaaaatctctctgactagccctgaacttactttttatagctctcactgtctaccatctccttcatcttgaatataccaggacagactgggaagttccagaaaaaaacagacataatacttaaatcatctttgatacctaatttgtcctcactgccaattaattaattttgttttgttttatttaattttgtaaagacagggtcttgctgtgtcacgcaggctcctctcaaactcctggactcaagtgatcctcccacctcagcctctcaaagtgctaggattagaagccgtgagccactgcgcctggccataatttaaataatcctttagattcctgtctctgtccattttcaaagccagggttacactatcataacataccccatgatgtacaccattgctaaaacaatcttcctgaagtactaattagatttttgagcagagaataaaaccatcctttccagtgttggcaaatattcaacgtactgtcctgaaatacctgtagtacttccaagtttctgctttgtgctcacactgttttctttgacctgaaatgcaatttctatctataaaaatcttagtcattatgaggtctagcaaagatctttttcttctatgaagccttcctatcgaccctaactaaaatctcttctctgagttcccagcgtatactgcttgagctggagcaagactccagtgatccttggaagaaagtgggaggttattttcccagtgcgattccaggaaagtttaatgtcttatagttcagtcccctttagcattccacatacagttagtgctcaaatatttgataattgctctactcacaaatatttttgtgtgaaattgctagctattctctatccaagaagtaatgaagtatataagcttcttcaactctttgttgagcccgggacctcttacttatttctgtatcctatctactcttgagtagtagggtcattggaaagcaaccactgggtttggggataagttgtgtgtattttagaggaggaagtaaaggtgttactggacttttaaaactgaagctttttctgttttaaagtat

SEQ ID NO: 97194 - DNA, 12878 bp, Homo sapiens
gcttgttctgatccctgggcaaggggcagtgcccaggccaagtgcctgggtgcaagtcactcaccttccacctgtggggccttgtgtccggcaagcgtagtggtcctgtggccccactcagagctagtggaggagaacagctgccgtttcctgcgtatttaggtggctaagcaggctgtcccagccacacggcctcaggcaagttcttaacctctgcctctgtttcctcatctgtacaacagggagagctggatattcacctggctgggactctcagaggcctcaggctatgaggggccggtagggggctttcctgctctcatttgttgtcatggcgatcctggcagatggggaactgcccccatttcacagaagacactggggccccaaagggttggagaatgggctaaggtcagagcaggaatgtggccagggcctggcccacctagctgacccctgctccacagtcaccgcaccacagaactggaaattactctgcagacaggcctgttccgtcagtgccccttctgttcccggctctcctgcccctatccgaaatccttcagcctcccaaggtgctgggattataggcatgagccgccacgcctggctgtcatctgtaatctttactcctgacctagtatgcctctccccactgccacctcactcctccagggtcttgaggtatccccacctgacctgggggcagctctgggctttggtgatgctcagaatgcccaggcactctgatcacagcctatcttaccctaggcctttccggattccgtcctctcgttcccttactcgctttttttttttttttttttttttgagacaaagtctcactctgtctcccagactgccagactggagtgcaatggtgagatctcagctcactgcaacctccgcctcccaggttcaagtgattcttgtgccttaacctccctagtagctgggactacaggcccacaccaccatgcctggctagtttctttttttttttgagacagagtctcactctgccacccaggctggagtgcagtggtgcaatctcggctcactgcaacctctgcctcctgggttcaagtgattctcccgcctcagcctcctgagtagctgggattacaggctcgcgccaccacacctggctaatttttgtatttttagtagagacagggtttcaccatgtgggtcaggctggtctcgaactcctgacctcgtgatccacctgccttgggctcccaaagtgctgggattacaggcgtgagccaccacacctggcctttttttgtatttttagtagagatgggtttttgccatgttgggtcaggctgatctcgaactcctggcctcaagtgatccacctgccttggcctcccaaagtgttgggattactggcgtgagccactgcgcctacttgctttttttttttttctcgaggtagagtttcactctgtcacccaggctggagtgcagtggcgtgatctcagctcactgcaagctccgcctcccgggttcacgccattgtcctgcctcaccctcccgagtagctggaactaaggcgccagccaccatgcccagctaattttttgtacttttagtacagatggggtttcaccgtgttaggatggtctcgatctcctgacctcgtgatgcgcctgcctcggcctcccaaagtgttgggattaaaggcgtaagccaccgcacccggccacctacttgctttcttagtcatgtgtctcatttatgtgtcctagctgggacccctggaggccctgcactggcccacaggccaggtcctcaggtcctctgaggggagaagagacattccaatggttatcccccgccttcagttcctggcctgtaatttacctcctccaaagagcctccctgacagacatatcttgccataaacacccagcatgtttccctacctgcctctcttttttttttttttttttttttttttgagatgggtgcagtggcgtgatcttggctcactgtaacctctgctgcccaggttcaagcgattcttctgcttcagcctcccgagtagctgggattacaggtgcctgccaccgcgcctggctaatttttttgtatttttagtagagacggggttttaccatcttggtcagtctggtcttaaactcctgacctcgtgatctccccaacctcggcctcccaaagtgctgggattacaggcgtgagccactgcgcccagccccccacctgcttctcactctgtcattgcactctgagtgtttgctcaggggagtggttctaagtctttatcggtctgggtagaggagtggagttggcaggagttgggagatggcacagagcacagttcaaatagaccatagtaggcgggcctctgaataataacccatagtgcacttgcagcctacaaagcactttcttttttcttttgttattattattattatttgagacagagtctcgctctgccacccaggctggagtgcagtggcacaatctcggctcactgcaacctccacccactgggttaaagcagttctcctgcttcagcctcctgagtggctgggactacaggcgtgaaccaccacacctaactaatttttgtatttttagtagagacggagtttcaccagagtttgaggccaggctggtctcgaacttctgacctcaggtgatccacctgccttggcctcccaaagtgctgggattactggcgtgagccaccacgtctggccttcttttattaattttttaaattaatagagatggggttttgcaatgttgcctaggctggtctcgaactcctgaactcaagcaatccacctgcctcagcctcccaaagtgctgggattacaggcgtgaggaatcacgcccagccacaaagcactttcacattttttaattttatgtgatgttcacacagccactgggagtcagggctaggattatcccctcataaaggtgaggacacaggctaagagagtcgaaggctggctagacaaggggagagacacagagctccgctgatcatcactggactctggattccaccaaacctttggaaccttccagcctcaggcctccacagcttcacagaaactgggcaagtcttaactctctaagcttctgtcttctcacctaagcatgtttggtactcacctcccagggtggttaggaggataataagggaatgtctcggcctacacgtaagtgcaccatcaatggtacctaaaaacgtcaacagttccagacactgtctccagagaaggctctgtgggggatgcggacatgtagcggccaagttcttgttctccaggggctctgcaggtcccttgcagaggaggcattcaatcctgccggctgtggcaggacactttcctatccaagggattggcttcctccgatgtagaacagacactatgaaatagctaccaacccaggggttgccaggaggccccatgaaggtcttgcactaataatacttcttgctttttttttttttcttttgagaaaaaaagcctgtcgcccaggctggagtgcagtggcgtgatctcggctcactgcgacctctccctcctgggttcaaacgattcttctgcctcagcctcccgagtaactgggactataggcacgtgccactatgcccagctaatttttgtgttttgagtagagacagggtttcaccatgttggccaggatggtctcgatctcctgaccttgtgatgtaactagtatttcttatgcccttattttgtgctaggcacagggcctcacccattattggcactcggtaaggattcgtgggattaatgagaagttaacctaaatcttcaccaaaggcccctgagcttcccctcgattcacatacaagggactggggctctgagaggtgggctgtgatgcgcccctggaagacccacgagtgggcctgcagagctgatggggagggttcaggcagggccaggggcttagaggagctgagattaacgtcgcccccctacccactgaccctctgcaggcgctggggctgtggagatccggagtcgccacagctcctaccccgcggggacggaggacgacgaagggatgggggaggagcccagcccctttcggggccgctcgcgctcggcgccccccaacctctgggcagcacagcgctatggccgcgagctccggaggatgagtgacgagtttgtggactcctttaaggtgagcgccagtccccagcgtgccaggacctgaagtaccaggccgccccccgccggtctgtccctgccttgtcccaaggcacgcccggatctggagtcccacgacccctccccaaagccgtcctgttccttcctagctccagagcattctgggatttgtagtcacaagacttccccgcccccactccccagctcttcccccgcctggtgtgtgtgtgtgtgtgtgtgtgtgagtcacagggcatgctgggatctgtagtctagatcccactccaggcgtgtgtgtgtgtgtgtgtgtgtgtgtgtgtgtgtgtgtgagtcacagggcatgctgggatctgtagtctagatcccactccaggcgtgtgtgtgtgtgtgtgtgtgtgtgtgtgtgtgtgtgtgtgtgtgagtcacagggcatgctgggatctgtagtctagatcccactccaggcgtgtgtgtgtgtgtgtgtgtgtgagagagtcacagggcatgctgggatctgtagtctagatcccactccaggcgtgtgtgtgtgtgtgtgtgtgtgtgtgtgtgtgtgtgtgtgtcagtcacagggcatgctgggatctgtagtctagatcccactccaggcgtgtgtgtgtgtgtgtgtgtgtgtgtgtgtcacagggcatgctgggatctgtagtctagatcccactccaggcgtgtgtgtgtgtgtgtgtgtgtgtgtgtgctcacagggcatgctgggatctgtagtctagatcccactccaggccaaagctcctgggttccccgaattcttggaagaccaggcatgctggtatttgtgctccttgctggcacctgtgcgctctgtcgcccaggctggagtgcagtggtgcgatcacggctcactgcagcctggaactcctggcctcaaaggatcctcccgcttcaacctcccaaagtgctgggattacaggcgctcaccatcgctcccggccctttgattctcgaattgcggtctcatcttctgggtgctaggtctccagctctggcctttccatttagggccctaggcatcctctcttcccgtctccggcacggagttcctgggatctaaccagttcccattcctgggggcccatgcgtcctcgcgagcgtccctgaccgcccggcgtggagcctcctgggagttgtggccttcattatctcccccccgatctcacttagaggaaggctcacggaagtggagagcctggctcgagctgccatggtaatctaactcatgtaacccttttctccctccaccagaagggacttcctcgcccgaagagcgcgggcacagcaacgcagatgcggcaaagctccagctggacgcgagtcttccagtcctggtgggatcggaacttgggcaggggaagctccgccccctcccagtgaccttcgctccacatcccgaaactccacccgttcccactgccctgggcagccatcttgaatatgggcggaagtacttccctcaggcctatgcaaaaagaggatccgtgctgtctcctttggagggagggctgacccagattcccttccggtgcgtgtgaagccacggaaggcttggtcccatcggaagttttgggttttccgcccacagccgccggaagtggctccgtggccccgccctcaggctccgggctttcccccaggcgcctgcgctaagtcgcgagccaggtttaaccgttgcgtcaccgggacccgagcccccgcgatgccctgggggccgtgctcactaccaaatgttaataaagcccgcgtctgtgccgccgaggcttttctgtgcgtcgactggggctccggcaggccggggtagtgctctcacggatactttcaaaagaggccgctgtcttacgagggaaacttaggctctgcctgacatccagcgacagagacggaaggggtcgcggcggctcgcgggcctgggctgcgcggcccaggtccaagtccccagcacgcgcattgggaccgcagcgctgccggcagcccgatcccgcgctctgcaaaccgtgccgcggccccccagagagggtcactcgytcctatttgggtcagccctttccagcagctactgtgtggccggcccggggccagcgccgcccgggtacctcgcggggcgggagggagcggctgagccaggctggcagcagcgcggtcgctggaaactgaggcttcatgcggggacccggacagagcgggggctccgttccagaaagatttattggcgccccctataacccgggccggttcttggtgccgggcacagagatgcattgcgccacggccctgctcgcggaagctcccgagggcccggaatcggcagggcagtcagagagggcttcagggaggaggcagctagagctgcgaccggaaggtgaggtgagsgtcatcccccccggcgcaaggaggagtggacccatggaaggacaggggagcagcagaggccaggcttctaggggctggaatgtcacacccagaagttagacattcagctggtatttgaggacctgggaactgacttggagtgtgtccctcagtggacaccagctagagtcaggaaggtgggagttggctgctgaggagcctagatacggaatacactggagtgagcagaactgggggatagggcagcgtcccacagaagaagtgaggaagtctggggccattgcattgaccctgagggaggagggccctactccggagcctgtttccctggcctccccaccccatctgtttgcctgaggctgcagcaaaaacaaagcaaagaagatactcaattggcaggagataagcccagataagaggccgccttcccctggaggagggatgcaggcgggcagcctgggaagagccaggaagctgggagaggccttgaagaggtgccaagccgaccctgctgcgagcccagccccgccctggagcccgcactgtgggctctctgccacttttcgctggtcttgaggcatgggacaggtccaggctggctgaagacagtccaccacggagggtccaggcctgccctgcctccaggtcaggacgtcttgacttagctgtggcctagcacacgacagatggctccgggcctcagtctcctcatctgtaaaacaggcataacatctccctcacagggatgaggggatgctgggtggcccagcccctgcgtgtctgtgactgtccacttcccttcccccagagtcacaggcaggcctactgcccacctatttctgaagacccaggtcccccggtgttgggcaggttctgagctgccctgctccaccctggccgatccatcacctgatagagtcaactgcctgtcgggggcccagagcagccccagcggaagatgctaggcgtttgggtcatatcaggccacaggaagcggggcagggaaggcttcctgaagcagaggcctgagcctcagaaaagagagaacagggagagcctcggagagacgaaagtcatggggatgggggaacaggaacagcggcttgggggcagagggcacaagcagaaggccacggaagctcagcagactcggcagggcaagctcaggttcaacccagcagcccttggctggaggcgtgacctcaaccccaccaaatgcccaaagtccattttatagatgaggaaacttagggcccagagtcctgtcaccccaaatcacactgcacacagggtccctgaaatccacttttattcatgtaaaaaaaatccccaaagaatagagaaaaaaatgtgactcctacttcccggagctccaagtctccagccagctctcccggggaagggaggagacgctgctagctcgagggtgtgggtgtcacagggagcaaagccctgaccaaggccctaacctaagactgagggcaggaaggaggggccccaggaggatgaagggagttagctgaggtacttgccccgggtttaaaaaaataaaatttctagataaaaagttaaaaaaaaaaaaaaaaagcattagtgtcattgcctcctgccctccacccagcgcccgccctggccctgtggccacctcgctcagccagttcagagctgcgtgttctcctcctggctctccgagtcagcgcccgacaggtgcccgctgctcccgggtgcgtgaccgttgctggcacaggccaccagaggcccgtcccccagcccctccggcatctcgcccagcaggctccggcggatctcctgggggagccttgcccgctgctcctgacactcctgggccagctgggccagcagctgtgggagaaggatgggcatcacaggcgaggcctggctgccttgcaccccgtctgcccacctgttcgcccatggcctcaccttgggctcctcttctgccagctgttgcaggacctgctgctgcccagccacaagacggtcatgccgctgcttctgggcctcctccagctacaggggtgggcaagggctcagctgaggggccctgagggaggggctagagcctcgaggctctggctgggtatagaagtcaggtgggcgaggccgggtgcagtggctcacatctataatcccagcactttgggaggccaaggcgggcggatcacctgaggtcaggagttcgagaacagcctggccaacatggtgaaaccccatctctactaaaaataaaaaaattagccaggcatggtggcggatgcctgtaatcccagctactcgggaggctgaggcaagagaattgcttgaacccaagaggttgcagtgagccaagatcgcgccactgcactccagcctgggcgacagagtgagactctgtctcaaagaaaaagaagtcaggtgggcgaaggctcccagggcaatgtatcagggttgtgagaggactgggcccaaggacgccaaagccagggacactggtacagacagttggctttgggtatgatgtgggtaccctggggctgttgggcacttgagaaaggccctagaagaaccttgagggcaacgtggcaccaggccaggcatggagatgggtgtctgatgagtgaaggaagggaggtggggtagggtggcccgggagcctgactcacccgacggatggagttgactgactcagtgatgtgccgacggttaatctccgtcagttccctgcacgggagcaacgcaggatggctcggggcccagacacctgccctgcctccccagtacccagatggcccccggtcccggtgcccttacgcctccttcttatgcttgtccctcatcttggcctccgagatgctgttatggcgctttctgtccaggatcttctgcagctccttcttctccctggagaagccggcaggggaagaggaggggtcagcggcagaagcacagactctgccctccttctggtactagaagtccccagcccttcccatagacaatcctcggctttcacctctcgttcatctctttcagcctcttgaactgagttgtgtttgcatcaaggacgacctccctgagccgctgcagagcctgtggacacagggagctgacaggtgatgccgggctgacgacgggtctatccagcaggctttccctggccactgcaggccccctacctgtctcaggtgttccagcctccgctgggcctctgcgtccacctgggcctcccgcagctccagcaggctctgcacctgtctgttctggaactcctgataccgctttgcctcgtcctccccctccttcgtgtcctccacatcagcggccccacctctgcgaggagaacccctctgggtgatgcctgggcccgtcacatggactgggatggggagggtgtgtaggggggcacatcctggcaagcgatggcagacaccatcccatggggccaggtctgttatgcaaaccaggaggcctgttagctccacccaagtgatgggagcctgtttgggcaacatgctcctcatggacttcaaaagagatgtcactccctgggggacacagggacgcctggtgtggaaagcctcctccatccttgcactgaaccctcctccctgggggtcaaggagcagctcttgccatctctccatgcccaccgacccccatgttcacatcagcacacccagcacacatagcacacaggcggcccagacactcacagggcacctggccgcagccggcacctgccctcagcctgtgcctgagccaggccatccagcaggcggcgggtgagggtgactgccttccgctgatgcttcttgcgcagctcccgcaggtctcgctcttgccggctccggagcttgaccagagccttgtgacctcggagctcatccagcggggtgggggccacctctgggagcggcagagcaaaggtgggcggggggtgggggaacctccaaggcaaccccctgcctccaggtaccccgccccctacctgagaggatgctggcgatgagatcatcacgctgccctggggagcagaggccctgtgaggagctggaggacagggtggggggtgcctccctgcagcccacccccgacccaggccactccttacctgggctgctgagggaggtgctggcaggggaggtggtggggccagggggccggcggggggaggcatccagtgggctgggggtggggtttgaggacggctgagaccccagctgctgagactgggtgtcctggcacgtctcttggccagcctgagcctatagggagaaaggagaatgctcttttcagaaatgctgttccctccagacccttctgtcctctaccacctcctgggtcccctagcacccctgtcagcctcccttagtccaagccactgctggactgctctgtaacaggaggctgtctgcatgagaagagctataaatcaagcctttctaaaccccttttccacatgggctgtggggaagataacataatgccagcccactgcatgtgctcagtaactcccagattgttctggaaaggcctggcccagccccaagcctcctctcctcccctgcctgtgtcccccagccttgcctacagtcgctcattttccttgctgctgagctcctgattaaatcaacagaggactcaaccgcagagtgggcaccagcctctccgctaacagctccaggcagccctaattgcagtcatctctccccgcccgcctgccgcaggccctggggggactggatctggaagcgcaggtgaacctccgtgcctgacccctccccacggaagccactgccctcctcatgactcccaggacaccacgtctgaacagcttctgtggcttcgcactgccctgatgaagtggctgagacccctgtacccccactccaagcctacatggagctggaggaattccagcccaggtgtgacctgaaggcctcctgaatgcaaatgggtggttttcatctcctcaaaatcccagggctgccaagcctactgcgctagagagaccagaagccccctcctcatgtggccacagcagtcatgtccagcggccccctgggtcacagtgagcctgagccctgccctgccccggctcacctcactctccccaatgagggcggccagctgccgggccctctggtccatcaggctgacgtgcttaatggggttgatcagggcctccgcatagtctggggggaggcagaaggccaaggtctcagagacagagcccccaggccacccccacccgccacctctggtctcaatgaggaattccagagcttgtcctcagatctgttccctactcagttccctactcagtcggggccatccagctcggccactcccaggccctgggggtggcccttgtccctcacactccctggccaggcaggccccgcccacccccagctcaccctggtggtcgtcaggaatgtagtccgaggcttcggtgtagatgagcagggccggcaggcacagcggttggttggcctcgttccgcaggcagacgtagtggtatcctgggtggtcaggaaggcaacgttgggttgctgggccaggtgggggccctacccactgcccgctgtgctgcccagagcccaccaaggcctcaccggagcggatggcagagacaggcaggatccggtgccctacgaatttacccccctcctcaaaggctgcaatgcgaagtgaagccagcgtgggcagcaccacctgtgggccagactggagctgagccgcagggctgaccctgggccactgtggctaccaggccacagctaaccacagccatcaaagcttaacaaagcagaccttcagacgagctgacctactgaccatcagtcaccattgccactaagctgatggctgaccccacttccatgtcctggcctaatggatgactgcagccatcaggaccctgaggcaagatgacaggcagccaggcccctccagggcccccacagacagttctggtcattgccagtttagaaacgggagtgagtcatgagcaggaaaccaagaacacacatgcccaggctgggagcagaggccgcgtccatgcagggccgtgcggggtgctgaagagcggatatgagcttggggttgtgacctcagctcctgcctcggagacagggtaggctgtgtccactcctcgcaggggacacaagacgtctagctgacaccccccaacccccatctcaccttctcaccctggtctcttaccctaaggagggcagggagactgacgctcggacaggc

SEQ ID NO: 97195 - DNA, 13434 bp, Homo sapiens
ggaagaattccctgaccaggagcgcacccctccccaacgactcccaggcccgcagtggagctcgttttcacacttcctacgacaaaagatacatcatcaagactattaccagtgaagacgtggccgaaatgcacaacatcctgaagaaataccaccaggtaatttttcttgatctttatttgaaactccaagaagattaacatgcgtagcgatttctcaccaaggccagagatttaaatatatagttagagaacaagaagaacacatttcacataaacatctcctctaaccctgtgttctaaaattacagtggccagattcctggcagttaacctttaggcatgcttgtgctataaaggtcattcattatttgtataacacttttaacctaaatactcttgtgtaatagtttcagttatcactactctgattttaaaatcattcagcttaagatttggcaactttgcagaagtttttgcctgtgccagagattaggtgttgacctctgagtatgtatctatttacacctccgaatcctattttgctgtcactggttcttctgtcctggccccagcagggcccacgccattcacaatctgctacggagcaagctctctgattttagaaggtgggtgttggtctgcttcttgcccccttttcatccccgagcataattccattgtaatcactggaggtaaagtagaccatccttgggagcagcaatctgtctctcctggagtaaattccagcacaagcttctctggtagagcacatgttcccaaggcccagcccgcgctgtgagaggcctccttcaccatggagtataagagcatgaagtccagcgttggacaatcctgggctcaaatcccagccaggtcgcttactaagcatgtgacttctggtcttggttgttttttagagacagggtcttgctctgttgccaggttgaagtgcagtggcgtgatcacagctcactgcatgctcaacctcctgggctcaagcagtcctcccaccccagcctcccaagtagctgggaccacaggtatgcaccaccatgcctggccaatttttttaagttgtgtttttatagaggtggagttttgctatgttgcccaggctggtcttgaactcttgggctcaagcagttctcccatcttggcctcccaaagtgctaaggttacaggtgtgagcctccataccctgcctggattttgaagccacagtttctttgtttatacagtcgggataataataacacctaatatggattctaaagattaaataggaaattgcatgtcaagtgcttagcacagtgtctgtcacacactagatactcaatgtgtggtggtggccatagcatcgctattatcaagataacatccatggtataaaaataacgtaacaactaagtcacttggagaaattgtagtcatatggtatgaacatgtctgctgttgcaacatcccaggaatcatcttcacaactggtgtttaaaacacatacacacattgttgcttttaggaccttagtcagcttgagctgtcataaaaaaccgtagactgggtagcttaaatgacagaaatctatttcttacagttctagaggttgaagtctgagatcaaggtgccagtatggtcaggttcttcctggtttgcagacagccagcttctcactgtagcctcacgtgtgttggcagggtcatggtgggtgggataggatcaaaagcactcttctgtcacttctaataagggcactgatcacataatgagggctctaagctcatgacctaattagctctcaaaggtcccacctcctaataccatcacttggggattagggtttcaacgtaagcattttgggggacacaaactttccattcatagcagagtcacacggtgtttttaacttaaatagctcccaatcccccaaaggtaaaaattggctgtcacaatgggtattcaaaataaagtgccgcaggtcctgaatatattaataaaaggattctcgagtataaacaatcacacttactaagtatctgcttcgaaggcagcactggcctggacttgtgagctcctagatgtctgtttaaacatccctttaaaagcattactttatgttcatgcatgatgctctaatatcatggattctttcttggcagttgcttattcttccaatctttgcaaatatgatcaattgcattttgcttgcagtgaagtctataaaaatctttgagctatattctgtttcttgaaacttggtactgcctctagtttgttttctaaaatcattagcctctaaattcatttaatatctaataaatcttttataatatctattccttttgaaatttgttctacactgcttatgctactgcctcttattctacaggaaattttaaagtgccaggatgctacctgtgagggggaagacatgaggctctgttatctgaatgaattgaattacaggttgcagctttgaactcttcaccttttaaactgtctactttttcattttttcccctctggaaattgatatcatacttatgcattctctttatactttctttcagttgtctcagaacattcaaagcgaagtgatatctcatgactgatgagagcatattgttctaaaaaatggccatgataccatgctaataaaatgtgacacagaattgaagtaccaacttcttgatgacaactttgagtttagcatcctttgactttacaaaaatcacgatttgaaatgttttctctgggttagttattgtaacctaacatagggatttgacatatccccagtgttacataaaataagtgtgggatcaaaataagtctattgacacctcccaggggctttaacagtataaagacttccttctgttccactgctacaaaattgttatcttattggtgagttctttattcagaaaagtctcctttatccaacatctatactttttctttttataaacagaatattttaaatataatttgtagggtcttaatgattgggaatcacattattaatataaattatttaaagggcactaagtagaagtcaggagacatagatcctaacctgttaggaactgcctcttggatgatctctgaactcagcttctgcacctgcatttcattcattcattcatttattcatgtattcactcttgaccttattccagaaaggatttaaggtggccttcaaagaagttggaaatacaagctagaataaatgaaaaaaagaaaaggaagaggcagaaagataaaggcacaaaatggagcctggaatgagcgtagatattcatgccaagatgaccagcatgcttgatactttgagtctgttgccaaggagaaatgtaagtggtcttggtactaagatgcaacagggttgactctaaggagttccccacagagcggacacagggacatctgacctgataaaacaacatccttgccacaagctgagaaacatacaagaatgttagagaacttaaaaaaaaattgtccgtataggctgctaattatcagtataggccatgtataaatacagccacagttgcagcaccgttttgctaatttgtccatttttaaattacatttaaacaaaagcaaattaagaacaaggaaatgtataggtgacacaaacgttgaccattaaaggtggacatgccactcatatacatctcagcaaaatctcacatagaagaggtttttaaaaatacagcagcagtgaagagtaacagtgttaattacatgatcagagaattccacagaaacctcataaaaggtctcaacattcacacagcttatttgatactgatctattcggggtgacccctgctaggctcactgagggcaggtctgggaccctgctcaggttggcaggtgttcatgaaggaagatgcagtccgccgagtcaaacatcacacccgcagcaattagcaaaggccacaccagtgtgtagtttacatttagtaaatgctgttctacagagaaaggctataatgcacaccggctgcctagccctctcccattctggcttctgtttgaatgttcttcaggctgttcttcttgtatgccacttccagacgagattttgatgaatattactgggtggtgggctcagcctggcatgtcctcatgtgattctgtgtgaccagacacaggcctgtcattggtaaacccagggaggcctgtcaagctttgtgtttctatccctgtggtttgagatgctcagaggtatttgaggtatatgtcaggccttcattcctactttctgtgggcctagagtacttttagggtttgtatctaagaaactttctctctctagcttcagtagtgatcatcatttcttctgtttcttcttgcttgttgttgcttttgccttggaactctctgggcttctgaaccttccgaatctagacaagtaatgcagatcgttcaggtgcatatcagttgatgagaggctctcatagagggtttctcccgtggagtgaattgcatggactttctgacaactttggttacccaacagcccttttttttttcttttcctttgttgttttttgttttaaggaaatgcagccacagttggaattatattctggagggttaaaattgcccaaggccagcctctggagaagtagaacatggctagttatttgaatatttgaataaattcttcctaggtttaattttctgacacactgaccttcccagcaatctgggatggcaggtggttcaagagcaaggacttggagccagccagccaccttctggtcccagccatgcccctggccaatggcatgaccttgggcaatttacttatacttttgacacctcttggtctataatatttggataatagtaccctcttcatttgggtgttgtgctaattaggtgaattcatattataacatgctcagagcagtgtctagtatataagaagtgctaaatgggccaggcgcagtggctcacgtctgtaatcccagcactttgggaggccgaggtgggtggatcacctgaggtcaggggttcaagaccagcctgaccaacatggtgaaacctcatctctactaaaaatacaaaaattagccaggcatgatggcacgtgcctgtagtcccagctactcgggaggctgaggcatgagaatcgcttgaacccaggaggtggaggttgcagtgagccgaggttgtgccactgcactccagcctgggtaacagaacgagactccgtttcgaaaaaaagaaaaagaagtgctaaatgagtgactgaataagatttttaattaaatatcgttcttgtatttaatttcctacacctcagtgttgaaatcattctcatgtggcattcagtccttaactcttttaatccactagggggcctggtttctggtagactgtggcactgatgcagaattatgaagacttcagccgtgaggagttagatttttcccccaagttccagtatcttgctctattctttatttcctgcccaaattctaccctagctttcactctgtgcaaagaaaggagagcatcatctctcagaccaatggagaattcatattaagcacagcaaactttcataaattttgtttacttcatttgattttctcttgtagttgggaaaataatgtttcgctataaatatccttttcacatttctgttaggctgtaagaaactcggatcctataaatgatgattatcagttgattaactaaacaatgttagaacattcaaaaaggaaaaaatggtaaaaaacctatttgcctacttgaatatctttttatcttaaatcgactgaattttttttttccccgcactgacgtgaattcattgggagctttggtatcatgtagcttcaacttgaattaaaattgaaaagtattgactggacacagtggctcatgcctgtaaccccagtgctttgggaggccgaggtggacggatcacttgaggccaggagttcaagaccagcctagccaacacagtgaaatccggtctctactaaaactacaaaaaattagctgggggtgtatgcctgtagtcccagctgctcaggaggctaaggcatgagaatcccttgaactcaggaggcagaagttgcagggagccaagatggcatcactgcactccagcctgggtgagattctgtctcaaaaaaaaaaaaaaaaattgagaggcactgttggtaacatacttccctgaagttgtataggacttagaatgtaacccgagggaagctgcaatataggtgatcaagaaataccttatgaaaatattattgagtattttaatagcttttgaaatgcagcattttaatttacttttttatttcaaagtgactgaatcgataaatgggtaaaattgataaaaaacgacttaaattcctttcttatccttttatttagggaaacaattaatatctttagttgaatccagaagttttgccccaaaatctgaactccctgttaaataagctaatcagcacctcaaatttcaaggattttagggcaaacatgtgacctctttgaaatctcctcatagtacatctgcttatcctttcccgaaggttagggacgttggtgttactattcaaaggatgagacttcggtagagcaaaactgagaaaatagggaccataaaagctaaatacaaaaaagagtggagagggttatagcaccaaaagagaaaaggttccacattgtgtcagtgcttcttagactttcatcagggctctgactggctgggtctggaggggctgtcggggagtctgtggaggccgcctttctaccaggcccccaggtgatgctcatgtgcccccggtgagtgacagggcagctcctgwgttctggaacaacagaacattctgagcactcagttctgaatctgctcttgggcccttttgttcatttttccggaggagtgatcaattaaaatttggaaagtacttggatattctcagtcctgtgtaagtatcagattatgagactaaacacaagctcccagtagaccctctgctgccattgtaaactgcggacacgtcttgcttctctcttagaaacaggggaaggtatttgtcatcttgggagttcctgtggcccaatgagtgccccgaagcttgccgatggcgtcatttgtagccctctgttcccaatgtcctcagccatttcctcctagtttcatggggagctgcccggcacactccccagcaagcttttcctgcagtacttcttctccagggtctggaagttccgcagtccttttctctttcagcctcacctctctccttctgtttctccagcaagtacatctttaacgtgctcatcctggcttccccatctttaacttttcttttccattttccatctccaaacatctctgcccaattctgggtgaattcttcaaaatatatcatccagtcctaagtgtctcttcaactgttctaatctttttttttttaatttcaacaattatcttttttattctagaagttttccagaaggtttttcaaaatctgaccgttcattcctgatagtttcttgatttatgctcatctctgaaattgcatcctttgtttctttacacgttttgtacgtaactattcaaaacttactcctgagagttcccacctctgtaattcctgggggcctgaatttgttgtcatggtctgccaactctcacacacagtgacttgcccaaccagatgatgacacagtttggggtcaagatgttgatcaggatcaaagcttatgtagggaagaggaaagaagtgagattgggcagagggagaagtcagactgccatgctggcccagtcaagcctcagctaacctggcggggcactatggaacatgcccctagaggctcctatgttgggccaaaatgacaggctgccctcggaaggcagacctagaaggagctgcccctgcaggccttctgcagaccgcacacgctcagctgggcagcatgaccttccctggagggaatctgggcgtcccatctctgtggctacacttgctttccttagtgtctgagagtcttactgaactcttagcttcatcttcacctctgcaatgtttgggaaggcctctgaccctaatttacggaagctctttttctgagagttttgtttctgcaaaagaggagggtggggattcccagccctggaccctgtcagcacccttcaagggttttgctaggagtgggagcccctgggcccactcccccaccatgctaatgtcctcagtgtccgtgtacccctgtgctcctgacaggctctgtctagcacctccaacaccttggcttggatcccagctcctcacatgctccctgggcacacctgctctccggtgcacctgcccaaatgttcagctcccccccagccccaggcataggctactcaggccccagctccccattgtgtgtggggtacaggggccattctggaaccttcctgcctttataccagctaagctttctatctgggatggggctttccaggaggccttgggcttgtcaaagctccctgccagcggtcatacgtggagcagccattctgtgctttttgtaacaagtggcatctgtacatatgataaagcactttattgtattttttacaaagttacttcatttttaatgatgatgttgtttatgagtccttactatggtgtgtcacaaattgaatgaggcacatccgtgtatgtacttaggcatttctgcatatctcagtaataagaatttgtgtaaacactacagaagaatgcttgttccttttaagcttgatttttatcaagcttaattaagaaaagcagtaaagtttcatttgttttgttatatttgttatatttgcttaaatgtagtcatccttacttttttttttttttttttttacttcaagacgatttgaaatcaaattatattaactgacatttacagatcattatccccaaacataccaagacatccactcaaaggaagttgtatcatttatttatttatttggtcattgtacaccagagcaatccataatttcaggcttctttcttcccttcctttcccttccttttccttcccttcctttccctttccttttctttcatgtgaagtatattgtaggaataatctctaaacatagcccatggcacagtaaggattaccgataatttaacctttcaaaaacattaaatgaaacaagactttacattgaagtactaatttgatgctatattaaattgtcacttcaagcttttttaaaaaatgagtgaaacatgataataacagcaattcctgaaagccggagcccaggttcacactatcgtgcggagatataaatatttatctattgcagtacatcacttagaaccctttctgcttcaaccttcagtcagctgtgaatctcttaatggcatttcattctccatgagaatagcaacaaatcagggcttcataacccttattattctcggtgagtgcctaagggcaaaggaaacctaggtctggtggctgttacgttttatgtttttgaaagcctaattccatgactctaatttatcattgcattacatttctaacaagcccacagtagtacaggaaaaagttctgagggagaattaggaagggagaaactttacctttgttgacgacatcatttataagtagacttttttttttttcttttttgagacagggtcttggtctgtaacccaggctggagtacagtggcgcaaacacagctcactgcagcctcaagtgatcctactgcctcagcctcccaagtagctgggaatacaggcatgcgccaccacacctggctcatttcttttatttttttttgtagagatggggtcttctcatgttgcctaggctggtctcaaactcctggactcaagcgatcctcctgcctcaacctcccagtgctgggattacaggcatgagccaccatgcccagctgtaagcagattgttttttaaaaaaagacagaaaaaagtgaaaactgttagtgttggaaatgcatgttacagatgagaaaaatttaaaaagccagcaaaaataggaaagtttctgacagcactcttagaattaacggaagctattatgtggtaagtaatgaagggaagtgacaagagcaagaggtgcccagctatgacagtgcagaagtgaacggtacttaataaaaggaatattttaattttttttttttttttttttttttttttagagataggatctccctgtgttgccctggctgatctcaaactcctgggctaaagcaaccctcctgcctcagcctcccaagtaactgggcaaaaataacattttaaaatgcaatgcagtgaatttaacactgagaataggaaagctgaccccaaagaataagtgtgattgacttagctacatatagcaagtataagaagaattggtgataatcaggttcacttttatgaagtttgagagtagattttcagcacctattcagatggaagctcaatgtcaagcctccgctccaggtgccaggcagagctgctgtttgatgtgagcggagggcttagatacaggtgacctgcagagtcagacaggtggaaatgacaggtgagcattgtgccaccaggaggaatgcctcaggggaaaagccctactcaaggagccgctgaaaggaacactcttcggtattgtgttcatgctgcctgtgctctcacaggagaataagcccacttatctggtgtgtgctcttaatttctgagccacacacgggacggccagcattgttcagtgtttggtccatttgcagcctcatctgccttgggacttcaaagtgtctgcagacaggagttggcagactcatccattctacaaaggagcctcccgggccgcattagagcactgcacctgtcgagtctgtaaagcgagacattaccatcgcagaaagggacaactgtgttgatgacgtccttttgccagtggggaaggattgccttgtagccacatcttgtagaccgtggttgaaagtgaaagaaatgcacctttcctaaacagtggccccaagggactgcattgtaactttggcattcttgtaatctggaagttaaacatgtggaagagaggaggcaaaggttcctcagattgtcttgtggttgagccaacagtgttttacaaaagggtaatagataggatgctttaaactcttacaaagaagagaatgaccgggtcaaataataggttgttaaaagcatggcattgtggtacccccagtacatgctcttcttctcactgtctttcttttattttctttttgttgagatggagtttcgccatgttggccaggttgatctcaaactcctgggctcaagtaatccgcccgccttggcctcccgaattaccgggactgcaggcatgagccactatgcccagcctcttcttgctgtttttgaagcattcgcttacaagttattttgttaatttgtctatgatatttaagttttgaagaaaaatgtgctcacagttgtgatcctagaagcaacataagatagaaatattttttttggtgttttacgtttacactaatctcactttataaatacagagacactgcagcattattaattatggagagtccttgaaattgggagtccccgtcatgcattaaagatacaacccgtgtctctgagagcatttggggcacatatcaggtgctcctggaagtctccctccctcacgccttcctgcctttgccctctccacccctcacctcggggccttggctgcatcttggccctgcttgagtcatgagcaggtcttgtttcccttatctccacattcatcagaatgggttgtctttttttttcttttttcttttttcttttttttcttctcagacgaagtctcgttctatcacctaggctggagtgcagtggcacactcttggctcactgcagcctctacctcctgggttcaggcgattctcctgcctcagcctcccgagtagctgggactacaggcacctgccaccatgcccgtctgatttttatatgtttagtagaggcggggtttcactatgttggccaggccggtctcaatctcctcctgacttcaagtaatccaccctcccctgcctcccaaagtgctgggattacatgcgtgagccaccatgcccggccagaatggagcatcttaaaggcagcaagttcctctgtggttggtatgggagcatcatgtctaagcagtgttatgcccaaagatcccctcccctccaagggtgaggatagggaggagctggaggggaaggaggcagacgtcctctaattgttgtgcacgtgattctgtggagaacaccatttatcagctttatcagtgcatacaaactttgggaagttgagagaattttaagtgtgaattctgtataaatcatcggatgtgattctttactcttattcagtgacagattgatatcactagggttacgattctgctccacccctttcctcaaagttctgtttctcccgtgatgctggagaatgaggatacattgcgtggtacagtttacacgtgcggtaatagtcccagaacagataaactgtgaccatttccgaattctcccccaagttaaccatgtgactgccttgttttttttttaagattaacatccttaaaccgttattttgtggtaccctcttttcctcctttcatgcccgacatatgccttttttcctacttattgtgtaaagttcttcatttgtcatggccatcgtgagaaaaatctggggcttccctttcatcataaatgacaggttttttttctgctttcaaaatctagaattttcatatttgtaacacctggaggtaagggtcatggtgttaattataaagagagcagagagagtaggcatctgtaggaaacatcttgggtttttttaattatttgctggattcatttattcaacagttgtatatgaaatggtttttacacatgaggtcctgctaagggtagtgcttgccaccttcgtggagcttacatttggcaggaagctgtattacactagatgaatcctatgtggatgtgcaactcaaaagaaagggttgtggactgagaatcataagtttgggggttatcgagacgcagatagaaatgtaaacaaacggtgtggatcaggtagcctgtacacagtgaagaagagaagatgagaggacatctaggtcagggccctgacaatgggcatgtagaggaggaagcattggccaaagagcaggaaagatgggacggagtaggaggactgccaggagaacacagcgtctcagaagccaagggagggaggaagccccagacaagagcgctgtttgctcatggggttcaggagagagaaaggcggagaagcatctgtcaaatttaaccactcaaaggtcattgagatctcagggggaacagttgctctgaagg

SEQ ID NO: 97196 - DNA, 14033 bp, Homo sapiens
ccattttgaaaatccttccaagaagcaaaatgacaacagaaaaaattcatgttagcgacaactgcatgacttaagaatatcttgactgtactctctgattcttatttatttatgtatttattttttgagacagaatttcactcttgttgcccaggctggagtgcagtggcacaatctcagctcactgcaacctccacctcctgggttcaagcgattctcctgcctcagcctcccgagtagctgggattacaggcgcccgccaccaagcccagctaatgtttctatttttttttagtagagacagggtttcaccatgttgcccaggctggtctcaaactcctgacctcaggtgatccacccacctcggcctcccaaagtgctgggattacaggcatgagccactgcgcccggcctgtactctgattctggataagctagagcaagcctgattatataagtccaattaggtgagcatacgcttgtcttccttttaaagattaagtaattttatttttccccatttttcttacccgattttgaatgctctacgaaggctctttaaaatactcaggactatgggtgagtagtgtttaattttccccatttttttatatgactttgtctttattcctatacaagcaatatgtgaaagttttaattattgcaatcatagtacaattccatttgtctatttcatttattaaaaatattctgtttctacttgttcataattaaccttctagtgactgtatggtattaatcttctaacttgttactgttttccaaaatgctatctagttgggcttccatgcattcactcaacaaatattctaggcctggcacactggctcatgccttcagtctcagaatttcgggaggctgtggtggacagatcacttcagcccatgagttcgagaccactctgagcaaatggagaaaccctctacaaaaaatacataaattagctaagtgtgaggcgtacctgtagtcccagctacttgggaggctgaggtgggaagatcacttgagcccaggaggtcaaggatgcagtgagcgtgattgtgccaccacactccagcccagtaacacatctgaccctgtctgcaaaaaaaaaaaaaaaaaaatgatctgagcacctccagtatgcaagtggtgttctaggtcctggggctcacagtaagcaagacccgatgtccacccacgtagagctcccaatctgcaaatactctggtggcctctgccattcacaaccaatcaggtgtgatattttaaagaactgaacagtcatctcatgattaaaacttcaaataacactgtcacgtccacttttgtaagtctccccacctcccagggccctaaatttcttgaatatccttcctacagcatttgatacatatgcaggcatacactcccttttttttgttttttgagacggagttttgctcttgttgcctaggctggagtgcaatggcatgatctcagcttattgcaacctctgcctcccagattcaagcgattctcctgccacagcctccggagtagctgggattataggtgcccaacaccacgcctggctaatttttgtatttttagtagagatggggttcaccatgttggccaggcgggtctcgaactcctgacctcaggtgattcacccacctcagcttcccagagtgctgggattacaggaacgagccaccactcccggccagtcctcctttttagggggaccccgagctgacttctctggctggcaattccatgaagactagggaaatgtaatgaaatttaaagatactaatccattgaggaaaaatgagtagaaggatgcttaatggggaaaatgttataaactattggtccagagggcatatccttttatccttcccagaggcaactacacactcccttctcttccctcagttttcttcccttccttcctggggctcagctagaatcacagggacccacctggcaaaactaaaggaagttatatcctttgcatttatactaccacttactaggctggcagctgatgttgaaggcaagtgtgtctgtgcagtgtatcgctgtataaagcactctctccatgtattatttgcttcttacagcattcctatagaatcccccaatgtgtgcattaggaaactgactcactgcctaaagtcacaactagttttccaaatccaagttttctgttctttcaatccttgctacacctcaaaaataacctgtggcttcttaaaacatgcagatgcttggtcctcaacccagatctactgaattggaatcttcaataataaggcctgggcatctgtgcttataaaaagctgccccaggccgggtgcagtggctcacgccagtaaccaaagcacattgggagcccaaggcgggcggatcataaggtcaggagttcgagaccagcctggccaatatggcgaaatcccgtctctactaaaaaatacaaaaaaattagccaggcatggtggtgcctgcctgtaatcccagctacttggaggctgaggcaggagaatctcttgaatccaggagacggaggttgtagtgagtcaagatcgcgccactgcattctagcctgggcgacagcaagactccatatcaaaaaaaaaaaaaaagttgccctcgtgaatctgattcagagccggaatcaggaaccactggtgtaggacagggtgtttccacactggacagccccgagaaagggccccctgagcgctattggtctctgatattcttcccagacactttcccacagaaaagccaaattcagctccttagggtgagagatcacaccctggtcatctcggtacagcaatcctggagacttctggggcctaagctgcttccttcacggtggccacactgtgtcccctgaccccattatctctatgctcccctagagctcaggaaatcaggaagaaaagtggctcatccagatgcaatgcagtgactgtgaggggctggcatcaggttcaaagtggtcaggaagagggaaataagtgacagggggtgaaacaaataggatggggcagagctcttgccaactgcaagtcagatgatgtctccacatccaaacaccacagaataaatacttaaaatcatgctccagagggatcacaaaacaggctataaacttgtcccacctgcagaatctgctggggcgataaagagagccaagtagtctggataagcataatctcacgcaatataatccagaaacaaagtactgactgataagattttatagctttagagaaagagagaaaaataggctttgctgagggccctttagagctgtctcaagaggcctctgctgcctgtagatcaagggcaaactctttttactagacagtcttgccctgtcacctggcagtagtgcagtcgttcgatcatggctcactgcagccttgaacttctgggttcaagcaatcctcccacctcagcctcatgctgaatagctgggattataggcgcataccaccaagcccagaaaatttttttaatttttaaattttctgtataggctgggcacggtggctcacacctgtaatcccagcactttgggaggacaagctggacagatcacttgaggtcaggagttcgagaccagcctggcaaatatggtgaaacccagtctctactaaaaatacaaaaattagccaggagtgctggtgcacacctgtaatcccagctacttaggtgggtggctgaggtaggggaattgcttgaacccagaaggcggaggctgcaatgagccgtaattgcaccactgtgctccagcctgggcaatggagtaagactccgtcttaaaaaaaaaaaaaaaagaaattctatagagacaaggtcttgctttgttgcctgggctggtcttcaactcctaggctcaggcaatcccgtagcctcggcctccccaaaagtactgggattgagggcatgagctaccatgccccgcctaaactctaatgtgacataaaaggccctccacactccagctcaatctcccacttaggccctctttctccttaggccccaccaagcacaagtcctcaacaccgaacaacatactatttaatgaggccagcattttcccacctgcaagtctttatacacattagtccctctgcctggaataccactcccaccctcagccgcaggccccttcctttcttcaacaaatatttatcgattatccacgatgtgccaggccataaagattaagtattttttctcacagacctcatgagcttagagtccacgaggaaaaaatattagcaagtaattatacaataaagcctgatgcacatgaaggtcagggaacagtatgcttagggaacatccagcagaggcctagcttagttgaggggggtgggaaaaggcagtcctcacagaggaacttttttttttttttttttttttgagacggagtctcattctgtcgccaggctgaagtgcagtggcacaatctcggctcactgcatcctccgcctccagggttcaagcgattctcctgcctcagactcccgagtagctgggactacaggcacgggccatcacgcccggctaattcttgtatttttagtagagacggggtttcaccatgttggccaggatggtctcgatctcctgactttgtgatccgcccgcctcggcctcccaaagtgctgggactacaggcgtgagccaccgcgccgggccggacctcttaacctacatctaaacaatgcctaccaaaggaagtatggagtaaagaaaggtatctcagtattaaaagaaataagttggctggcgaggtggctcacgcctgtaatcccagcactttgggaagcccaggcgggcggatcacttgaggtcagtagatcgagactagcctgaccaacgtggtgacccgtctctactaaaaatacgaaaattagccgggcgtggtggcaggcgcctgtagtcccagctactcgggaggctgaggcaggagaatcgcttgaacccggcaggcggaggttgcagtgagccggaatcgcgccactgcactccagcctgggcgactgctatgtctcaaaaaaaaaaaaaaaaaaaaaaacacgttcaaataagttcaatgtggctggggcagagatgctagagaaagcggtgagaaactaggaaaggtgggtaaggaccagataatgaagacctttgcaagcgttccagtgtgaagcaactttaacatctaaagcagaggtgtcgtgattagaaagacgttatagatctttgtggatctgggcaaaggaagagtccccgagcagcaaagacgctcctggagtcgtccaggttagaaatgacggtggcctgcactagagacgccgcagaaaggactggagaaaaatacatgttagtcggaaaagaaggtagaatctcccgacacagtagtgaccagctggaagtaaagttgagaacggtattggtggtgactcccggtttctggatcccgccggtagccgaggggcgacggccgacccaaagctcacctccccactgcacgccgcccctggatcgagtaccttggtgctttactatttagcacacggaagtgttgttctgttgtccgtgtctccttggagaccgtggagaacagaagggccggcgggggttttcgctttgtactcctggtgcccagccggcgctgcaatccagcagaggagccggactagaaacgcggaagctctgggtgcacgcgcccggcccgggactgggcggcccaaccgggagggcggcgggtcctgcggccacgcaacaggcgttggggaagcagcagagaccctgcgtgcgcgcgggcttcggcctccagattccgcagagtcccgggcccgatccccccggggctggcctcctgccctacgtgggccccgcgcgcccacctggaactcacgatggcgaatccgtggtcacctgaaggcaacagcaccggcgcccagtgcgcctgcgccgcgcgtgcgcagagccctcgcctcccggcctcgcctcgcagacgcgasgggccggggaggaagcgctcggagcagtgcaggtttcgttatcctgtgttaggtcactccggagaggggaaagcggcccacagcgtcgcgcgacccggaaacgacacaacgaggcccaatcttttagactcgagtttaggccccggggtggagtctccggaccgggtccccccacccccgctacaggggcagtgcgcaggcgcgaggtatgtatcgcgagaccatgcggttgcccgggtaaccagacgctcaggacttggaccgtccagttgttcggaggccagcctatagccaatggtatcccgagggctcgctctctccgggcgtttgtgctcccctctctcttctaacccagtttctacctttcagtgctttggaatcttagccctctgtctctattcgcttttctgtatttgccttgcctcagggacgcacaaccccagcccctgtcccagtgagcccgtcgccatggaatccctgcagactccccagcaccgcgaaaatcaagataaaagggagaaggagtatggggtaaaacacatgcctatgggcaataatgcagggaatcttgagcccgaaaagagaaaggcagtaagagttgccttgagttcagcaacagctgcacagaatatcccgtccagtgtccactgtggctgctccaagcaatggagactcaggctaccatcggagtcgctgcaaagtcggggacaagtgatgaagcggccgaataacattttaaagctcaggaatctggatctgttgatctacccttggccagaacttagaagacggcaggttgcttctgacctaatgagcctcctccttctccccgctttttccggccttacttgggcccccttccttttcctctttacgtatctgcctccttttctcaatctcctcactgttggttttgtatcctattttctggtatagtttctgtgatttctttcttttatttattattattattgttgttgagacagagttttgcccttgttgcccaggctggagtgcaatggcgcgaacctggctcactccagccagcgcctcacaggttcaggtgattctcctgcctcagcctccggagtagctggggttacaggcacgggccaccagcccagctaatttttgtatttttagtacagacggtgtttcaccatgttagtcaggctggtctcgaactcctgacctcaggtgatccgcccacctcggccttccaaagtgctgggattacaggcatgagctactgtgcccagcctctatgatttcaattttcatgtttaagtacctatgtagaacctaactgtccataagtaaacacaacaaaaaaaagatttggcttttggtcaaagatcattggaggttacacagggtaaagtgcagtatgatttttatcacaattagaaagattaaaaagagatgacagtgagtttgtgagaacaggtttgtgtttcataaaatgaattgtgtgagttagctatgatgaactgcaagcagcttgcatttccaaagacaaatagagacacaggaatctaattaaaatgctaaagtaatgggaaggagacatccatacgtttttgtccccctaaggttccagatttatagtttgagcatcatctcggcttacattttctctgtggaaaacatcagccattacattacttggctctgggttgaaatcctaacttcatcaactgaagatcttatgacctaggcaagtttattaacctcctctatgacgtgataaaaatagtatctcttgtgcggattagaagacatgttcctctatgctaagatgattattatgtgcggaacacatagttaagtgcttgataaattgaactatggcaaatccagtctcaaccgtggcaaaactaagttaataaaaatgaaacataacctttattattttagtgcttgtgttttattttaaaactagcagtataatttccacgaggattttgctaaaattaacaagtacatttcgaaagtaatttctgtccctcttgtatcacacaaacattacaaccaaaaagtaaaaaacattctcccatgacccaatcacacccatttttttctttagtgttcccttctactttgtttcacatatgtgcatgcttttacattaaactaatacagattaagtcttctgattttctttacacataacgctttttcatgtttctcaaattattactttacatatttgatatcctattctgaagaaacggttttttttttttggagacagggtcttgctctgttgcccaggctaaagtgcagtggcaccatctcagctcactgcaacctcctcccaagctcaagtgatcctcccacctcagcctcctgagtagctgggactacaggagcatgccaccatgcctggctaatttttgtactttttgtagagacggggtcttgccatgttgctcaggctggtctcaaactcctgggctcaagtaatgctcctaccttggcctcccagagtgctgggattacagatgtgcaccaccacacctgccagttttactttttaatgacagttgttttatcctgtaaaatctgtttggtctttgtatattagagctttctttttatattaattctagaattggactactgtttgatttgtatgctttccattatttgacaatgacttaagattctgagtgatggccggctgtggtggctcacacctgtaatcccagcactttgggaggctgaggcaggaggattgcttgagcccgggagttcaagaccagcctaggcaacatgacgaaaccccgtctctacagaaaaaaaaaaaaaaaaaattagctgggcatggtggtgtgtgcctgtagtcccagccactcctgaggctgaggcaggaggattgcttgagcatagaaggtggaggctacagtgagctatgatcacaccactgcactctagcctgggcaacagagtgagaccctgtctccaaaacaaataaataaaaagattctgagtaataaattagatcattagccacaatcctttgatgaaataagtgaaggtcccaacaagaaaatttgtcaatagaagaatgtaagggaattgaccaccagattcttcttttcctccatggtattctgaccttagctgtgtgtgtgtgtttgtgtgtgtgtgtgtgtgtgtgtgtgtgtgtgtgttatgtaacagtagttgttatgtaaacaattcattattttaaatcagttactaagaataaactttaatgatgagatgcaaaatgaatactgaaagctttactaattggaacggtatagtactccaaagaatatctgtgtccatagagacaagtgaaggtgaggagtttcaagcagttgagcaattcgcaggtctcacaaaacagcaaaatcaagaccaacatgatgtcagctccctgcatctctaatcccatgggacagcattcccaatctcagaggtcagatgacaggtcttatgagtggtgggtcactctgtcgaggaacaaactaaacttcagcaagcagttctacagatttacacagaagcctgcggctccatcctaaagtggagcaggttgtagggggtgcggagaaagaaggggaagatggaaagccctagtctcaactaaactagggacatggatgagaaacagccttgtgagactctcccacaagatagggaagccctgtgggcaaggtcatccctgagctgaatgggaacctccctggcatggccttttgtgtccccactgccaacgtgtcagttgtgggcctgaactgccatctggaaaaacctgccaaataggatgacatcaggaaggtggtgaagcaggcttcagagggctcttcaagggcatcccgggctacaccgagcaccaggtcatctcctccaacttcaacagtgacacccactctttcaccttcgatgctggagctggcattgccctcgacgaccactttgtcaagcacatttcctgatatgacagtgagtttggctacagcaacagggtggcggagcccacatggcctccaaggagtaagacccccggaccaccagccccagtgagagcacgagaggacgagagaggctctcactgctgcggagtccctgccccactcagcccccgcccccactgagaatctcccctcctcacagtttccacgcagacgccctgaagagggagacaccatgggagcctcaccttgtcgtgtaccatcaataaagtttcctgcactcaatcaaaaaaaaaaaaaaaaaaaaaagggaagccttgccttgctcccagggaaatcacaggcattcggcgaggactcagggtagaccgcagtcaggccttggctctgtggctatgtggagatgtccaaggttgtcaggggtctcagcagtgctgttttatgaaaacggggaaatttgaaagacatttaatccttcctttttatccccctcctccctttcttcccccccccccgccttttcctacaggtacaatattcattgaattttaagtgttggggataaagtggtgagccagagttctaaaggaggagaaacggtaaacaaagtaaacgatttaagttgtcagatgattcaaagtgctacagaaaaaaagcagggaaggccaggcgcggtggctcatgcctgtaatcccagcactttgggaggccaaggtgggcagatcacttgaggtcaggagttcaagaccagcctcgccaacatggtgaaacctcgtctctactaaaaatacaaaaattagttgggcatggtggcgcacacctgtaattccagctactcgggaggctgaggtaggagaatcacttgaacctgggaggcagaagttgcagtgagtccagatcatgccactgcaccccagcctgggtgatagagtgagactgtatctcagaaaaaaacaaaagcaacacgaaaaagcaggtaagagtggaagggggtgctaggatgggtgataaaaggcctcctgagatgacagatgagcaaagacctagaggagtggaagcactgagccaggccgaccctgggaagataattctgaggtagagacgggagagcagcagtgcgacaggcctgttagaacagccgggaggccaagtggagcggaagccctttgaaggcaggtaagaatgagaacagaagaaagacggagagagatggccagaggctcatagacgagaagaccaggctaaagctatttcttgtctcaaagtcttcctggaggtgttgccatgtcggctaagtcttgaaggaggagttggctgttaagaaagtgggaaaaggagccaggtatggtggctcgcgcctgtagtcccagcactttgggaggccaaggcgggtggatcacttgaggtcaggagtttgaaaccagcctggccaacatggcgaaaccccatctctactaaaaatacaaaaattagctgggcatggtggcatacgcctgtaatcccagctactagggaggctgaggcaggagaaccacttgaatccgggaggtggaggttccagtgagctgagatgtcaccactgcactccagcctgggtgatagattgagactccgtctcaaaaacaagaaagagagagagaagaaagagaaagagaaaagaaaaaatcaaagagagaaagagagagggagggagggaaaagaaaaggaaaagaaaataaaaagaaaagaaggaaaagggtgtgccagacagtggagtggcaactatctaccaacgtggagaaagggaacttgaagtccttcagttacctggggtagagcatccatgcctgtgggaaatagcgagagatgtggttgaagaggtcagcaggacctggtccatcccggaggaccacatgtactgttcagccaaggagagctaaattgtcattgcagagaagagagcaaaaccatggatgcaccattcgtgaggcttgggtccaaccctacagccattacatcaaaatggtggtgggaattagggatcagactggggtttgtatctttttttccccaggtaattgaatgcactgccagggttaagaaatgttcatcgtgacagtactaaagattcaatgcaatccctatcagaatcccaaaggattttttttatagaaaaagaaaaacctattctgaaactcatgctatggtttttattttattttattttattttatcttatttatttttgagacagagtctcactctgttgcccaggctggagtgcagtggcaagatcttggcgcactgcagcctccggctcccaggttcaagcaattctccttgcctcagcctctcaagtagctgggattacaggtgcccaccagcatgcctagctaatttttgtatttttagaagaagggtttttgccatgttggccaggctggtcttgaactcctgacctcaagtgatctgcccacctcggcctcccaaagtgctgggattacaggcgtgagccaccgcgcctggccccttcttgcatctcaagacaagacacacatggctaggcaatgagatggggaatggcaacccaggagaagaaaatactttcaaaagaggtcttaaaagaacattctggatttagagaaaaaagcagagaacaatgtagcgtccatccctctcctcttctggattcttacagtgacgataattccagaatgtctcagctgaagatatggactgatacctgaactcagtgcagtatttcctgctgaaacaccacagaccgggttctgcccgcagccaggactaggctaacagagaaaggcctggctgtgctgaagctgccatgagcctcagtacccccacgggacctttcccatcatctaggacttcaaacacaaacaactgcccagtaggtttttctaacattttgcttttggtccttcacttggaaatgcactgatttcaccaggaaaatatttgtgaggagaaaaaaaaagattttcatgaaaacgcaaatattttaaaaatgtagctttatgcaaaagcaagctgaaaggtttcttgttgcattgttgtacgttgaagctcagtcactttgctgacattgagtttcttttttctcccagtcacccttctccaccaatgctactatttatgcgaagtgtcggaaattagcttctcatgtgaccacccaattcggttccagtcctttggaaatgtaatcctattcggtgtgtctgcagacttggagtgacattgggtttgttcccctagaaaactgagtcaaattgaataggcgtttagtcctgtgcctttaccataattaaaaacgagttaagctgattatagcatgtgtccagaatttaggtggttttgctttataaagagaagaggtgcaaaccacaggccactttctctcatgataaacagcgcctggaggcagcgtggaggagacacatccatcatccacgtttctaggaataatggacatgagagaagtatgtataaagaaggaatcctgtgcttcgggaagccgaggtgggaggatcgcttgaggtcaggagttcgagaccagcctgggcaacctagtgagacgccccccccaccacctctcttaaaaaaaaaaaaaacacatatatatatattttttaatttgcacttttaatttataaaatttttaatttttaacattttaaatatatataaatttatatataatttttagagaaaaaatatataatatatatatacctaggaagaccccaacctctgaaaaaaatttatatatataaatttttaatttataaaattttaaatacatatttacttattcttttttttttttgagacggagtttcacacttgttgcccaggctggagtgcaatggtgcaatcttggctcaccacagcctccacctcccgggttcaagcgattctcctgcctcagcctcccgagtaactgggattacaggtatgcgccaccacacccggctaattttgtatttttagtagagacagggtttctccatgttggtcaggctggtctcgaactcccgacctcaggtgatctgccggcctc

SEQ ID NO: 97197 - DNA, 24901 bp, Homo sapiens
gcaccaccacacctgccagttttactttttaatgacagttgttttatcctgtaaaatctgtttggtctttgtatattagagctttctttttatattaattctagaattggactactgtttgatttgtatgctttccattatttgacaatgacttaagattctgagtgatggccggctgtggtggctcacacctgtaatcccagcactttgggaggctgaggcaggaggattgcttgagcccgggagttcaagaccagcctaggcaacatgacgaaaccccgtctctacagaaaaaaaaaaaaaaaaaattagctgggcatggtggtgtgtgcctgtagtcccagccactcctgaggctgaggcaggaggattgcttgagcatagaaggtggaggctacagtgagctatgatcacaccactgcactctagcctgggcaacagagtgagaccctgtctccaaaacaaataaataaaaagattctgagtaataaattagatcattagccacaatcctttgatgaaataagtgaaggtcccaacaagaaaatttgtcaatagaagaatgtaagggaattgaccaccagattcttcttttcctccatggtattctgaccttagctgtgtgtgtgtgtttgtgtgtgtgtgtgtgtgtgtgtgtgtgtgtgtgttatgtaacagtagttgttatgtaaacaattcattattttaaatcagttactaagaataaactttaatgatgagatgcaaaatgaatactgaaagctttactaattggaacggtatagtactccaaagaatatctgtgtccatagagacaagtgaaggtgaggagtttcaagcagttgagcaattcgcaggtctcacaaaacagcaaaatcaagaccaacatgatgtcagctccctgcatctctaatcccatgggacagcattcccaatctcagaggtcagatgacaggtcttatgagtggtgggtcactctgtcgaggaacaaactaaacttcagcaagcagttctacagatttacacagaagcctgcggctccatcctaaagtggagcaggttgtagggggtgcggagaaagaaggggaagatggaaagccctagtctcaactaaactagggacatggatgagaaacagccttgtgagactctcccacaagatagggaagccctgtgggcaaggtcatccctgagctgaatgggaacctccctggcatggccttttgtgtccccactgccaacgtgtcagttgtgggcctgaactgccatctggaaaaacctgccaaataggatgacatcaggaaggtggtgaagcaggcttcagagggctcttcaagggcatcccgggctacaccgagcaccaggtcatctcctccaacttcaacagtgacacccactctttcaccttcgatgctggagctggcattgccctcgacgaccactttgtcaagcacatttcctgatatgacagtgagtttggctacagcaacagggtggcggagcccacatggcctccaaggagtaagacccccggaccaccagccccagtgagagcacgagaggacgagagaggctctcactgctgcggagtccctgccccactcagcccccgcccccactgagaatctcccctcctcacagtttccacgcagacgccctgaagagggagacaccatgggagcctcaccttgtcgtgtaccatcaataaagtttcctgcactcaatcaaaaaaaaaaaaaaaaaaaaaagggaagccttgccttgctcccagggaaatcacaggcattcggcgaggactcagggtagaccgcagtcaggccttggctctgtggctatgtggagatgtccaaggttgtcaggggtctcagcagtgctgttttatgaaaacggggaaatttgaaagacatttaatccttcctttttatccccctcctccctttcttcccccccccccgccttttcctacaggtacaatattcattgaattttaagtgttggggataaagtggtgagccagagttctaaaggaggagaaacggtaaacaaagtaaacgatttaagttgtcagatgattcaaagtgctacagaaaaaaagcagggaaggccaggcgcggtggctcatgcctgtaatcccagcactttgggaggccaaggtgggcagatcacttgaggtcaggagttcaagaccagcctcgccaacatggtgaaacctcgtctctactaaaaatacaaaaattagttgggcatggtggcgcacacctgtaattccagctactcgggaggctgaggtaggagaatcacttgaacctgggaggcagaagttgcagtgagtccagatcatgccactgcaccccagcctgggtgatagagtgagactgtatctcagaaaaaaacaaaagcaacacgaaaaagcaggtaagagtggaagggggtgctaggatgggtgataaaaggcctcctgagatgacagatgagcaaagacctagaggagtggaagcactgagccaggccgaccctgggaagataattctgaggtagagacgggagagcagcagtgcgacaggcctgttagaacagccgggaggccaagtggagcggaagccctttgaaggcaggtaagaatgagaacagaagaaagacggagagagatggccagaggctcatagacgagaagaccaggctaaagctatttcttgtctcaaagtcttcctggaggtgttgccatgtcggctaagtcttgaaggaggagttggctgttaagaaagtgggaaaaggagccaggtatggtggctcgcgcctgtagtcccagcactttgggaggccaaggcgggtggatcacttgaggtcaggagtttgaaaccagcctggccaacatggcgaaaccccatctctactaaaaatacaaaaattagctgggcatggtggcatacgcctgtaatcccagctactagggaggctgaggcaggagaaccacttgaatccgggaggtggaggttccagtgagctgagatgtcaccactgcactccagcctgggtgatagattgagactccgtctcaaaaacaagaaagagagagagaagaaagagaaagagaaaagaaaaaatcaaagagagaaagagagagggagggagggaaaagaaaaggaaaagaaaataaaaagaaaagaaggaaaagggtgtgccagacagtggagtggcaactatctaccaacgtggagaaagggaacttgaagtccttcagttacctggggtagagcatccatgcctgtgggaaatagcgagagatgtggttgaagaggtcagcaggacctggtccatcccggaggaccacatgtactgttcagccaaggagagctaaattgtcattgcagagaagagagcaaaaccatggatgcaccattcgtgaggcttgggtccaaccctacagccattacatcaaaatggtggtgggaattagggatcagactggggtttgtatctttttttccccaggtaattgaatgcactgccagggttaagaaatgttcatcgtgacagtactaaagattcaatgcaatccctatcagaatcccaaaggattttttttatagaaaaagaaaaacctattctgaaactcatgctatggtttttattttattttattttattttatcttatttatttttgagacagagtctcactctgttgcccaggctggagtgcagtggcaagatcttggcgcactgcagcctccggctcccaggttcaagcaattctccttgcctcagcctctcaagtagctgggattacaggtgcccaccagcatgcctagctaatttttgtatttttagaagaagggtttttgccatgttggccaggctggtcttgaactcctgacctcaagtgatctgcccacctcggcctcccaaagtgctgggattacaggcgtgagccaccgcgcctggccccttcttgcatctcaagacaagacacacatggctaggcaatgagatggggaatggcaacccaggagaagaaaatactttcaaaagaggtcttaaaagaacattctggatttagagaaaaaagcagagaacaatgtagcgtccatccctctcctcttctggattcttacagtgacgataattccagaatgtctcagctgaagatatggactgatacctgaactcagtgcagtatttcctgctgaaacaccacagaccgggttctgcccgcagccaggactaggctaacagagaaaggcctggctgtgctgaagctgccatgagcctcagtacccccacgggacctttcccatcatctaggacttcaaacacaaacaactgcccagtaggtttttctaacattttgcttttggtccttcacttggaaatgcactgatttcaccaggaaaatatttgtgaggagaaaaaaaaagattttcatgaaaacgcaaatattttaaaaatgtagctttatgcaaaagcaagctgaaaggtttcttgttgcattgttgtacgttgaagctcagtcactttgctgacattgagtttcttttttctcccagtcacccttctccaccaatgctactatttatgcgaagtgtcggaaattagcttctcatgtgaccacccaattcggttccagtcctttggaaatgtaatcctattcggtgtgtctgcagacttggagtgacattgggtttgttcccctagaaaactgagtcaaattgaataggcgtttagtcctgtgcctttaccataattaaaaacgagttaagctgattatagcatgtgtccagaatttaggtggttttgctttataaagagaagaggtgcaaaccacaggccactttctctcatgataaacagcgcctggaggcagcgtggaggagacacatccatcatccacgtttctaggaataatggacatgagagaagtatgtataaagaaggaatcctgtgcttcgggaagccgaggtgggaggatcgcttgaggtcaggagttcgagaccagcctgggcaacctagtgagacgccccccccaccacctctcttaaaaaaaaaaaaaacacatatatatatattttttaatttgcacttttaatttataaaatttttaatttttaacattttaaatatatataaatttatatataatttttagagaaaaaatatataatatatatatacctaggaagaccccaacctctgaaaaaaatttatatatataaatttttaatttataaaattttaaatacatatttacttattcttttttttttttgagacggagtttcacacttgttgcccaggctggagtgcaatggtgcaatcttggctcaccacagcctccacctcccgggttcaagcgattctcctgcctcagcctcccgagtaactgggattacaggtatgcgccaccacacccggctaattttgtatttttagtagagacagggtttctccatgttggtcaggctggtctcgaactcccgacctcaggtgatctgccggcctcagcctcccaaagtgttgggattacaggcgtgaggcaccgcgcccggccaatacatatttacatgtataaatttttttaaattgaaaaaattacatatgtattttaagagagttggggcgggtctctctagataaatatatatctctctctctatatatatatatattttttctctctctctctctctctctgtctctctccttctttctttctttcgaaggcattccaggggaggcctgtgccctacggagacctctctgggtttcctgcaaagaaccgcttgagaaagaatagaagagagagccaagagcggagagaaactcatttaaattctcctgtcttcgcctttccatttgcagcctggggaacccggcgtgcagtaccgctcaccgcccagcctcgcccccgcgcccgcgaccaatgggaggcggccgggccgggagcgcggccaatggcagcggccggaggagacgcggccgtttaagaagcggtgggtgcgagagggggcagagcaccggacgacaacagcagcagcaacaacgcggcagccgccaccatggccctgcaggtacccggggcgcggggaggccacgcgggaggggcgctccgcgaggggagtgcttaagtggggctccgggtgggcttggcgcccctgggagcggtcggcggtgacccgggggacacgcccactccttccccagcgccccagatggcagtgtagaccgcacctgtgcctgctgacggcgagccagggctcccagggcaacycttccggaccccaggggccgggtgagcggaaaagcaggcaaggcaggagcgccggggagcacggagcgggcctcctcctctccgtctccgagagggagtcgagatcccccgctcccgccccttcgctcgttgggacctccaggacctctcttagtgtcatactgagcagaagagatctgtgaggctccaatttaaaaatactgttttataggtatgtgaaaaaaattgttaagggtggaaaactttggaaaagacaacaaatataaagtaataattactgataataatccaatgataattccttcacccaggtgataatcactgctacatgctagggtaattcctagtatgtcctagtatgttattttccatgtgtgtatgtgtgtggcatatatctacacacatacctatgatgttattgtgtatatagttttattcctacacgtaaaacagtaatatgagcattttctcattattaaatattctaaaatgtaattttatttttcttttttgagacagagtctcattctgttgcccaggttgaggcgcagttggtgcgatctctgctcactgcaacctctgctcactgcaacctccacctcccaggtgtaagcgattctcatgtctcagcctccgcagtagctggggttacaggtgcacgccaccacgcccggctgatttttgtaattttttttttttttttttaagatggagtctcattctgtcacccaggctgtttgagatggagtctcactctgtcacccaggctggagtgcagtggtgcaatctcagctcaccgcaacctccgcctcccaagttcaagtgattctcctatctcagcctcccaaatagctgggattataggcgtgcgccgccactcctggctatttttctctatttttagtggagatggggtttcgctgtgttggccagactggtctccaactcctgacctcaagtgatccacccgccttggacacccaaagtgctgggatttcaggcgtgagccaccacgcccggcctctaaaatgtaatcttttacatgcacaaaatttcatagaacgtggctcacttctttaaccatttcagtcaggcaagacgttatcctgcgtaaagttgtaatacatacttcagggccatctgggttcaaatgtgtgcctcacttctacttagcctgtgacatagttaacctctccgtgcctcagtttctttatctaaaaatgcaggagagatacattaaatgagttatatgtataaagcatttaaaacaatgtttggcatgtggtagaagtccaataaggataagcttgtggtggaacatttagtttgtttgttttgagacagggtctcactctgtcacccaggctggagtgcaatggcatgatctcagctcactgcagccttgacctcctgggctcaagtgatcctgccacttcagcctcccaagtagcttggaccacaggcacctgccaccacacctggctattttttttttttttttttgagatggagtttcactcttgttgcccaggctggagtgcaatggcgcaatcttggctcaccgcaacctccaccttctgggttcaaccgattctcctgcctcagcctcctgagtagctgggattacaggcatgtgccaccacacccaattaattttgtatttttagtagagatggagtttctccatgttggtcagggtggtctcaaactcctgacctcaggtgatctgcccgcctcagcctcccaaagtgcttggattacaggtgtgagccaccatgccaggctttccttttttgtatcttttgtagacatttggttttgctgtgttgcccaggctgatctccaactcctgagctcaagcgatccacccgccttggcctcccaaagtgctgggattacaggcatgagccaccttgcctggctcaaatattcttgtgcgtgacttatgtgtttatactgaactctctccaaaatgatcaaaatgttctttctaaaatttcctgaaagatctgaaagtttcctttttagcttagtactttggttttctgttgttgtttgcttttaaaatacttgcaacgaggaattaagagttgaggaacatcacagaaaagcagtatgctaagaagtattaacatcgacccatgatattatctactaataatgcatttgcgtgtcaacaatattgggggaaggtaactttttttttttttgagatggtgtcttgctctgttgcccaggctggagtgcaatggcgtgatcttgactcactgcaacctccacctcccagattcaagcaattctcctgccttagcctcctagtagctggaattacaggtgcctgccaccacggccggctaatttttgtatttttagtagagacagggtttcaccatgttggccaggctggtcttgaactcctgacctcaagtgatctgcctgcctcagcctcccaaagtgctgggattacagatgtgagctaccacgcccagctgaaagtaacttttaaaaatgacaactaataactggctracatattgaaatctcttctgtctttattacctcactggcatgtgcggggatcatattggtactagtgttctgccaagatgctcactgagtggaaatgagaggaaaggtgactagttcagggtccccagtcttctatttatttacacaagaataagtatactggcagactgtcattggagtagcaaaacaaatggaatttctaattcggctatagcctcctgattttatctgaaaattacaatatgtttccatcctcaccaaagcatttaggagagctgatgtttatcctaaatggacaaatttctttcctagatgatgaagctaaaaarcagacttcttcctctagaatatgtatcttttcaagtctagggtactgatgattttaacaactggcaaaaaaagactaacctcttcccccagcccacatttgtgtgacctaagaaccctgcagttccttgagtgtgagaattttttatcttcttaattgggttgctcaatgggaaagaattgctcaagaagaccttgccaaccccctatgtgggatgaccatgttcattgcagaaagtaaagtcaggtgaggtgagagccaccctcggaggctgtcttcagcggggctgaaatgtgaaaggtaatttacacagcagcccgcctagtcagcacggaaggatgcacccaggatgtacccagtgtgagtgatgctggcgtaacttctacgccaaaggtggggtgagggagcctagtgtcaaaagttgaacaggagagagtccagggaggggctgtagtagccttaaggcagtttgtcttgcagaatcccaagctcgggtgaccgggagataatgcacaaaacattcaaccaggatgccgaggacccctcgctcaggagaaatcagctcagcattggctgcagttcctgccaaaggcagcaagcccagctctgcaacaggatactgcaaaactgtgatgcctttctctcaggatgaggcaggagaatagggtctggaggcagggaacctaaggccgattcacactgactttgtagaactaaatcaaaaccccaactttccacacctatgtaataaaaggaccggaggctactccctttgcaacctcctccccactttctgtgtggcagatggaaaattgaaagtatctctgactggttgctttctgcaaccaatcagacatttgcacaggaatgtacctttgtaacttcatttcagcctctgattggttgctttccccaaccagtcagactgatcgtgagccaagtctttatttgcatagaagtgtaactttgtaacttcagcctctgattgcaggccgctacttcatttacataggatgcacaccaagtaaccaatgggaagcctctggagggcgtttaagcacagaaaattctgtaacagggatcttgagtccctgtgctcggcctgctcccaccctgtggaatgtactttcgctttcagtaaatctcggcttttgttgcttcattgtttccwtgctttgtttgtgcattttgtccaattttttgttcaaaatgccaagaacttgggcaccctccactggtaacaagaatgctttggaattcaatgtccatggctctatatttaaagctgcatctcacctatgataactttctgatccccctaaagtctgctcgctcgttaaccatccaacaaggatgtacttaatagactcagaccaggctcacgccacccaccagcagtccgtgaggccccgtgggtgctgccaaggtgattattgattgattgtttatttattgatttgtgagtatttatgcaaccccacatagcctttatgttgagctctagtaagttctgtccacaccgctgggagcagctttccctgcccctctgcagccaacaatcgcagacccgatcccatctcatctcagggatggctttttccgttccgtaccttcccgtctgtgctacctcctgtgttcccagagcaactgctgcaccttatttgcagcaagtcccctgtggtcaccgytgccctgttcatctcccaccaggctatgagcgccttcaagcacgctgccttgtgcatgcccatctgcctggcaaaggcctggcctgtcggaggtgttcagtaagtaggtttgttaattagtatgagctgtgagatgaactctgggagggcagactccataggatcaaatcaagaatattttacattcttggccgggcatcgtggctcacgcctgtaatcccagcactttgggaagcagaggtaggcaggtcacttgagttcaggagttcaagaccagcttggccaacatggcaaaaccctatctttattaaaaatacaaaaaaattagccaggcgtggtggtgcatgcctgtaatcctagctacttgggaggctgaggtgggaggatcgcttgaaccaggaggtggaggttgcagtgagccgtgattgtgccgctgtactctagcttggacaacagagcgagactgtctcaaaaagaaaattatattcttaatcatccttaaccctagcacaaaaagaggctgatattctctttttgtggccgaagctgcatcttagaggagctttgtttgttgcatcgagtcccagggcagtgtgtctcaaagctggaagtcaaacctgagtatcctggccaaggccaatgttgtttgtactccagctcatcatggctgggatgggaaaggcctcctgcaggaaggtgcatcagaacagccccttaaggcaggaatgtattgcactgaggtgccagaaccagacaggctagacagagagaatgatgctggcccctgctctagaactgagttccctacctagggagggagaaagagcggggacccctgaaatggcatgggaaactgtgtgagggcatagctcttctgtgcagaggggtccaggactttcattagatctttttttcttttcttttttcttttttttgagacggagtcttgctctgtcacccaggctggagtgcagtggcaggatcttggctcactgcaacctctgctcctgggttcaaactattttcctgcctcagtctcctgagtagctgggatcacaggtgtgaggcaccgtgcccagctaattttttgtatttttagtagagacggtgtttcaccattttggccaggctggtctcgaactcttgaccttaagtgagccacctccctcagcctcccaaaatgctgggattacagacgtgagccactgcacccagccctcatatgggttttcaagaaggcttagaattctaattaaggcttggcacctcaaaaggagtcgagttgctgtcactggaaaataatatgagactttacagcaagcagaacacctgagatggcctataaacctacagaggaaggtcctacaccccttctgcatagccttgccctcaagcagctcagccactcatgtagcatttcaattttgttcttattataaacacaatccatgcacattatagaagatttggagagtacaaaaatattttaaaactacataacttgccagtaatcagaggcaattactgtttacatatctttagtatacatctttctagtttttattttttctatactacttacaaagctgagtgtataaaaagaatttgtgttctttgctaaaccataaactaaaagtatttcttatgtcttgctttattgcaagtaccttttttttttttttttttttgagatagtcttgctctgttgcccaggctggagtgtagtggcatgatctcggctcactgcaacctctacctccagggttcaagcgattctcctgcctcagcctcccgagtagctgggattacaggcatgtgccactatgcccagctaattttgtattttcagtagagacgggtttctccatgttggtcaggctggtctcaaactcccaaccttaggtgatccacctgccttggcctcccaaagtgctgggattacaggtgtgagccactgcgcccagcctggtcacacagctcttaagagatggagttgagattccaatcaaggcagtctggctccagagccatgttcttaaccatggcattatgtataaagcagccaagagtttcttaggaagacactcagaagacaaggcaccccttgttccatgccccgtgcttctcagtcccctgtgggaactgggtaggaggatgggccacgttcaaggttatttaggctgaagaccctgatctccaacttacaggtgattgtgctcttcacaaaacaactgttctggttgtgctactgttcgtggaccaagctgagagcccggctgcttactctctcagctcaataacgagatgcagataaactgggagagaagagatttgatttctgtagctgggtgcaaggagaaggactgcaaattattgcgaagccaactcaaaattacagagttttccagagcttatatgcctgctaagttatatgtctgcatgtaagtgtgcgttcatctaaaaccttaagtgatgaacttcttctaatatataactaagggctgagatctgaagaccttcctctggagcctcagtaaatttacttaatctggatgggtccaggtgctgcagtgattacccttatcttatttcctgctaaatcatggagggttggggagttccttcagaccccaataaaacttgtttaatcctaaatgggtcctgttaagaattccttcattatcttgtcatgcctcaagccccaggaagggcctgggcaaaactcttggtgggcttttgttaccttggagtcttcgtatgagggcacttgctctttctgcttttagtatttaacgttaaccactcagtcagtgctgaaacggttgttatggaggcctgcctgtttagccattagggaaacctggcctgccacagtactgcctgtctttggggctggaaggaaacttgaccctgccactccgctgagcccgcagggtactgaggttacagtggggctatccactttctctcctaggcctttggatccaaagggagctctggcatcagagaagaagtatggggggcagggggtggccagcatatgtccttgaacttcccctgtttgacagccagcctactgacaattcctgcttatcctgagttttaaaaaataaggcaaggtaagacacagtttagtttaaaaatctataaaggaaactaatcacaaagctctttgtagagtataaactaagagkttagaaagggaaaaggataaagatcctgggaacactcaggctctggagtagactggacttccttgtctatttcagccactggctgaaccctgggccagcctgagggtcttgcggggttagggaggtcccagttatcagagctaactcaggacaaggcttaaactacttaagtacatttggttttttgtttttgtttttgagacagagtctcactttgtcgcccaggctagagtgcagtggtgctatttcagctcactgcaacctccgcctcccaggttcaagcaattcttgtgccacagactcctgagcagctgggattacaggcacgcaccaccaagcccagctaatttttgtatttttagtagagacagggttttgctatgttggccgggctggtctcgaacycctgacctcaagcgatccccctgcctcagcatcccaaagtgctaggattacaggcatgagccaccacaccaggcttaagtacattgtatatagagtttccaggaagtctaaaaacataccactcaagcatattggtatacaaagttttccctaataagctctaaattggctaaacaactcctcttttctagaaatcagttgcaataaatcttataatttaggtctagtgtggaaaggaatctgtacaagcaattcagccaaatcaggaatagtgattaccctcagaaactggctaggtctaaataatactgatattaaagaatgtaggcatgagggcactggaagagaaacgccctagacgatggtattaactggtagcgaagcccctgcatgtagtaaagttggactgaggcagaagaggaagggcgcatctgcgaggtgattgagaaaccttcaatgagtataaataatgccaaaaaaaaaaaaaaagaaaagcagctgggcacggtggctcacacctgtaatcccagcacttcgggaggccaaggtgggtggatcacagggtcaggagttcaagaccagcctggccaagatggttaaaccccgtgtctactaaaaatacaaaacttagccaggcgcggtggcaggtgcctataatcccagctactcgggaggctgaggcaggagaatggcatgaacccaggaggcgaaggttgcagtgatccgagatcttgccactgcacttcagcctgggcaacagagtgagactcagtctcaaaaaaaaaaaagcaaactcaccatcaggttcagtggctcacgcctgtagtcacagcactttgggaggccgaggcagggggatcacttgaggtcaggagttcaagacaagcctggccaacatgacaaaaccccatctctacaaaaaatacaaaaattagccgagtgtggtggtgcacccctgtagtcccagctacttgggaggctgaggtaggagaatggcttgagccccagaagtagaggttgcagtgagtggagacggtgccactgcactgcactccagcctgggcgagagagccagaccttggctcaaaaaaaaaaaaaaaaaaagaagttaaaccgaacattttctgtattaagaattttctatagttcctcatattaggtaagtcccaggagaggtgaactcctaggaattcaagtaaattaagatgattctgatagaaccagagcagcagaagttcatttctacttggaaccttcctcttcctgctctttgagttcctattccttggtggtaaaatgctccttttgtttgtttgtttgttcttcctttaggctgattttgacagggctgcagaagatgtgaggaagctgaaagcaagaccagatgatggagaactgaaagaactctatgggctttacaaacaagcaatagttggagacattaatattggtattatatattattaatattaatatattcatatgttacaattaatatattaattgcrattataatatataattacttaaaatatagtaatatactccgtttgaacaatgtctatagaagtgcacagtaaaatgttaacctgcaaatgcatgtctccttcttttgccagcgtgtccaggaatgctagatttaaaaggcaaagccaaatgggaagcatggaacctcaaaaaaggttttttagtctttcacaagtttaaagcaaactttcttaatttcccagtgcaccaatcagggagataacctgtttgtatctttctagggttgtcgacggaagatgcgacgagtgcctatatttctaaagcaaaggagctgatagaaaaatacggaatttagaatacagcatatgaggaatttttccttttgaagacttccaaatgctatcatgacctaacatttagagggagaggcatactgttaacttgatgtatcatgtatatttttgctattagcatgagctgtagtacttagaagtatactgaaactacatagttaactcaattgtacttgcttaaaccaggtgtctttaaaagttctttttaagaaaatgtggcacatatacaccatggaatactatggagccataaaaagggatgagttcatgtcctttgcagggacatggatgaagctggaaaccatcattctcagcaaactatcacaagatcagaaaaccaagcatgttctcactcataagtgggagttgaacaatgagaacacatggacacagggaagggaacatcacacactggggcctgtcggggactagggggttaggggagggataacattaggagacatacctgatgtaggtgaccggttgatgggtacagcaaaccaccatggcacatgtatacctatgtaacaaaactgcacgttctgcatatgtatcccagaacttaaagtataaaaaaaaaaattcttttagaaaagtattttttatttttatagagttagggagtacagttgcagtttttgtttgtttgtttgttttttcttgaggagtctcactctgtcacccaggctggagtgcagtcgtgtgatctcggttcactgcaacctccgcctcctgggttcaagtgattctcttgcctcagcctcccgagtagctgggattacaggtgcttgccaccatggctggctaatttttgtatttttagtagagacggggttttgccatgttggccaggctggtytcgaactcctgacctcaggtgatctgcccaccttggcgctggggttgcaggtgtgagccaccacacctggtcacaggtgcagttttgttacatggatatattgtgtagtggggaaatctgggcttttagtgtaaccatcaccaaaatactgtacattgtacccaaaaggtaattgctcatccctcaccccctcccacctttccaagcctccagtgtctattattccacactccatgaccctgtatacaccctgtttaactcccacttataagtgaaaacatgtggtatttttttttgtttctgagggttctttaaaaatctttattttcttatttttttctgagttgtttcacttaagataatagcctccagttccacccacgttgctgcaaaagccgtaatttcattctctttatatggctgagtaatatcccctggtatacatatacaacgttttctttatcccatcatctgctgatggatacttaggttgattcyatatctttgctcttgtgaattgtgctgcaatagatatacaagtgcaggtatcttttggatagaatgatttattttcctttaagaagatacccagtagtgggattgctgggtagaatggtagttctatttttagttccatgagaaatttccgtgctgtttttcatagaggttgtactaatttacattcccaccaatagtgtataagcattcccttttctccacatctgttgttttttgactttttagaaagtctagccctggtaatatgtgtacagatttgaacagctgtttgttcttttggctcatctgttctgttacaataagttaatgttactggtgaaataaaaacaggttattaagaatcaatggcaaggctgagcgtggtggctcacgcctctaatctcagcactttgggaggccgaggtaggtggattactgaggtcagaagttcgagaccagcctgaccaacattgcaaaaccccatctctactaaaaatacaaaaattagccagccattggtggtgcacacctgtaattccagctacttgggaggctgaggcaggagaattgcttttacccaggagatggaggttgcagtgagccaagatcacaccactgcactccagcctgggcgacaaaacaagactccgtctcaaaaaaaaaaaaaaaaattacaagtctgtccatagcagtttaaagaaatttaaaaagcccccataggaatatctatttttctttaaatttttacatttaagacatttaagacaaaaaggcaaactaaaatgtatctagtgataaactgtaccactactgtaccccatatgttcagttctatctgagtaaaaatagagtctggaatataatattggccccctactcagtctttctggatggtacacaggctctttgaaagaagacagtctcatgttaacaattcaaaaaattgtttgagatcccttaagataaatatcccccaaaacagtgtacctctattccctgcataaaaatttagatttggaatggtatgaccagaggaatagatccacttcatgttactacaacaacaaaactatctaggtctgctagatgaatttccagggaattatgctgagcagaaaaagccagtccccaaatgtgacatgtataattccatttatataacattctttttcttttctttttttttttttttttttttgttgagacaggctgtcactctgttacccaggctggagcgcagtggcacgctctcggctcactgcaacctctgcctcccagggtcaagcaatcctcccatctcagcctccagagtagctgggactacaggtgcgtgcaaccatgcccagctaatttttgtatttttcatagagacagggtttcaccatgttgcccaggctggtctggaactcctgatctgaggtgatctacccaccttggccccccaaagtgctgagactataggcatgagccaccgcgtccagccaggattcttgaaagggaacatttatagacgcaaaggatggaatagtggttgccagggaggagggaggtgggtgtggctttaaaagggcagcaggagggatgatcctgcagtgatggaatgttctgtcttgattgtagcaacaccaatatcctgattgtgatattatactatagttttgcataacagttaccattaaaggaaattgggtaaaaggctacacaaatctctctgtattatttcttacaaataaaagggaatctgcagttacctcaaaaagtttacttttaaaaatcgaggttgatttctcatcgggaaaattttggcaatcaagataattctcatctttctaaatttcgcctaatgatagacgtcttccacgatgataccaaggcctaattccttcaaagagaagacatcatcaatgatagacttggtgtcttacagttgagggcttgaaaactcctgaaagttgttcccatgtggactttacctccaccaggtagagatgcaggggaaaaagcttacccccaaagcctggcatttgttccatcatgaaacttcagtttgcagactatattgactaaacatttttcaaattaataatcacgaatcctaattattattattatttttgagacagagtctcattctgtcgccaagactggagtgcagtggcatggtcttggctcactgcaacctccacctcccgggttcaagtgattctcttgcctcagcttccctagtagctgggattacaggcgtccgccaccacgcctggctaatttttttgtatttttagtagaggtggggtttcgccatgttggccaggctggtcttgaactcctgacctcagctgatccgcccgtctcaacctcccaaaatgctgggattacaggcgtgagccaccatgcccggcctcccaattacttttataccaatctttcagtaagggaaccctggaaatagtatcaaattaaaggataaagtacaacacatactacaacataatttgcttaagactatttgtagcctaaactcaaagtgcctcccccaaatagttaattttatattttttgtactttgtttaaaaagagtgataaatttaggaaaataccacctgtatgcattttccttaatcttatttactaagaccttatgtactttttatttttgagatagggtctcactctgtcactcaggctggaatgcaatgacatgatcctagctcactgcaaccttgacctcctgggctcaagcgatctttcagcctcagccttccaagtagctgggactacaggtgcacgccaccatgcctggttgatttttaaaatcttttgtagagacaggggtctcccaaactcctgacctgaaatgatcctgctactcagcctcccaaagtgctggaattacaggtgttgagccactgagcctggctcctatttctgcttttctttttctcttggttcctgtttacttccagctgttgtgctttctccctaagtcaagttcaagttattgctgagtgaggctgaggcagcctcttaggtgtgagatttgtgcttggccactccctttgtcacaggcaacactctagattggttgtccactggggggacgatccaggtcccagccagacatgccagggtggcagagccccccagtaagtggtgtagaataaactccttagaggggtggggtataggcattctgaggacttgcctgcacaggtgacaataattattttgggatctcttttaacaaagcagtaggttacattttcttactatgtggggctattctacatttgaaaaaatgagatcaagctttgagacacggtatgccattgaaacaatcatttacttcaagcatttcccctgttaatcatcttcaccattaaactaactgaaggaaaaaatggataatttactaatcatgaattttgtcgacaaacttcccataaaggagaatcaagtgagattttaataggaagataaaagactctgccagaagtatttttttttttttttttttgagacagagtctggatctgtcacccaggctggagtgcagtggagcgatctcggttcactgcaagctccacctcccaggttcacaccattctcctgcctcagcctcccgagtagctgggactacaggtgcccaccaccacgcccggctaattttgtgtatttttagtagagatggggtttcacggtgttagccaggacggtctcgatctcctgacctcgtgatccgcccgccttggcctcccaaagtgctgccagaagtattctttactggcttgacctttgtccccagatacgtaaatatatttatgtaacgaatctccctgacagtagaaaatgtgtaatttccaatctgaataaaactgagctatatctgaataactgagaagagtatgatattactttgattattttaaaagtgaaagggaaaatatctaaaaattggatatcgatgatacttctagacacttgattatgtagttcttgattaatttctcgttcgcaggatccagaagataaaagtgaccccctggaagctggtaaattttagcatttccactggttacatctttccaggctgaaaataaacaagattgtattcaataacaacaccaacagcaactaaagattcacatcaagacatcatttctttaagagctgacaccctgaagtacggttactttcaaggccttatgttctaggtgatgaagcaggagcattgccatcttggacaagcccctcattctaaagtttaccttaatcaaaaaccacctaaatccaaaaggcatcatcagcctaatggctaaggtcaccataaccataaaccatagataacatctccaaccagaaacgttccaaactcctccctgaccagagacatgttagccccaagataacccccctctggccaggaagatgacggcctcgagataaccttgcttccggccgccagaaagatgtctgccccaagaaagcctcccctcctcccagagacattccaaccctaccataaaacttctcgctcacacagaaacattccaagcttgtaataagcccctcaccctaaaaccaatatatactcttcatctgtaagagaaagtgctcctgatggaagtctgccaggagcccctctcaggttttatctaaagaaaacctgtctttgactgttaagctgcattttgtttgtctttcctctttctttaactcttacactaggtgtcctgcattttttatttctttgagacctatcagtatacagcagttctctcattttacacaagaccaacatctctccttttacactaaatacaacttcaactaattttttactcattgcagtaactactagttgacattggtcaaaaatcatcgaacgtaaatatatacacctactatgtacccataaaaattaaaaaaaaaaattttaaaagctggccaggcatggtggctcatgcctataatcccagcactttgggaggccgaggcaggcagatcatgaggtcaggagttcgaggccagcctggccaacatggtgaaaccccatctctactaaaaatacaaaaaatagccgggtatggtggccggcacctgtaatcccagctactcaggaggctgaggcaggagaatcgtttgaacctgggaggcggaggttgcaatgagctgagattgcgccattgcactccagcctgggtgacagggcgagactctgtctcaaaagaaaaaaaaaaattttaaagccatcaaacatatatttcaatacaatactcgagactaaaaataatttcaccttccatgtcctttgctatgtcttcagatccaacaaaacatgtcaagtcacaggaaagaacagccttagatggtacgttagagctataaacataaaagagctggttagtaattgtttgaaatcaacatcccagaatcttttcctgttcctaatgtcaatgaaacttggggtgggttcacttcttttctttggctactctagcagtgtaaaacatttttcaccaatggcacttctacctgtcaaagcctgcctgagactcagtgtggagactaatttccaatatctaacttctaggatgtgacacgtggcagcaggatggcactggggcacacagttcaactcaaggtaaggctggtggaaccagtcctttaaactgtcatcagaaacgaagacctctttagtaactcttagctctccttggcccagcagagggttgctctgcacagaacctcacaacagcagcaaacgtgtttattgagtcagaggctcagtgctgcactagacactaggggcacgtggagaaacaaacacagtccctgccctcttgcagctgagagactggctgggagagagacattacagaaacaatcattcaactagagagagatggaaggtgctatcaagtccagggggatggagaactgttggcaggagggaggaggtggggacagggtcaaggcaagtctcctgggaaaggggagaggatctgaagcctgaatgaatagagaagaaccagtcaaagggcatagagccagcagggagagagggaagagaaagacaacaaattaatggctaggtcaggtgtgatggttcacaccataataccagcactttgggaggccaaggcaggaggatcacttaaggccaggagtttgagaccagcctgggcaacatagcaagaccccatttctactacataaaaaaattagccaggtgtggtgtcatgtacttgtagttccagctactcgggaggctgaggtgggaggatcacttgagcccaggaggtcaaggctgcagtgagctgtgattgcaccattgcactccagcctgagcaacagagtaagatcctgtctcaaaaaaaaaaaaaaaaaaaaaaagttcaggcgtggtggcttacgcctgtaatcccagcactttggggggccgaggtgggtggatcacctgaggttgggagttcaagaccagcctgaccaacacgggaaaccccgtctctactaaaaatacaaaactagcaggacatggtggtgcatgcccgtaatgagctacttgggaggcagaggcaggagaatcccttgaacctggaaggcagaggttgcggtgagccaagatcacaccactgcactccagcctggtcaacaagagcgaaactccatctcaaagaacaaagcaaaacaaaacaacaacaacaaaaaaggctattgttcagagaacaaagtggagtattgggacaaattaaggtataagaggtatgcaggtataagtctagttggttgtcctaagagtgaaaggaagtcaccaaaaagatcaaacaaggtacaccatgatcaaactggacttctatcctctggatagagtgtggataacggatcggagggggaccaagtgtatgtgataggcccaagtgagtgggacttgcagtaatcccagcaaggatttgctcctgcctggaatgtaaaaaagcagcagcaccccacactccatcctaacaatgagaggaaaaaaaaaaaaacagagaaactgcagcatcatgacttgtcgtgaactcaacagagagctgtgtttgcaaggcaagttagaaatcaaattccaaggaagacagactcccactacagagagatggggccagtagacagggtcagatggcacaatgtccaggcggaagaggtatctgctgtacatgcgataagactcaaatcagccgaaattttaaagtgttggagacacagtgagaacggtgtgttagatggagttcccactgactcacagcctcttttgt

SEQ ID NO: 97198 - DNA, 69540 bp, Homo sapiens
aggctgttggaagatggttaaacaacatcctttaaaagatggttcacaacaaaatgccattggtgcctctgctctgaatatgtgcagaaaggcaagagacctatggagaactgtgtcccgagaggatcccctaataaaagtcaggaatattcttggaagaaggagggattaggccaggcttggtggctcatgcctgaaatcccagcacttcgggaggctaaggcaggagggttgcatgagcccaggagtttgagagcagcctgggcaacaaagcaagatgctgtcgctacaaaaaatacaaaaaaattagctgtgcctgatagtacacacctgtagtctcagctactcaggaggctacagtgggaggatctcttgagctcaggaattcgaggctgcagtgagtgagccatgattacaccactacactccaatctggatgacagagtacgacttcatctcaaaaaacagaaaattaaaaaggggagggattattgtgaggaggccaacaataaatttgtattgcagtggataaaattatgttttacgcttaataacagtggcatatatttattaaattattactacattgctactaaagcactgttctaatgctttatattctttaacttagtcgttcataagtgagtctttcatggtgttctaataggtaacgaaaagtccttttttttttttttttttgagatgagtccaaattgaagacctttgtcaacaaagtacaaaaccactgggtgtaaaataatgaaaaatgctgctgctagctaaatgtgtttccttcctttttttgaaacagtgattccagggtgaatttccactgattaataagatgattacctctgaaaaaaactttaaaataaaattaaacacaattttttagcttttggtaactttgtgctgagtatttttgcttaatgcctagaattctgtatggtttcctcccaaggaaggaagaggaaatggtgcgtggtgtggtggtagcaacttgacctcaactaagtcaaatttcatcaggaggctggaagtggtgaagagcccatgttagcgatcctccagtttgacaagttgtggggagttgtgtttgtggtttggtggcaactatgttttttataaacatctttttaaaaatgttatgttttccctatgtatgcgccccagttctctgaaagttgcccatttgtatgtgcacttataaggaggtgaatcaaagccacttgctgatgcccttttcctttcgttcattcatttctcaaatagtcattgagcagctcctacttgttcaggcctttgctgatcactagagatgctgcaggaaacagaacagaagctctggagcatggcgctttctttccagtcgagggagatgaaaaaccaggcaggaggtgggagaggagctcttatggaatgctaactataaggcggtgcccaaaacactgtgtatcaaggtaaataatattttgatgcaattatttttaagaaataaaaatcaatgcaaaaaactccatggtgaacaaaatgtccaaatttatatttataacgtgatatttgcggataaatgcaaagaagaaaataaagcaagatggggtaatgtgatggcagagcagtgctattttggatggagaggtcagggaagatggctccaaggaagggtcccaggagcagagggctggatcccttgagggggccagctgggaacacatgaagagaaagcgcgtccctggagaaggatcagcaagacatgtgcacagaggtaggagaagagggtggccagtgtggctggaacctaataaggaaaggaacagtggccaacattagctgggaggggtggccaggggccagttcattcaaagctttgtatattgccagaatattttgaatatttccctaaaactgcaaattaaaagtaatttttgtcttgaattatctcaggacttgcctcagttttctactttgttttaaccttctttgggacaccttcctgtgtatgaccttaaaggatggttgcaaagttcttcaaacatttttcatatctactgtcttagtccattttttgcagcattaacagaataagaacagatttatttcttgcagttctggaggctgggaactccaaggtcaaggggcctgcatctggcaagggcttttgtgctgcatcatcccaaggtggaaggtggaaggacaagagagcaagagagggccgaactcaatgttataacaagtccactgtctcgatcactaactcactcccaagataacaacatgaatccagtcatgagagcagagccctcatgacctaatcacctcttattaggccccagctcccaacactgttgcattgggattagatttccaacacatgaaatttgggggacacactcaaaccatagcagacagtttaaaaaatgtttaatgccaactcttaaaatgagttatggtaagctgcagctacggaagagcatatgagcagagctaccaggaaatcaaacctgccatggctcagaagtctgaaatgggccgggggcagtggctcacgcctgaaatcccagcactttgggaggccaaggcgggtggatcacaaggtcaggagttcgagaccagcctggccaacatggtgaaacgccgtctctactaaaaatacaaaaaattacctgggcgtggtggtgtgcgcctgtaatcccaccactttgggaggccaaggagggcggaccatgaggtgaggagttcgagaccagcctgaccaacatggtgaaaccccatctctattaaaaatacaaaaacttagccgggcatggtggcatgtgcctgtaattgcagctactcaggaggctgaggcaggagaatcgcttgaacatgggagatggaggttgcagtgagcccagattgcaccactgcactctagcctgggcaacagggtgaggctccatctcaaaaataaaaaaattatataaaaaaaagaagtctgaaatatttgagacctactgtaaggacttactataacagcatttaaagtactggttcttagcctgaggttcagaaggctgtgagtaaaatacaaacatgtatacgctatgtgaaatgtcgtatgtgctaatcaatacttttctggagatttagttcaaagttttcatcaaattctcaaacaggtccaatgactcccaaaaggttaagaaatactggttttactagagggtaatgattttcctttttatcatttcattcctctgcttccccaaaaatccatggcttggctaggacaaagttgtctccgaagatgcttgtaagggaataacctttattagttcattcaacaaggcagtggaagaagaagcagacaatgatgacatctgcttcccagtagagccgggagaataaaacggctcaagtccaataaagcgctgaacacagcacctgacatggcagccagctctcaacacatatttgctaccaatgataataaacctcacaaaagttctagctgtgtatagtctgaggcacagagtagcctagagaccaatattctaaaagaggaaaccaatgaggaagagaaaaaagtccagctgcctgagctagaacaccagcacagccagtactgctgggttttatcagcagcatttggggaagcagttaagtcagacgggcctcatcggagacagcccctcatcttatactccttttactcagcagctatgagaccctgaacaaagacaacttgcacatctgagtcttggggttttcatttgtaaaacaagagggattataccctctaactcttaaggttattgtgagcccaaagtgaaaaaatgcctacaaatctctcagtgcacgcatggtcatggcttaataaagagccgctatttttgttttttcttccccaaatgagaaaagaacactggtttgagtctttctaaagatgctggtgtttctgctcttctgtatttgactttctttcctttgctgtgagaaagaactaatcctagcactcattcccgggtctctcactgcctatgtgaccttgaaggagtcatttgatctttccacgcttctgtttcctcaccagtaaatggaattctaatagtactaaccagttttagtatctgccaaaactaggcttttcacccctttctcaatgaatctgtactttcttttggtttactgaggaaatgtactcatatattgagtgtgccaaagactcttctaggcactgatgatacaatgtggaataaaagtcctggccgggcttggtggctcacggctgtaatcccagcactttgggaggccgaggcaggtggatcacctgagatcaggagtttgagaccagcctggccatcacggtgaagccccgtctctactaaaaatacaaaaattagcccagcatggtggcgggcgcctgtaatctcagcgactggggaggctgaagcaggagaatcgctttgatcctgggaggttgaggttgcagtgagccgagatcacatcactgcactccagtctgggcaacagatcgagactctgtctaaaacaaaacaaaacaaaatgaagtccctaccctcatagagcttacagttattgtggttagcatagaaataaatcataaatcaatcagagaccaactaattaaagggattattttttaaaattctcattaatcacagtaacaagtaccccaagcttacatatagcccttgaagtttccacatccacgtattttctgggcaactcttcccaagtaaaaaatattttcagcgtttttatgtttcacgtaggtcaatagggtaatatccaatcataaagatctgccttcttggcaatggagaaattttcccatcatatatatgtacaaatacatacatacatacatacatacatattaatgacagagtcttgctctgttgcctaggctggagtgcagtggcataatcataagctcactgcaaccttgaattcctgggctcaggcaatccttcctaccccctcagcctccggagccgctaggactacaaaagcttaccacaacgcctggctaatttttctttttctttcaagatggtgtctcaccatgttgtccaggctgacctggaactcctgggctcaggtgctcctcccgtctcggcctcccaaagtgctgggattataggcactttcccataatatttataataattaaaggaacaaacagagagatagacaatcgcctaagagcagacagacaatcatgaatttttagcaagggatttgtgttcttatagataaaatacagcctgactcttggaacgggcatggcaacatcagtgtatattttataagaactattatatcgtctattaatgatacttgattgttaataaaatttttttagcctgggcttcaggaaactgtgaatgaaatacacacacgcacaaactgtatgcaaaatttcacacacatgccatctacaatatgcatggcaacaccagaaagttccaggccttaagggagggtcttacttcctagaatctgttgtaacatcacttcacaagatttgttgtgagtgcttgagtcacagttggcgctcaagaaagatgcgttctccttttaaacacaaaaatgtccattgatacagcagattccgttcataggcatccttaatcgcagaaacaggagggcggcccttttcctcaaggcgctctcagtccagggatgtgcccgctccgcagccacacaagctggcgtgggatagggtcaaagagcggtggatgcgcacgggccgcccacgccctcgctgccctcccggagcgtgggcgagtgattccgattgtgcagcagaaacccagggtctcacgggaacgaggaaacccgcccacgcccagcctccaagcgacgctctccatgacaaccggcacttggtaacggcctcgccctgccccgctacgccgcgcctagcgtgccgccccgccccgccccgctacgccacgaccagcgtgctgcgtcacggcggtgcgccggaagtggctgcggatttcgccggaaatcccggaagtgacagctttgggggtttgctgctggctctgactcccgtcctgcgatgggttgcgacgggggaacaatccccaagaggcatgaactggtgaaggggccgaagaaggttgagaaggtcagtgatgtgggccggctcttggcgaccgggggtggtgggaatttgacgaccccagaaaacgagaggaagtaagaagggggagccagcggagttccagacctggctgcggtcttttattccattcagaggactcaaaattaacaacagtattaagagtggacattcaatgggtgctgactattgccattcactggacagtaatcttaacagggggtatctcatgtaattatcacaatagccctatagctacatactgttgtcctcattttcagacatggaagttgaggctcaaaaggagaaatttgcaaagctagtaaatggcagagccaggatttgaaccctacctgcgactagtagyaataatacaaatacctagtgtatactgagttttgtatacactaacttcatttgctcagagaagccttcccaaactgttcccttaccacatccttttataaactgtcttagcctgcacacggctgtacgtggttgatttgtatcaagtcttccccgctagacggtaagttcctgatagcagaggctgtaccctttttttctctgcaactagcatggttcctggcacactaaatatttcgaataaacaaatgagtgaataatccctgatctcacaagtaatcgaggaaattataataatttctttgctactgacggggacattgagtccagggatattaaggtgactaagatcacacagctggtaggtagtgaagccaggattcccatccacttatttgggatttcaaagttagcacaagtaattactttttaatgataaaatatttgtaaagcacctagtagagacttctttacaaaaatatttgtaaagcacacgtggagacttcatgtattctgattcaggagctggagagcttgtttaaaaggtaaaccccttaagtcactattgtatttgaagcattccagtggcttcccatcacattaagaataaaatctcgtcagacccttgagcagaccttgcctatgtttctgacctcatcygcccctctccacctctttcatactgttctagctaaacaggcctcttgttcttcaacctggagtgtgagttcatcaatctgaaatactcttcactgagattgtcacatgatgagtttctttacttcattcagttttttactcaaatgtcatctgtccactgtaactgaaatgtgcctcacttccaatattctctcttctcttcttaacagtgcctaccactgtgttgtttattgtctctttcccacgtagacaggaaccttgtgtgtcttacctctgtaacccctaccatgtgtcagccacataatagacacctaataartatgtgtgaatatgggaatgaatgaatacccaagaggatgaagtgtaccctctgatcatacgtacatgtaaacaggcgaatgctggataattagcattcatgagtggttttttggctttcaccaaaaaagtgtttagctcagttttgttttcttgtgcccagggctgaaaaggagtagcttaatgaaaggcttgacaagaaacaggtgtcggaagagggtagaaaagaaggaagagcgattcaaaaaagccagaatgcctaggcaggatggatttttattataactattcacacaacaaatgcttaataagtggttaccatatatacattgttgtaggccccagggatatagcagtgaacaaggcagagtctagccctggtggarcttacatttcggatcaatattgtgaaatctgccctggttcctaacgcagagcacctaaattccttgtaatttcctgggtgacrggatcatcttttgttctaataaggcaattattggtgggctcctggatggggcctggtcaccagaaacaccaagccaagattagaagcctggaactttcagccccacctcacccccatccttcagggaggagaagaggaattggacatggagttaataatccatcatgcctacgtggtggggtctccataaagatccctgaagttgagggtytggagattttctgggttgccgacaacatccacatgccaggagagttaccccaactccatgaggacagccctgcacttgggacccttccagattacttctttatctggctatttatttgtatcctttaaaatgtatttgtaataaatcagcaatggtaactaaactctttccccatatctgtgagacactagcaaatcatcaaactgggcggggggatcgtggtagcctttgatttatagacagtcagaagtgcaggtgacaacttgaacttgtgattggcatctaaagtcggggtagggacagtattatgggactgagcccttaacctttgggatctgaggccatatccaaataggtggtatcagaattgagtttaattgtaagacacctggctgctatcagagaattggttggtgtggggaaaatcccatacattttgtccgaagtgttctggaagtattgagtgttgtgagtgaaagtatagaaaaaacacttgtctggccaggcgcggtggctcacgcctgtaatcccagcactttgggaggctgaagcaggcggatcatgaggtcaggagatcgagaccatcctggctaacacagtgaaaccctgtctccactaaaaatacaaaaaagttgccgggcatggtggcaggtgcctgtagtcccagctactcgggaggctgaggcaggagaatggcgtgaacccaggaggcagagcttgcagtgagccaagatagcgccactgcactccagcctgggcgacagagcaagactccgtctcaaaaaaaaacaaaacaaaacaaaaccacttgtacttgtctttccagtacagatatgtaaaaacttaaaagaagaaagaccctaggaaagaagagagaccctggtaaacacattttttactgctttttcgggggaaacaattttcaaagccctggataaggagtgatttgtcacttttctccctgtccccaactctctgaggtgctttttgaatataacctaatctcttggtgcctcactttcctcatcttcaaaagtaaaaatactaactcatagagtttttctgaggattaaaaagttatggaaactgcttagcacagtgcctggcacacagtaagcacttaagcagtttttactttaaaaattaaattcagagggccaggtgtgttggcttacgcctgtaaactcagccctttgggagattgaggcaggagaatcacttgagctcagcagttggagaacagcctgggcaacacagggagacctcttaacaaaaataaaataaaattagctgggaattggcgcttgcttgtagtcctagctacttgggaggctaagggggaggattgcttgagcccaggagaattgaggctgcagtgagctgtgattgtgccactgcagcccagtctgggcaacagagcaagaccctgtctcaaaaaataaattaataaaataaattcagcaggattgtttttgtcttctttttttcttttctcttcctattttcttccaaatgtgctgtcctgttaaattattcagatttggcatttgaagaatgggaaagagtggtgcagtctacacagtgaaggaaaaaacaagaacgggaaggagtgggacatggaatatgatgtatgtgaaaatgtcattcgagggccagggagggtcttatgtctggattttcatactggggataaagtttgatgtatcccttagtgaataagccccaaaacacttatttctgttaaattgaacattttataaagaattatgtagtctttgttctgarctttaaaaaaaaaatgcttgtcttctcagttcttaagtctttaaattctgccgcaacttagcaggctttcccattgttagaaattaatctaacacacttttttttttctcttttgtatggcctccctaagttattattaagattcagatgttaatatttgtatgtggcttgcataaacagtttaataattttatataatcttctttttctttgtacatgtcatatttagatgggcgtttatttgatgtagtattaattacttgtgacttttaaaatcctgacttcagccaggcacagttgytcatgctttcaataccagcagtttgggtggctgagatgggcggatcatttgagtccaggagtttgggggcagcatggcaaaaccacgtctctacaaaaaatacaaaaattagccagccctggtggtgtgcacccatagtcccagctactccagaggctgaggtggaaggtttgcttcagtccaggaggtggaggttgcagtgagtgaagattgcgccactacactccagcctgggcaacagagtgagaccccgtctcaaaaacaaacaaacaacaaaccaaaaacccaacttcctatgtcattatctttgatttaaaaaacaaaaatcattacagtgcggtattactgaatatrcttttatatgtagaattgtgaaccatgtgtctttcagagttgaaaattaattgaattttttgttttttattaggtcgacaaagatgctgaattagtggcccaatggaactattgtactctaagtcaggaaatattaagacgaccaatagttgcctgtgaacttggcaggtatggtttttacacttaatcaagatgagtttgttaagtgattttgaggagaattttgatgtgtaaatgcagttttccattcatcaagcgtggattatcccaagcaaatttgtgaggcataggctgtcgttccctgtctctgaacatagttctgtactcttctagtcagtttggtttatttaatccatggtttgaaaactgaggggctgggctgagcgcagtggctcacacctgtaatcccaccactttgggaggctgaggaggaagggtcacttaagtctaggagttcaagaccagtctgggcaatgtggtgaaaccccacctctacaaaaaaattaaattagccaggcacctggtggctggcatgatcctgtagtcccagctgttcaggaggctgaggcaggaggatcctgtgagtctgggaggttgaagctgtagtaagctataattccaccactgcaccccagcctgtgcaaaaaaaatagcaaactcaggggccaatagaagctaaattataagcataaacacatgaaggagccatgtgaggaacaggagagaatggcagggaatggagaatactggagggtccatgtgctgtccaaagcgggagctgccactcagttccagccagtttttacagctcaatggtgttggcctagtgattccacaccttctggttttaatttttttaaaaaaagaggaaatacgtacttatacgttaaatttcccaattaaaaaaagccttgttcaggttacattcagccttctgactgccagtttgccacctttgatttaaactaatttctggctggacccattggctcatgcctgtgatcccagcactttgggaggctgaggtgggtggatcacctgaggtcaggagtttgagaccagcctggccaatatggtgaaaccctgtctctactaaaaatatgaaaattagccaggcatggtggcaggcgcctgtaatcccagctgctcgggaggctgaggcaggagaattgcttgaatccgggaggcggaggttgcagtgagctgagattgcaccattgcactccagccggggtgacaagagtgaaactctctctcaaataaataaataaataatttccttctttgtatgctctggaaatagttgaaacagggttaaatttactttttaataattcagggtatttctcttatcaaatgtaaacgacttttggattgtgttcagtttattcttccttctttggttatttgaaagtcgcttgttgacataatattctaatacttactattgcagactttataacaaagatgccgtcattgaatttctcttggacaaatctgcagaaaaggctcttgggaaggcagcatctcacattaaaagcattaaggtaacacgagtgattctgaagtgctgtgagggtctgaacagtggctgaggtttattttatagaatttatacgccttaaagrctgaactcagaaatttgggattccattcccacatggccatctaatacaggtatgatcttgagaggtcacttaaatctcaagccacgagttccaccatgcatacttcctacattataaatctgttgtaatttcacctgtgtgttgtgctttgaaaattttgatgttctctattaatgttaggaggcattatttttgtaattaagattcacctacttggattttggatttggaagatacttttgtgaattagataattttatggatcactgttaaatcacgtggctaccatctggtgattagaggttctgattggcagttaaagttctttcataaaagttgaaaaaacaagtttttttaataagggaaatttcttgagaggacacaactttttaaatatggtcagtggggaaaaaaacttggaaaggtartgaagaatttgagaaccatcaggctagtcaaacccttcatctcactgtaaatgactcacttgaggccccatggctagcgaagtacttaaaccagaaccagatcccctaactcccagtctaaggctctaggttttgccttctttttctttctttctttcgtattattaggctttttgttcaaatgcttggggttgattataggatatgttcatttcaggcaaattcataattctgaaatgtagctaatgatagtgctctagaaattattctgattttagtggtcttttaccttgtggaagagaatttattcctgaaaaacctgtggtagtatgaatcatcttacatcaaaaatgtgataaacgattctttagtagttcataatgctatgattgggtttccatgtgcacatgtaagatgtgcctctctcaagccttgttgtgacatcagcacattacccatctgatgagaaaaaaaaacagttattgaaattaattcatacagttctatacttaaaatacttgtaatattcagttttatgtggttgaatatttaatggaaaaaaactccaagaaattagaacagtaaagaaaaaaagsatacaaataaaacaatgctaatacataagattgtcattaccgtcaattgatagtccacaaatactcggagcagagaactcagtgagacgtgctcattctcgaccaggaagctgatcgtatgaatggtgatttgcctttcaagacactcacctgctctctagagtattgaagtcaaaatggtctcattaaatatgaagaaatgcctcgaatgcaaaagtagagttactgtatcaaattccttataaagttgggaattcttgaaaacctgaatagctgtgtcttggagtgtgacagtattttctggctaatattctgccttagctcgttagaccgtggcctcagattttactgtctattcaatgattttatatatatatttttttgtttttgcttttttcaacgattaaataaatgtagatagtcagtaacatgaagcagcctcagagaggattcatcacagggagaaagcattcccttctgggtggaactcatgcagagctttctgttagtggagtaattttttatgtaagagggtacttttccttaagttaaaaagatgtggatagtagaaataactgatttacttgctagtcagtgaattgaaaaaaatcttgttttctgttttcttttttttttttttgagacggagttttgctcttgttgtccaggctggagtgcagtggcacgatctcagctcactgcaacctcctcctcccgggttcaagcgattctcctgcctcagcctcccgagtagctgggattacaggcatgttccaccacacccagctaattttgtatttttagtagagacggggtttctccatgttggtcaggctggtcttgaactcctgacctcaggtgatccgcctgcctcggcctcccaaagtgctgggattacaggcatgagccaccacacccggccttgttttctgttttctatatatggtttaatattatatccatgtttcttatggaccagaggaaagtaactgtgagggagaggttttgatgggaagggctggaataacaatttgttgactyacgtggttaaggcaaaggatgatctgtttatcaaatgaattgttaaaatattaatggtttttcccagaatgtgacagagctgaagctttctgataatcctgcctgggaaggggataaaggaaacactaaaggtgacaagcacgatgacctccagcgggcgcgtttcatctgccccgttgtgggcctggagatgaacggccgacacaggttagtgacggacctgggacagatgatgtgggaggctggaggaatactgccggttttggtggcagtggtgccggagcttagcagtcatgtggcttgctttctggtgtccttgggtttggtggcgccttggaggaaatggtgcttggtcatgagcacgttcatttccrtcagccattgctacgggacttccagcgagatccagcctggtctgcggccttccgttcttgaggtggggaaacaaaacctgaagtgaagtgggattctgaaaagttctcatgtgacgcttatgaaacctgagtttagttcttagatcatcttttcctgtgggacagaaagcaaagagcaaatgtttcctatcaagcaaatcccatttccttcctgttactaatttttaatttttattatgttttatagttttatttttatcctttttttttaagtagaaataaggtctcactttgttgcccaggctggtcttgaattcctggcctcaagcgatcctcctgcctcagcatcccaaagtgctgggattgtaggcgtaagccaccacgcccggccactaatttttatttttgtagagatagggtctccctatgttgcccaggctggattcaaattcctggcctttaacgatcctcccaaagcgctgggataacatgtgggagccactgcacctgattacaaatgccaaaagttatgcagtaacaggcagagttatagaacctgtggttaatcagtcaaccaaaggctcaaaaacatggtaatttgccttgaatttgtagctaacagattctctggctgtagcactgggaatcttatggttgagatgtgtgtagcaaatgtaagcaacctgtatattttcctctttaaaaaatacggacggttgaatgggttagtacatgctttttcataggatgtctcactaagcaaaagcgttaagccctttcccccacttttgagaagtacagtcatacctcggagatattgtgggttctattccagactaccacaataaaacaaatattactggaaagcaagtcacacaaaattttggtttcttagtacatataaaagttgcctttagcagctcacagtggctcccacctataatcccagcactttgggaggccgagacaggaggattgctagaggctaggagttagagaccagcctgggtaacatagtgagaccctgtctttacgaaacaaaatttttttttaattagccagccatggtggcatgtacctatagacctcgctacttgggaggctgaggcaggaggattgcttgagcccaggaattcaaggctgcagtgaggtatgatcatgccactgcagagcctgggtgacagagtgggaccctgtctcaaaaaagaaagttatgtttatactatagtctagtcttttaagtgtgcaatagcattatgtctaaaaacaaagtacctatcttaattaaaaattattgctaaagaatgctagcaatcacctgaaccttcagcgagtcatcatctttttgctggtggagccttgatgttgccttgatgtcgatggctgctaactgatcaggatggtggttgctgaaggttcgggtggctgtagcagtgtattacagtaagacagcaatagaatttgctgcatcgattgactctttcatgaaagatttctctgtatgtagcatgtgatgctgtttaatagcattttacccacagtagaccttctttcaaaattggaatcagttgtcttaaaccctgcaactgctttatcaattaagcttatgtaatatttcaaatctatcataacaatattcacagcatcttcaccatgggcagattctgtctcaagaaaccactttctttgctcatccataagaagcaactcttcatccatttgggttttatcgtgagattgcagtaattcagtcatcttcaggctccacttttctcattctcttgccattctaccacatttgcgttacttcctccactaaagcattgaacccctccaagtcgtccatgaggggtggaatcagcttcttccaaactcctattaatgttgatattctgccctcctctcatgaatcacagattttttttgtttgttttttgtttttttgtttttttgagayggagtccagctctgttgccccgtctggagtgcagtggcacaatctyggctcactgcaacccccacctcctgggttcaagtaattctgctgcctcagcgtcccgagtagctgggattacaggtgcccgccaccgtgcccagctaatgtttatatttttagtagagacagggtttaccatattggccgggctggtctcaaactcctgacctcagatgatctgcctgcctcagcctcccaaagtgctgggattacaggtgtgagccaccacagcgggccaaatcacagatgttcttaatgacatctagaatggtgaattctttccagaaggttttcaatttactttgcccagatccatcagaggaatggcagaggaagcctatggcagctatagccttatgaaatgtatttttaaataagactttaaagtcaaagttccaccttgatccatgggctgcagaatggttgttgtgttagcagccatgaaaacaactttaatcttgtacatctccatcagagctcttgcgtgacctaggtgcattatcaatgagcggtgatattttgaaaggaatcttttttttttttttttttgagcagtaagtctcaacgctgggcttaaaatattccgtaagccatgttatagacagatgtgctctcattcaggcttggttcttccatttcgagagtacaggcagagtagacttaccatcattcttaagaaccctagggtttccaaacggtaaatgaacattggcccaactgaaagtcaccaggcacgttagaccttagtgagagtcggcctgtcctgatgctttgaatccaggcattacttctcctttttagcagtagaagtcctggatagcatcttctttcaatacagggctattttatctacactaaaaatctgttgtctagtgtacccatctttattaatgattttagctagattttctggagaacttaatgcagcttctccatcagcacttgctgcttcaccttgcacttttatgttatggagacgccttctttccctaaacctcatgaaccaacttcttccagtttccaactcttcctctgcagctttcttgcctctgtcagccttcatagaattgaagagagttagggccttgctctgggttaggctttggcttaaggatctgtcactgtggctagtttgatcttctgtccaggccactaaaactttcttcatatcagcaatacggttgtttcactttcttaccattcatctgtttatagagtggcacttttaatttccttcaagaacttttcctttgcatccacagcctggctaagtgtttgatttgagaggctggattttggcctgttttggctttgggcctgccttcctccctaagcttaatcatttctagcttttgatttaaagtgagagacatgcaattcttcttttacttggacacttaaaggccattgtagggttctcaattggcctaatttcaatattgttgtgtcacagagaatagggagaactgagaaggagagagatgggggaatggccagttcatggagcagtcaaaacacacacatttattaattgagtttaccatcttataagagtgttgttcctggcaccccaaaacaattacaaaagtaacatcaaacgtcactgagcacagatcaccgtaacagatgtagtaatcatgaaatcatttgaaatatttgagaattaccaaaatgtgacacagagacatgacgtgagcacatgctgctgggaagatgctgacacacctgccagatgcaggattgccgtgaaccttcagtctaaaataatcacaatatctgcaaagcgcaataaaacaaggtatgcctatatccttaatagctggtagtccagactgccctctggaatcttctgttaaacacacaacatactgaaaggtagcattttttattactttcattcaggaaaggggtggggcaaagcatctcgagtaagtaaaaatggtttcattgaactttaaacagcagtatttaatcctgagcattctggcacattggcgtctgtttatttaacaggtgtacatggacaccctctcagtgtgccaggccgtgttgcgtgtggcagactgtgcgaggggaactaactgtcctgttctgaaatggaacaacgaggggcttcatggatttggagagaagtacagtttagggtccaaggaccttttgcttttaaatattacactcttcttcaaataatctgaatttaaaccgcttagggctctcttttaaaccaccattggggtcaagtaagacatattctggggaaccagactcatttacctaaccatgtcccacttctgtatatgtgtgtgtatgtgtgtgtgtttgcatatatatatacacacacatatacacacacgtatgtatatgtttgtatttcaggtgaaagtcacataaaattggccattttaaagtgtatgtttcagtggcatttagtacattcacagtgttgtacggtcaccacctctatctggttccagaacatttttatcaccccaaaaggaaaatcctctgcccattacataggtactccccattgccagtctgtttctgtctcaatggatttacctcttctggatatttcatatgcatagaatcatacaatatgtaacctttcgtgtttggcttcccacttgcttttaagaaaactagctcaccccagaagaggaacttagcagaaacgagctccacaatggggtctcgagtaggagtcccctgcagcctgttgctctgattgtggcttcccctgttgtttctcctttggtttgctggtcagtctcttctcctttttctcttacccagtgaattgagctttgcttattttgactttgtccatctgttattgataagagcctccacacttgaaattgatgattsgattagtttgtgtatggtcatcccttgatatgtgtgggagattggttccaagaccccctgtggataccaaaatccatggatgctcaggtctctgatataaaatggtacagtatttgcatataacctacacacatcctcctgtatactttaaatcaactcaggattacatatgatacctaatacaatataaatgctgtgtaaatagttgttatactgtattgtttaaggaataatgacaaaaaagtctgtgcatgttcaatataaatgcattcatttttcctcccaaatatttttgatccggtttggttgaattgatagatgcggaacgcatggatatagaggatatagagggccagctgtatttagtaaagtttgtataataaagatttaaatatatagaaaaatggaaataaactgttagtgtaataaaaacattgggcctttgtaaaaagaaaaatagcttcctaataatttgtaagtatctataaaataggattttaaaaattctaaacaacattcagtgaatttagtgcagtgttatgaactggattttggttaggccaatctgcgtctgctataatccctgggaaattagagaaaatttgtcctttggcatttttcaaggaatgcctaaagtgaaatatgaaagtgctttatgctgctctccagccgcggtggaggcattattcgttgtttgatgtttaatgctccctcccccacaccacacacccatatccacgcttctccacgcctctgcatatagacgtagaaatcgacacgtattcttcccaaactctcatggggtcacattatatgtatttaataacctctttttttctttctgttctgtccaccttggacatattttcacaaccttgaatacagatttaccttctttttaatagccgtttgggtgtttataatttatttgaccatttccctactgaggaacatgtaggtggcctccttcctttcctttttaccttgctatactacacaacttcctgagcacacatttgtacatttgcacacttgtgggcatgtttctgtaagaagaaactcttaaaagtcacactttacttgatactgccaaattatcttcctaaagtattgtactgtgttgtatccacctgacaacaaatgtgcctgtatcctcagtttccaattggatactttcaatctcttttttttttttttaaagcgacaagcgacagaatctgtcccagttacctaggctggagtgcagtggcgctatcatagctcaggccatcctcccacctcagcctccctagtagctgggactgcagggacccaccatcacacttggctaagtttttaaaaagatttttttttagagataggttctcagtatgttgcccaggctaatctcagactcctggcctcaagtgatcctcccattttgacctcccaaagcactggaatttacaagtgtgagccactgtgcccagccccaatctcctgaattactgcccgataggtaaaaaatgatgtgtcctggtttcaaaaggcatttcttttagcatttgaggttaagaatcctttggtctttatatattttttgtacgaactgcatgttagtcctctttggccatttttctattatagtgttgactattgctgtataagacctttttgaatattcataaaataagctctgaatcttatatttattgaaaatatttcctccctgagttcctgttcttttgacttttgatgtttgtggtttcagttttgatcttttttttattttggatataactgatttatttctttttttcctgccccttttctatgagaacgtactgatttttttaatagagtaaaatgtaactattttaatctttgtggttcttggcctttgtatcaaccgaataaatgtgaattgatcatgtgattaatacagtccttcccccactgggttatttctccaggttctgcttccttcggtgctgyggctgtgtgttttctgagcgagccttgaaagagataaaagcggaagtttgccacacggtgagttcctgacatgtaccatttgttccttctctgtagctgaggaaatcrgatggtttagggtcctttccctccatttgttctttctgaaatcagctctcataagttgcttttctgcttccatggctcttggttgctggaagtgcagaatccactggcctcttgtcacctgaccactgcctgccagtccaggtcagaccacacgagggctgtttcctgaatgtgctgctgcctcagtttcctctagcagacctgctgtcctggagggcctgctcccccatgagcccccattccatagttcttacttcttccgtgactccctggtgctaaacctccttccacattccccaagcaccttgttttctcactcctcccatcgtaatgtaattgcgtatgtatgtgtctgcttccccaccggacttagtttttgagggtaggaaacaaggcttgttcatctctttatccgcagggcatattctctccagagcacgtagcgtgccctcagtaaatgctcgcatgggtggcgagtaactagacatgagagctagcctcagctcacgtggaggaaatactgatgctttgctttaatggcgctgctgctgctgaagccagaatgtgtgtgtgtcttgggtgtactgctggcccatcgaaagcgtgctgcttcatttaacgtcatggatgccggcagcttctgactgtattttcctgtatcaaccctgtttgtatttcattcccctccccactgtgttgttgctccctgttgtgaaagccagcagctttcactgagtgatggttaggggccatcgtctcttctaggcactgatctgtgggaaagcatactgaataagatccatgaaggcccttgccctcctgcatcccacattctgattggagagagagaccctcaagtagatgagcaaggcagaatcgattgtgaccgatgctaggaaggaaacacatgaggccatgtgatggagggagagaggctggcgtagtggtggtcggcagaggcatatctggaggtttgagctgagacccgaagggcacgagggagccagctgtgcacagcctgagtagcagcctcttcggcagcaggaacagcatgtgcaaaagctcagaagtgacagaggactttgcgagttcagtgaacagaaagtgtgagagtggagggctggtgaggggagtagatgagattaaagagttaggcaggggtcatctcatgcaaggcctgggggccacactggggcttatggatgttattcgaagagcagcaggaagccagaaggcagctgtaagccggatgggatgtgcattaattttgttctaaaaatcctagacgtggaggaggactgggtggctcccgttacctaggcccggaggcaggcagaggtgagtggggaagaggtcagtgggggcggtgagttatgtccagtttggggtgactatgaataaagccttcatagaatgaggagtctgtcttattaagctttcttttaagaaaagaaattcaaataaaacatttgggaattggttgatattcagccagaagtatttattgtggctcccgtattaagatgatggcatagattccaagggaaaataagatttggatgacatggttcctgcactcacggagattgcagtcctgcaggaatcatgttatgtgagacatcacactctattttgctttttgaggccaggtaccaaacagatggtaaagatattggcactaaggggccagagaacttttttttgtctactggtaagaaatggctttataaagggaggggcatttgttctgggcctcaaaggaagagcatggttattggttgcactcccggggatggagagattgctggtggtagcggtgctgctctggggaggcgcacagccaggtactgggtatctctgtaaggcgttgtctggcaggacagtgacgcccattttgctgtccttcagaccttctgcttgctttcaggagaaagtctccctttaatcttcgtacgtttgtaacactctcttaactgcctaaraaagtagactttaagctcagagctttggcaggcaggatctagcaaaactgtttggtattctctgcatttttatggtaacttgatatttatggcaaaragtactgtttctctatatttagcctaggaatataaagttaactgttaggttgggcacagtggctcatgcctgtaatcccagcactttgggaggccaaggcgggtggatcacctgaggtcaggagttcaagaccagcctggccaacatagtaaaaccctgtctctcctaaaaatacaaaaattagctgggtgtggtggcacgcgcctgtaatcctggctgctcgggaggctgaggcaggagaattgcttgaacctgggagctggaggttacagtgacccaagattgtgccactgcattccagcctgggtgacagagtgagactccatctcaaaaaaataaataaataaataaaaaataaagttagcagttaaaattaagcagaaacaatgggtagatttaaataaaaatattaagatattgacagtacagttggcaggggaatggctgaagtttgcaaaacactgttgtaagtcctgctgggactgtgattggttagtgggggaaagaaaggcagcagcagtgctcatggggcggaagcagccgggcagccatactgagatgagtggcaggtgtgatcgaggcctggtcctgtcaggactgtggggtggggtacaggagcagggagagaggccgaggtgtgagtcggactggattggggaaaccttcgaatgccagaaggaggagcaggagttctagttcttaagagttctcagaatcattttaatgggtcaccaggtttgggggacctactgatctaaagcaatccagttttttcttacgcccataatagtacccatctgttagatgggtgcacagttgtcctttgcgttggttggcctaaaacaatcatactaataaccrtgatgacacgtatgcagtaaaacctcactgtctgccgagcttcacagagaagctgattctgttgcatggaaatacagcgttacaagggaactctgagattatatcgttggtgcttgggaagttttactgaaagctagtaagctttcaacagtctgtaccttgcacttcaagagaagggaaggaagcaggaggaaagaggaacagagccacgtcaggattgcacaagggacagtagagaccaggtgacgaacaggagcragcgtaggctcctcccggctcctcgtggaggccaccttggctgttgcgactttctgcagttatgacaggrcactggttgaaattcaggaatacctcaggaaattgtcttaaagatacatctgttgccaacaaagaatgaacgagataatgaattatttttacttttatactgtacatcagagttgcctttgcagaactgtgttgaatactctgtgstagtttgttggggctgctgtaattaagtacccaagccggatgacttaccggaaagtcattgtcttatagttctggagactaacgtccaaaatcaaggtgtcatcagggttagtttcttctgagggaaggatctggtccaggcctctcattggcttctagacggccttcgccctgttcacatcatcttccctctatcatgtctgtctttgtgtccacattttcccttattaggacaccagtcccggtactggattagggcccaacttaatggcctcatcttaactaattacatctgcattgactgtgtttcccaataaggtcacattttgaggtactagggcttggacttcaacatatggattttgcaggggggcataattcaacccataatacacaatttagaaaataaaatcatagagcgtggggccagacatggtggctcacgcctgtaatctcaacactttgggaggctgaggtggttggatcacttgaggtcaggagttcgagaacagcctggccaacataatgaaaccccgtctctactaaaaatacaaaaattagctgggcttggtggtgcatgcctgtagtccgaactacttaggagactgaggcaggagaattgcttgaacctgggaggtggaagttgcagtgagccaagatcacgccactgcactccagcctgggcgacagagctagactctgtctcaaaaaaaaaaagtgccaatgtagagtactggagttgtgatccgtagcattggacttgctacctctgtggcttcatttatgtaggctttgtagataggtgaatggggtgtgtggatgttttaaarttagaagtcaaaaatatatatactcacactgtctacctgcttttcatggagggggtggagtagaaagagaaaaagttaagttagggaaaaggagtgtcgtcagaagtggtcagtgcagctgattctggttttcaggctttggccttcttcagagtatcttaggtttctgccatctttatagtctttgtgaatatttagcctcaaggaatcagataagacacagcataggcagccttaaactttcacatgttcattttgttctttcactctacccatcaacagactgagggtctgataaggagagagtgagcctaggcttcttgttctcatgctcacggaagctgctgctttcccttggcctccctggcctgtcgcagctgcctgtctcagcctccctgcctctcggcctccctgcctctcaagcctccctgcctctcggcctccccacctctctgactcttggccttgttttccattgctgtccccactctccactgaagcccagtctcaggcttttacattccacatgcatttagtgtacttttattattctgctttatcctgctgttactgaaatgatttttttttttagatggagtcttgctctgttgcccaggctggggtgcagtggtgcaatcttggctcactataacctctgcctcccaggttcaagtgattctcctgcctcagccacccgagtagctgggactacaggcgcccaccaccatgcctggttatttttttttttttttttgtatttttagtagaggcagggtttcaccatattggccaggctggtctgaaactcctgacctcgtgatccacccgcctcagccttccaaagtgctgggattacaggcatgagccaccacgcctggccatactgaaatgatttgttcaggacatgtcttcattatagcattaagcctgttgggggcaggtgtttgtttcaatttgtgcttctttgtgtgacgtaaggtcatgtagctacctgggactcagtagtcacactgcagagtgtagctgcctggtccaaatcccagccccactttcccagctgtgtggtcccaggaacatcccatcatctccctgtgcctcgattttctcatccgttaaaagtgtcagccattcttctgagcacttccccacccaggagcacccatgtcctcctaacggtgctggtgggyggatgcttttacagggcccccttcacggtatgtgactgggtgtaccacgggttgacattggaatgaagtgaaggcaggcttatgttttaagtaacttgaaagatgtaakcttttttattgttcctttaatggggtttacattcagttgctattgagttataaaataccggggacataatcgtggctaatctgagctttctgaatgaacagcctgtcagcatgtagccagctatcgcctttgggggcgccgtgtttgcctgtagaaatgtgtgggaaggtggtggtgggctgtcatggggctcttgtgttctttttgaaagtcttaatattttccatatgtgctttccttggattagatatccaaggggaagaaagatttgtttaaacaaaggtgttacttttctgtggttccttgatgtttgatttgtgggatctgtcttccaaatcccttttccttctgtctagcaatgatgttttcccagggctatttcacacagtgacttgacttcatttctatgcgtgggaagcttccatttactgaggtgcttacactttgcgttggaattatgtttctttaatttcctctcctctggttcctgtgttcccatctttaaatctcttgtatgttgtgctgtttaattgtcacgcacttcagtttcatatgatgctgtatgaactcttttagagaaggaggatatatataaagttctccacaacagcagcggcagcagcaaagtcgtggactttctaagggaggagacccagatctgtgaatagagataatcatggccattcatgtctcagatctgtgctgttcagcatggtacaattagccacatgtgcctatttaaaggtaacttaaggccgggtgcggtggctcacgcctgtgatcccagcactttgggaggccaaggcaggcggatcacctgaggtcgggagttcgagatcagcctgaccaacatggagamaccgcgtctctagtaaaaatacaaaaaaattagccaggcgtggtggtgcatgcctgtaattccagctagtcggcaggctaaggcaggagaatggcttgaacctgggaggcagagattgcggtgagccgagatcgtgccattgcactccagcctgggcaacaagagtaaaactccgtctcaaataaataaataaataaaggtaacttaatttttaaaaattaaataaaaataaagattcacttttgtagtcgctccagccatgtttccaatgcccaggagcccctgtggctgtggtgagcagttagacagctcagctgtggaatgtccaccatcacagaaggtgctaggagacgacatgtcaagaccgcagacacttggggcaccctttttaacaagctgtgttttctactccagatgagctctgttttacccagagaaatacactcttcattatttttctaggaccgccagaatagggttacattgcttgcagccaatgaggactgtttcagataagcatattttcattttcactgggagtctgttctttcttagtatctcatacacagtagtatctgggtcttcaaaacaggctgtgtcgttcttattccagcttgagcctggatccaggtgtttggagaatttgggttttcagcagctttttactgaagcatttggccttctaagtgcattgctatatgtcaccagtggtagcttgagtttttttgtcttgtgatttctttcccaaagctataaaagtggcctgtaatcaatagtaaagtcttgtcaatagcatgtttctgaattcattttaggaatagtttgtatcaaggaatcattttcccacttctttggttcaatgttctcttgtttcaagtcaaggaaacagaatgataccagtaagaaagcaaacactccctagcggttcagtctcatatkgaaatgactctgctgttgaaaatgccagtgtggctctataggaacttctgcctgcctcagcacttgaagtctgtgccgccgctctaagcaggtaaccacaagcgggtctgtcgagggttcgaatttgttggcaaacagagaaggcgactgaatgagccacggcaggtctcctggtccgtatacgcagatgtcttcgacgtagcggcctgcagaaagaaacacaaaaacctagctgcctttgtttcctcacccattttattcacacacagaaagtggcgcatgctccgtccggtgtcagtggtgagcctcagcttcaccagagttcacatcaaacagcatttccatgattgccttgacaggggcttttatgttgaattttgaacttacggtggaaaggcgcactttcattcttttagtgatttctgaaatctttgttagttactgctttaggtgaataccatgggatttaactcaccacgcgcacacgagagataagctagcrctcatttgcctgctaaaatctcagttccgatagattctgagttccatgaacttctaagtcttttcattggttgtaagtagttcataagaatggtatggattttaaataagtcattgcttctatattttttggggaccccagacatgcaccaccatgcccagctaatttttgtattttttatagaaacgggatttcgccatgttggtcaggctggtctcaaactccagggctcaagtgatcttcccacctcggcctcccaaagtgctgggattacaggtgtgagccactgtgcctggcactgctttttatttgtttttcagagtgaacatttgatacaaacattgaggtgggaattacaggccaggcacggtggctcacacctgtaatcccagcactttgggaggccgaggcgggagaatgacttgagcccagaagtctgagaccagcctgggcaatagagtgagatctcgtctgtaatttaaaaaaaaattttttttaaagtgggaattagagttggaatccagtggtgactggattccttggagactcagtgacactttttatgtgcttttgacaaccgtgtttggctctttctgctcttgcttttaattctcacagtaacactctgaagtggattccatcatcattcccattttgcaagggaggaaacagattagcgaagtgaggcctcagcgtatgtgtgagagggaaggaggtctgtttatttcagaaacgttgctctttctctgcccagctccttcctgctctctttcctcacaccagcccagtaatcctacttttaaaaaacgtatcttggctgggcgcagtgggtgacacctgtaatcccagcactttgggaggccgaggcgggtggatcacgagggcaggagatcaagaccatcctggccaacatggtgacacctcgtctctactaaaaatacaaaaattagctgggtgtggtggtgcgtgcctgtaatcccagccactcaggaggctgaggcaggagaatcgcttgaaccagggagtcagaggttgcagtgagccgagattgcaccactgccctccagcctggtgacaaagcaagactccatctccaaaaaaaacctatcttaaggaaatactgtttttaaaaggggcagggggatgtatgcacaaaatgtccagtgttgtttctaagactatgtaagtggcagctgttaccatgatttaacaaattttacctgatagacatatttgctacaatgtgctagaatctcagtagagttacatttaactactttaatattataagtatgggccagatgcagtggttcatgtctgtaatctcagcactttgggaggccaaagtggtaggatcacttcagcccaggagttgagggccagcctgggcagcatagtgagaccccatatctacaaagataaaaaattagctgggtttggtggcttacacctgtattcccagctacttgggagactgaagtgagaaaatcacttgagcccagaaagtggaggctgcagtgagctatgatcataccacctgcactccagcctgggtgacagagcgagaccctgtctcaaaaaaaaaaaaaaaagattacaaatatgaagactatcagtgggagaaacttaggacataagtgaaaagcaactcagctacaccttgattataatgatacagctgtgccatttagacacagatgaagttgaactagaagggaatacaaataaatggaccattttcagagctgtgttaatgatatttgagtgattaaaaataaaccctttgttgctggttctaatgggatagctgttcttctgcaygcagagtcggactgggagcttgcccattgtagtggtggcaggcggttgctcccagtctgagccccagccctgcccctcctccctgtgcctgtgggagtgacttcacttacctgagccttgggttccacatcagtaaagggtgaataatgattgtttctacctgagaattgttgtgaggattgagtgcaggcccaaagctcggacccggaagatttaccacctccctacacaccagggcttggcctacttagggtgctgactctgaatgctggccawggatggccacgctactgcctaactgtgagtaccgttttcatactgaagctagtgatgktaagaactttctgaagtayttacttttagggaatgaggactttgttaggatttatactaactagggtttttttcaaacattgttgaaacattctgatttcattragaattctgaatcattactttattattgatagtatcaaccctttatgacttcttataccatgtgcacacctgaggggctcctgttttcaggaagaatctgagccccctgctttttctgagcatttactgactagtcctgacaaacccaagtgtgtaatgacagggagcccctgctttctaaagaaagggcagagctcttgttaacctgttgtttacctgtcacctttctaccatgtgaatggatccctaattgaatcatatctgcttttgaaaaaaccccttcactagaaaattgttccagctctctaacctggtccctctgcttcaggagggtggctgtgcacattggcagcaggatttacttgtctttgaactagtctggtatttgatttacattttttgtttgtctccaatctgtttattttaggccagtcttttaaacagctgaaaaactgggtaaacctagtttatttttaatatctagtctactgtattcaaacccaaggtctctacccaaaatcactgttaaaatcagttattgtatctctgtgcagtagttcctgccactgggtaggaagctgtgtggagacatatggcagggcctagctgttggtgcagagggtatatttactttgggaaattttatcaacctgtattttttgtgatttgtgtacttttctrtatgaatcttatataaaaagtttttttaaaaaattgactcaacctatactaattggatcatcactaattccagattactttaaacatgatcctccgtcttgcccactaggattgaggcagcagttttatagttgttgtaaaatttgaagccttttttgttttgttttgtttttctttttacctttacatccwtcatgaacatttccttcctcacttttccgcttaatggctcgaacatttccttcccagccagcgtttggtgtagcacctggagcatctaagaggaaaacaaaaccagcattcagtgtggaatctgcttcccagttcttttagtacaagttcttctgtgctatcatttccatttcctctagatgaggtagtcaatgagaaaagtagaggggaaagtccaaccttccttgagatgtttcacttgtaacatcggatcaaaggctagtgcttttgsgggtgggagcatgtactacgctggcagtagcatccaggtggaccaaggttggggatccccatctttgtacttgggtttcatttttcagccctttctccaccccttgttactcccttgctgtatgsagagtactctttgtgattctcttggggttctttggattgttttctctgtaacagccctcggagattatttgaaaatcaracttgcagtggacatgaaattatattaaaaaaaccccaaccaatgtctactggactcatcgtacaccactgtctaggctgattagcttagttgttcaggcttgaagccacactccctatagaagccagtccaccttttacaaagagaaaatactgaagtccacttaaggatggtatctgatttccctctacctctcagagaasccatctgaagtatcagatttgccacaaaatcattactagctttaacattttccatcttacagagagcccttagcacaatgcctgacaccagtaggtatccagtagtatttataaaataaatgaagaactttctaaagatttatactcagaattttccaaagtctcaggagatgcaaaatgccagtacttctttctagagagggaacaaaagcagccagactggtttgggaacatctttcagctaayttcagacccctaaaatcagagaacttcctgtttccctaagtggaaggtcttgcaaaatgtrgaacatttacaaggccaaagaaacatagctgaattgaaaaaatgttcaattttttcaataaatcttatggccgggcgtggtggctcacacctgtaatcccagcactttgggaggccgaggcaggcggatcacctgagatcgggagttccagaccagcctgacgaacatagacaaacactgtctctactaaaaatacaaaaattagctgggcatggtggtgggcgcctgtaatcccagctactggggaggctgaggtgggagaatcgcgtgaacccgggaggtggagcttgcagtgagccgagatcgcgccactgcactccagcctcggtgaccgtgtgagactccgtctcaaaatcagtcagtcaakcaatcaatcaatcaatctrtctgctgctgttgctgctgactgcacaggcatccatatcggtgggtctttcttaccttttagtcggttcagggtcacccagtagtgttgctctgggctgcggatgtctttggaccactgaagcatgtcttttgcatggatgtcagtcagtatgaactctacaaacttccttgtaagtacatagtaagcacttccaaaataaatggttaagttatggggtggtttgtctttgaatctgttatttggaggtgcatagatacttcctttaggaacgaattcgagatgactttgacttgtcttggatttaatgtgcaatggttggattactccaggagtaatatttttatcactccatttgcttctgatgtagtgtatgatttctctgttggttttgatgggaaaatcctgtccacaaagattgatgacatagttccattgaaatttagaatgcactagaactttcatacaattaatatctgcctgtagtcttgtaaagccagcataagccaccttctctgtcttggaggaaataaaaacgttttcaaaacagttaaccaaggtttgcacagcagtcttatacttcattggggccttttcatcaacatgaatacaataaacattttgaggtacataaatagctctgagaagctgcacaaacatggccagctccttatgaatagttataatatatgccaaagagaaatcgccctcttctgcagacaggggtctggttatgaaatgcagcccccgagaaatcctggagcagtttcctggtgtgtgtaaatgagcatgtatttcagatttatgaggggttttgcaaaattttgcaatttggggggccgcccctttcccttcaaataaagcggaacacagttcatctgggtaaaagccacattctactacttctggttgggcaggttcttcttctgattctgcaggagttggattccttaagtaaagaaaaatgaagatgcaaatgactgccctcacgacaagtccagactttgtggctcgaagctggctcatatcttgagctccaggtgcattcttattaccataatttaagtattttttcctttaagcttcctaaaagaacaacagatacaatttagggtgttgtaattctcccccccaactttattgaaatacactaaactacatatacacacccatgaaactgtcattgcaatcaagataacaagcatttccctcactcttcaaagtgttcttatgctcctttttatcctctttctttccatccacatctctggcaattgccgatacgccttctgtcactctagtttgtcagtgtgtaactctttaagaaactgccaaactgttttccacagtggttgtaccagcaatgtatgatagccatttattatatagcctctggcatacttgctgtggtcagatgttttaatttttaccttttaatgagtgtgtaatgttagttccctgtagttttactttgcatttccctaatgactaatgatgttgagcatattttcatgttattgcccttatttagggagatgaaaaatctcaaatacttactttggacatagacaccgtcctgttctgccttattcaaagttcattgtgtgccattattctgcatataagactaatctttccaacagaagaagtgacaaattaagaggaatttgatgattatacacttaaacctgttgaagtgagtttctgggccaggcatagtggctcatgcctgtgatctcagcactttgrgaggccaaggcagaggatcacttgagcccaggtgttcaagactagcctgggcaacatagtaagactgtatctctataaaaaacttaaaaattagccacatgtggtggtgccctgattatcccgttgcactccagcctgggtgacagagtgagaccgtgtctcccaaaaaaaaaaaaaagtttctgaattatttttaggaaagatgtcatagattaaaaacaaggtatctttatctaataacattatttgataatcatgtagttgtttgtcttgagtctacagaggtacatgaataggtgtagcaatagcaaaaagtgaccaaaaggtttcagttaattaattattacacgcaaggatcattctctggaatttagggaagaagattgataggtaacatgtcaagctttatattgttagaaagtatttgtttttcttgtttawgaatcttgacttggtttccattaaaagttgcatgttattcctacttcctgtttttcagaagaccatgtacgtgtgactggtatttgagctcaggttggacactggtcccttgcctttccacatcatttttacaaatgctgtttggataatgcctcaaacaggcagcatttttagttatccttgtgttcttaaactctgagccaacaaaaactgttaacattgactgtggattttaaagatgttgtatttattttcatcgtacagtttatttctacccatcatgcttccaaaataaatagcagccactgccgaggtatgtcaggccgcagtgtgttccactggttcagtaaatggtttctgccccaaacatggaaccttacagcctaatttaaagacattcttataaattatgtaatacttatcttttttttttttttttttttgagacggagtcttgctctgtaactcaggctggagtgcaatggtgcgatctcggctcaccacaatctccgcctcccgggttcaagcgattctcctgcctcagcctcccaggtgcatgccaccaygcccggctaatttttgtatttttttagtagagacagggtttcaccataatggccaggctggtctcaaactcctgacctcgtgatccacccgcctaggcctcccaaagtgctgggattacaggcgtgagccaccacgcctggcaatacttatgtttataaacatgaaaccatcataatttatacattttatatgagatttctaaattaaattaaacctgaccatagaaatwgaataggaaagaaaaatgttcttgaaatgaaagtaaagctttttactacttctcctataagaattttgattaaagataaaccagataccatagtttgtcatatcttcccctgtattatgactttagtataggaagaagggtttgggttttgtttttttttttctgttgtccttttattttgttttttgagacagggtctcactctgtcacccaggctggagtgaagtggcgcagtctcagctcactgcaacctctgcctccccggttgaagcgattctcctgcctcagcctcctgagtagctgggattacaggcatgtgccaccacgctagctaatttctgtatttttagtagagatgggatttcaccatgttggccaggctggtcttgaactcctgacctcatgtgatccaccctccttggcctctcaaagtgctgggaatttttaggtgtgaaccactgcgcccggcctatttgtttttttggttttctgttgttttttttttaggaggagtttcgctcttgttgtcaaggctggagtgcaatggcgtgatcttggctcactgcaacctccacctcctgggttcgagcgattctctggcctcagcctcccaagtagctgggattrcaggcatgcaccaccacactcagctaattttgtatttttggtagagatggggtttcaccatgttggtcagcctggtctcgaactcctgacctcaggtgatccacctgcctcagcctcccaaagtgttgggattacaggcgtgagccacctcgcccagctagtttgttgtttttaagataacttgtgaaagcgttctgttcctcctgtcacagaagtgagttagcccctcatcactgccaaatgataccccatgtaaatttggctgtgcgccgagcccaggagattgggtattttcagtagtttataataattaaatgaagagaggccccaagggtagccattgtcctttgggaaaatacccaggctaagagtttttccctcccctgtatagagacagggacatggccagttcagtgttaacctgctgtggccttctaccttggttccatcagcaccagctttcactgtggcccagttaaatcttccctctggcttagattcactgtgaaacttcagaatggatgcctgctggactgccctgctgagtgggaaccaaggtccccagcagtttagtttgtcattgtttcaacataaacttttttttgagacaaggcctcactcttatcactcaggctggagtgcagtggtgtgatcatggctcactgctgcctcaacctcctgggatttggtgatcctcccacttcagcctccccagcagctgggactacaggcatctggctrattttttgtagagacaaggttttgccacacaagctttttttttwaaaaaaaatcttttaaaaattgatacataataattatatatgtttatggatcacagagtaatgtttcaatacacacaatgtatcagcacaagctttttaaggcagtcaggccctctattgtaaatgtagcctttggagatctcactgctgttgctgtcacttgaacataacatctagtgggtaatatgaaaattcctggaggaataaacttttcatggcctgactttttttttttccttttaagataatggtgaacattattttcagttttgcaaacatttcctagcaattcttagtttttgttgtggctgttttatttctatattgtgaagtcagctattttaatgaaaaaataatgaaggtttagttactaaacatgagattttctgtcactaaattaatttccagtaaatgtaggtgctattttgtaagtgcggggaatatgcctctcataaaaaagtgttcttactgagtttttgaaccattttttcctccatagaaagatgtttaagatacttcttgtaaaggctgtagaaagagtggctgttaccctgtgtattatgtatggagtaggtatgcaagttctttgtctggaacagacctatttttaacattccagtgtcctattttccttgtgtattactagatcacaaacagtttctaaaatttgggggttagcctgggcgatgtagtgagaccccttctctaccaaaaaataaaaaaataattagccaagtattaggggtcccaaaattagccaaacctgtggtctcagctactcaggaggctgaggtgggaggatcatttgagccagggaggttgaggctgtagtgagccgtgatcatgcccactgcactccagcctgggcaacagagtgagtgagaccctatctccaaaataaaataaatttgggggtttgtgtgtgagagcatttcaaggcttttttcgtgcactgtctttccttaaattgtctttcctagacctggtatattttaataatcttttagccctccatatctgcagcctttgaaaggtagcattgttaaatatgtatatagtgtacagtggaacaaaacagcttccaagccatgaataatgttaaaagttaaccrttcagttgactgaagccatctagcatccaagagatacagtagagtatctttcagtggaaatcattgtcaaacttatggtcaaggatggtggttaacttttttcccgtttatgtagtgccagaatctgcacaagaacaggaatgatttccagttataattctcagagtggaattattttacattttatgtttttgtccagggttaaagtacttccagggagttgtttcaaaacacattgctcttctaattagagccagtgcctgtgttctttttttcttgtaattcttctacagtcttcctctcccgactcccaacaagccttcacagccagtagcaaaagtcagcaatatgggtttgatatcgcattacctccagaacagttcgttgaaggatatagtctttgagaatttgttaggatgggatttcatttgtggtaaagactttttagggtgagttggcagcatcccatatatactctttcgttgcattttttatatgtatatattttaaaggaaattcctatgagtaaatagataatggatgggaacctttaaaggtgaacccgaagtattttgccatatattctagcatattaccattttaaagcattaacattaatttaaccagcataagcagttgatttagcacccaaagtttctgagagctttacttttcaaaaagggtgggggttgagggaggctcaatattgcatttaccttattaggaacctcatatttagcttcaggaaatgggctttgaatcagggcccyagtgttaggctcacagccctascacttacgagtctgttgggcaagtgacrgaagctcctgagtgtccattttcttgactgcggatgtggtgtatggtagtgtctgcctcacagggacactgggaggaggtgtgggagtgaaggatgtgagtttcacactgagcctggccctaggaggtgccctgtgctcactggcactcaccctcggggtaatgcggccccaaaactgtaactgcaggtgctgtcttcacttgtcctaaagtctctgtagccacacattgaaaatgtggtgtctctttctctctgagctcagaatgctgtccaaagcagcctcaatgttagcacaatgttttcttgagttacttgagatgagttggacaaattttgaattcaaaagctgtctaactgtccagtgaaatggatgcctttcacaaaatgcctattcctaaaacatgtataaattattttagccattttgatggaaagaagaaaactttattttaggatatccactcaaaacaacgacaagaaataaaacattctagtttacaaaatgagagctgaggatttgcacgtggccttgaatctgcctctcatgtgaggggttaacaaatggyagcattttatatttaaaaatctagttgatgccatactggraaaatattctacttttattttctttggcttaaacaaaaagtgggggctatttttgagagaaaaagacacctgcaacaccgacatttcaaatattactcatattctaatattttaaaaccacagagcaaagaaaaacataatttacttcaaaaagtatacctgtggccaggtgtggtggctcacacctgtaatcctagcactttgagaggctgaggwgggtggatcacttgaggtcaggagtttgagaccagtctggcccaacccaacatggtgaaacactgtctctaccaacaataaaaaattagctgggcatagtgatgtgtgcctgtaatcccagctactctggagcctgaggcaggagaatcgcttgaaatcaggaggcagaggttgcagtgagctgagattgcactgccacactccagcctgggtgacaaagtgagaccctgacacacacacacacgcrcacacacgcacatgcacatatacctgcttaacctttgccattggtgggtcctgcatagctattgagacgcttaccaggagaagccccctggttcctggagggggagtcctggcggtgtcagggcccagcctggcctttctctcccatcggttcctccccggcagcggcgcctgcttcagtcacttgagtagagttgcttggcaggttttgttgccatctgtccctggagagttttattcctgttggttctgacctgcagattgaaaagttgctgcttttgcttctctgagtatttccttgggaccagatccttcctgaaaaacaaaatgagacaacagaagacrcctgacccagatgaagggcgcacagtcactcacattgagaaaactgcaggatgaaatcgtggcattcatgggtcagcgtcttgaaattattttaaatacaggaggcatgatttagttatcagaccctctctcattaaggagataaataaaagtcacttaaaaatcctgtttctccataaatagcattcaaaaaaatccagacattttacaaggcaggggctgagccttctctgtgctctgtatcgcccccaagggtgagtctgcgccatagcatgtggtgaaggtggggtctgactgcaccccttcgctaggctttcctcttcccttctttctccacctctgggtacttttcttaacatcctttccttttctggttttaaaggttctctgcttgctggtactctctgcaggcttgccacagacagctctattaagaatatcggcaccaagagacatagatcacacaccgtagagatttcttatcttctatgtgccttgacgcctaagcgggatgtgtggtcagatgaatacagattctcttcacctgctcatggggtgcctctgagacacatgctgcttttttgcagaacagatgttgctgttgccaaagcacagagtattagaaaaacactgagcagacagaatgtagtccccataatcttcaggggttgyggcattcatgtggccttccagtggggagaccccatacattttgtttgtgtgatgttcagagtccgtgagttaaggttctgatttgatctagcaagaatcagaaaaggttaggtccttttatgtgtgggagagtcacattgccagcttgtgaggtcttgctgtgcctctcttcccctgcatcttgaatgcttgttttgaaacatgtccttgctgggtgcagtggctcatatctgtaatcccagcactttgagaggctgaggtgggaagattgcttgaggcttggagtttgagaccagcctggaaacatagcaagaccccgtctctacaaaaaattcttaaaaattagccggatatggtggtgcgcacctgtagtcctagctacttaggaggctaaggtgggaggattgctcgagtccaggaatttgaggttacagtgagctaggatcatgccactgcactgcagtctgggcaacagagtgagatgccatctcataataataataataataataataataataataataatatttgccctgtgggtgcacctggactagacggcagatctgctcacactggcccattcctgggggtcgagggttggtgctgggtttcacttcttgtctcacattctacatctggaaggaggaagccattctaagccaaatagcagtggaagaagcaactgaggaaatgctggggagtgttgcccacattaaacgttacacttccacattgctgcgggaaatgccaacacaagaagcaaacatactagacgagctgagccacccatttctattggtaataaatggacaaagggtaaatcggctttatgtataaacctcttatacagattgactaaaacatttaaaaaatgaaatccctaataaataaaaggacatacgatataatttacaaaacaggtgtcgtgaatacagtggggtttttttatgtttcttaatccaagccaaaaaggagctatctcccttgccattcagattagcataagttttccttcaaaacatacgacgtgatgggcaccgtcacgtatggggatgtatattttcatgcaagcttttgggagaactgcttggctttaaaatctcatctccttttatcctactttgaaatatttccttaggctctgttcttattcattcattcagcagttattcactgtgtccaatgtgggcagaaccctaggctcctcccaccatggaacatgaagacaaaatgcttcctgcttggggctaacagtgtagtggaggaaacacactgtttcaaaagtcagtacaaacatgcagacatayactcatttactctaagccatggggtrctgcacaggaaacaaaaacaggattccgtgataagagaatgaccatgtctcggaagtggaattcctaggtcagagatgcatgcagtcagctgttcattgctaatattattggtaagcacaaagattgggaagccactgttccatttgttaaagtgatataaatatctagatacattagcatattgctcctaatttgaccactgttcccctcttggcacttcccctactggcctttttaaaaatactttaaaaaagcatccagagggcatatgaatataaatatacaattactagtttgctttttcgtttaacttatgataagcattttctacattgccccaaactctaaccatataatcttcctttttgggaatgtattataatttttttttttgagagagagagtctcgctctgtcgcccaggctggagtgcagtggcacgatctcggctcactgcaagctccgcctcccagcttcacgccattctcctgcctcagcctcccgatcagctgagactacaggcgcccaccaccatgcccgactaatttttwgtatttttagtagagacggggtttcaccatgttagccaggatggtctcgatctcttgacctcgtgatccgcccgcctcggccttccaaagtactgggattacaggcgtgagccaccgcgcctggccgtattatgatttttttaaccatttcacccattctttggacatctgagtttcaagcgataaaaaggatgaagatacagttttaaatggatgtataatttctaccgtacaatagcagtactcaagaaaaatgcattagcaggaagatatgggtgattttctgttggtataatacatattatttactaaagaggtggggagcaggtccctgtggaccagctgtgactttgcggcagccccactccccatctccgcagtagcccctacccttgttttccctcatccttcagggatgaaccactgcactcaggtctctcgggtcaagcacctacccagaacgagtgatggggcccctagcagttgggaggactctgcccagtctccaggggcaattcctaccaaggttcaagccattgaggcccttgagggtgtgggtttggtgttaatggatcttttgaattttcgagagaaagagcaagattactcaatttctaatgtgaggggttcctgacttcttattgtcagtggccaattcaactttaaaagtacaataagtctgggcacaacacaacacaactgtatgcagaataaggtccatgtcctctgaacagtctgatctagaggaaggagaccgcttaccccaacactgtcggaaggaggggcagcaaggagtgatagaaagaagcagcagcagaaacccaggaggagagaaaaagaaaggtgggggcagcacccacagggagcagacgctgggttcctccccacccctgggccctttacgtcatagccacagctccaggccccactgggccttaactaccacctggttctgttcctgcagattctttttcattccaaggaagagaccatcttccagagccaagggaaagctctactcagacctcccatagcgtgagacttcccagggaacctcctctagcagagcaggctgtccctcctcctgtaggcccagctctctacagtgatggctaaaaacaagctccttttcttcaagggttgtaccagttaaatgctagattgggcacgtgcttcagtcattcatataacttctctatggcaccaccctcagggatttgtgggtcaaaaaggtatcttcagtcacgaaaatttaccagacccaccctagaaaaaaagctgatcttaacctgaaaatcactgttggagacaagaaccacattaaataacccagctaaggcaggggctgaggagagtcagcaaatgcttgttggtatcttctgtgcatttgggagattctggaaaatctttggcaacttcaggaaaaaaaaagtacttttatggcttttcttgtgctgataatgttttctacaaaagagattccgggcatagtatgtctgttattgctctgggcacagtaggtctgttaaaattactgttccagttgttgaaagaattttgttattatttggttgcctgcctttatgtttttcaaaggcagtgtcttatggagtaactaaatattttagttaataacagaccttatctggcatacttttaaacatctatgactataacatttaatagagtttttcatagatattagaaagataaattttggttgatccactcaatatgtgactctttgaagtcatgttacctacactaatcaagatagtgtggtgctggcatgagaacgggcatatacatcaatggaataaaatagggagtccggaaataaaccctcacatgtatggtcattgatttttgacaaaagggccaagtcaattcgatgggggaaagaatagttttttcaacaaatagtgtggggtaactggatatccacatgcagaagaatgaatttggacccttaccttacattgaatgtaaaaataaactcaaagtgatcacagacctaaatctgtaagttttagttacaaaccacttaggagaaacgcaggagtaaatcacaatcttgggttaggcgatgacttactaaatatgacaccaaaaacgtagcagtaagagagaaaattgctaagtccaatttcatcaaaataaaaaacttttgtaattatccagtgtaagatattttgtcataacagtcttggactaagacagaacttatatccagaatatgctgtataaagacctcttagaacgcaacatcaaagagacaaataatacaattaagaaatggaccrgggatttaagcagacatttctccagagaaggtatacagatggtcagttagcacgtgaaaagatgcttaacatctctggtcatttgggaaatgcaaattaaaaccacaatgagacagcacttcactcccattaggatggttataactaaaaggaaaaatgggctggttgcagtggctcacacctgtaatcccagcactttgggaggcaggtggatcacctgaggtcgggagttcaagaccagcctggccaacatggttgaaatgccatctctactaaaaatacaaaaattagctgggcatgatggcgggggcctgtaatcccagctacccaggaggctgaagcaggagaatcrcttgaacccaggaggtggaggttgcagtgagccgagatcatgccactggactgcagcctggcgacaaagcgagatcccatctcaaaaaaaaaaaaaaaagaaaaacgatgacaggtgttgggaaggatgtggagaaatgagaatcctcaggcattgctggtggcaatgtaaaatggtgcagcctctttggaagttcatcatttgaggagaggcagttcctccaaaggttaaacataaagttaacttatggccagtcatcccaatcctaggtatctacccaacagaaatgaaaacaactgtccacaaaagacttccatgtgaatttcttagtctgaaagtggaaacaactctgtcagctgattcatagatgaaactttatttggcaataagaagaaatgtagttctgatccatactataacatggataaatctttaaaacattatgctaaaatccagtcacaaaaaaaaaaaacatgtrtattgtatgatttcatttatagaaatgtccagaagaggcaaatttgtaggatggaaagtagattaatggttgcctaagactgaggaaaggggaatggagtgagcgccagtgggtatgggatttctgttggaagtgataaaaatatgctaaaattagattatggtgatggttgcacaactctaaatatactaaaagccattgaactctatacttcattatgttatgtaaatgagatttcagaaaacctgttttttaaaaaggcgagttaggtagcaaatgcacgtggtgctgaagctgttccttttagagccggctcttagcattctgtgtcctgagcattgtgctgtgagctaagagatagaacatgatttctgcttcccccacccctaaaaaaaggtttgggagatcagaagatgtaaaacagaaacccagaatgctcttctaagagttagctacagagtaaataaaagtttgaagagacttcctcaggcaggggaagacagaagtttcatagacaagatgataatagtaagctcactgctccattttttatttttaaaaacttgccacccaactcatagggggcagagactatgtcttaacacagggcctaccagcttcagggtaaaatcaatgaaatctttaaactgaggctaggcatggtggctcacgcctgtaatcccaacactttgggaggttgaggcgggtggattacctgagcccagaagttcaagaccagcctgaacaacatggcaaaaccctgtctctacaaaaaatacaaaaattagccaggcatggtggcgcacacctatagccctagctactcaggaggatgaggtaggaggatgaggtgggaggatggcttgagcctgggaggtggaggctgcactgagccatgatggcaccactgcactccagcctgggtgactgagtgagaccctgtctcaaagaaaaaaagtttacatgactatgagtatgttccataaatgaatcctttgaaygttatatatgctatgaatatttcacttagcctttggcttattgttttttgttgttgttgtgacattgtcatgtaaaagtttgtaatttttacatrgtaaaacttatttttttaaaataagtttttaaagtttaaataaaaattatttaaaataagttttaaagctttagatcacaggtccccaacccccataccggtgacagtccgtggcctcttagkaaccgggccacacagcaggaggtgagccacaggcgagagaacattagtgccagagctccatcagcggcattagattctcttaggagcacaaaccctgttgtgaactgcgcacgtgagggatctaggttgcgtgctgcttatgagactctaatgcctgatgatctgaggtggaacagtttcatcccaaaaccttcccccaaccatctatggaaagattgtcttccatgagactggccccaggtgcaaaaaaggttgggaactactgttttagatgacatttcctaccctagttataaaacacattttcctataaattattcttctttccttttttacatttaggtgtttataaccctagtccagggcttctcaacctcagcacaggggcatcttggctgggtaactctctgtgggggggccatcctgtgtactgtatgatgcttgctgcatccctggcctctacccacaagatgccaatagcacctgcaccccagatgtgacagctaaaaatgtctccagacatcgccgaatgtccactagggagcaggatcaaccactgcacttgcgttagaccccaagtggttagagagccactgcacttgggttagacccctcttttttttttgagacggagtctcgctctgtcgcccaggctggagtgcagtggcacgatctcggctcaccataacccctgcctctcgggttcaagcgattctctcacctcagcctcccgagtagctgggactacaggcatgtaccmccacacccagcaccaccatacacagtttttgtatttttagcagagacggggtttcaccatattggtcaggctggtctcgaactcctgacctcaaatggtgatccgcccacctcgacctcccaaagtgctgggatcataggcataagccaccgcgcccagtcttagacccctcatttttgcagctgaggaaactgaggcccagagaagtggtgtggcctgagccaggtggcctagacagatggtggcagaaatctcaattcaaaatgcaggactgggaacctccactcctcgttctctttttttccctgtttttcctgtccccagccgtgagcacctctgctgtgctaggcactgggtagctgctggggccacagcagggaagaaaacaacatagacaaagtgatgaagacaagactccaggtcatgattagtgccatggagccaacacagaaagagtgctgggatcccaccagtgacagcatggtcacagggagcctctgcagaggtggctcactcactgacagctctgtgagtgtgggcatgcctttggtgtgtatgtgtgcgtttctaccaccacaacactgtcaggatggtctagaccctgctcgcagtcttgttctgccggggtgtgttgggcgcccccaaggctgccgtcatgcttgggggttttctgaaagacttgagacttagcatatggttgtattcaactaacattcactgcagcagcgtggtatggatgcacagctgggtgttaagggaaaaggcgcatgtagcagagtctggaggaatccacgtggggcttccttacgcgcactccctccctcaaggggttgyacgaagtgaatacttccccccgcaacgaaactgcaacacgtgtgatgtttttgcccagggaagcaaatgagagactcagtacccagagytttggctgagggctggctttataccctcggcctagcatgttccagaattccacactcccataagcaggtaggtgtcagcatagaccacgttgttcatacaaaagggtctaggcacggtgagccaagctactcttgtcagttaaaaaatggcgggaaccctcccaaaatccaagttcccagacaccatccaggcaccagccttgcaagtgatagcactcttaacctgctacgctgacactttgctgtgtgcgggaactttccaaaccaaggctttgaccagaaagccrgtaataggaatttactcggagcctgggggccactgcttggggctgagagtgggggactgaagcgtggcctccccattgactggtgatggaatctgccctctcttgtttgccctctccagtgtggggctgccttccaggaggatgatgtcatcrtgctcaatggcaccaaggaggatgtggacgtgctgaagacaaggatggaggagagaaggctgagagcgaagctggaaaaggtaatgggagtcttcaggttccgcccagcccccatctctgctccagagccgactgcaaatcactgaactgagctggcagctgyttaggggtttgcatgatcaaggcgatttttataacctagaagggcctggactgtagaagcagattccagctgaggcccaggcactgccttgctgtggtgagcacggcggctctgctcttccccgccgagctttctcatcagtgaagtggggtagtgacagcatgcgagggcacggagctgtcagcaggctccagagaccatggccataaagcactgacactgacacggccycagcaagcccttggggaagggcagccaccaccgttgctgctgctgtcacttactgttgctgttgatttaaggcagtacatactcaggtctcatagcttgtaaaacaaaggaaaaatgaaaagtcaccatcatcccagcaaaatgtaaggctcccctgctgcccagattggaatgtgctcgggagggccctggcagtctgggctccagcaggcctgggtgggcctgggtgcctrtgcgtctcacccactcccagggcgtgtggatgcaactcctcagggtcacactttgaataacaaggagctaatgagtagccttcccaaaaatgggggccaaatccctcaccttcctgagccctcccacggggagagggagggtcttttatggagcgtggtgcttcatgcttcatcgttcagaagggagcgtggtatccagaaacagggaaagcattgctgagtaacgtggcggagtgagcaggctccagacaacgcatccaccaagagttcttccatgcgctggtgattccccatccagcagtaaatgttgttcatgtttacagatgatagctatggaatacaggcctttcgtgagtggcaaatttcttattctttaaaaaaaaaaaaagttgggttcaggataagctagggagaaaactttatgtgatcagaactaaggcaaaagaatgcttgaagtactagaaaattagctccagtaggctgaggacataaaattatgaaacaaatcgcctgccctcgcgtgggtgtgcattttaccagtgccagtccgaggcragagtgatggagtacctgaagatttttcagaggtttggggtttttaaaaaatcataacaagacaggaccgtatcaccctggaataatgtgtaattcgtggttgtgaggctttaaaaagccgaggcttgagcacatggtagcagtattaccattatgcatggatccagaatgatcagaaagagccaaaggcatttgtattttctcccttcatcgttttacttaggtagaaaataatgtctgaaaatggctctgtagttcaaggaacggtgcccaaactctgaattcagatgcgagtagaaatactccgtggagcaatattataagatgttaatacaacattcctaacaactgtttaaagagtcacttggtaggcgggcgtggtggcgtgtgcctgtaatgccagctactggggagactgaggcaggggaatcacttgaacccggaaggcggaggttgcagtgagccgagatcgcacctctgcactccagcctgacagactccctctaaaaaaaaaaaaaaagccgcttggccattgaaatgctgtgttcaggttgaaaagtaaatacatgtgtatcttatataaagtgtgttaattctaagttggttttctaaattactatgatttcattattgtaagagagaaaaaaagagggaaactaagtttgaggtctttttaactaaggacagttgccaaaagccatctccctgttcttaattgctaccattgatcaagctcagttttaaaaaacacaaaagggcagccgggtgccgtggctcacacctttcatcccagcactttgggaggccgaggcaagcagatcacttgaggtcaggagttcgagaccagcctggccaacatggtgaaaccccatctctactaaaaatacaaaaattagctggatgtggtggcgtgcgccagtaatcccatgtactccagaggctgaggcggaagaattggttgaacttgggaggcggaggttgcagtgagccaagatcgtaccactgcacttcagcctgggcaacagagtgagattctgtctcagacagagagagagagagagagagcacacacacacacacacacacacacacacacacacacacagtgagattctgtctcagacagagacacacacacacacacacacacacacacggaaaaaatgcatttcaaaggaaactactagaaatgttcatattccctttgaccattttgctttcgtgagttttctctgtcacaggtttcctgccaagttaattcaaagcccagtgggactaacatgctcctctctgcaaaatattctccagagcttctgggaatacctcatagctactgctaccaggataccaaaatatttcccaaatacacttgcagctggaagcaagatataacatttcctctctaactccttcttgcctgtgcttttcaaataacctcagctgtgaatggagggcttagaagtaaacagttgtctcttatttgtttgaaggaccgagtatcagttttcacagatgtgaatgcttgcattgcatgtgtgaaatgcacagaaggtctttatgttctgttataaatcacactgcatgtatatgttagaaattcaaggcctgagaggtctttctttaatgctcagtgctgggagatggctgaagtaatcaggctgcctatttttagtgccaccttttggatgcttaggaaattgacattttaaagtaaattaaatgaacatagtcctacttgtcatttctgcgattaaatcaattccaacgcagctgtgtgaccgtagaatggtttgttttattattgctgatcaaaataactattatgagtagcagaattctagtgcctggaaatctaacaagagtagttttgagtttagaagaattagctcaactgtctttaatataaacttcaaggccttacacttgaataacaaataccaaagcagtttgacagctttgaaaaaaagttagtggaatgtgcaagatttagttggtgtttatgctggctggacttcacatacccatatatactctgtgttactcatttaagtgcgcttttgtatacagttgtcaccatcaacattggcccttattactgaaatctgtcagcctcatttaaatttttgcaaatgtgatttgggagatgtaaatataaaagtgagcagctctgtgcagatacatttttgtgtgaggcagaagtgcatgactggtgtcacatgcagagggtgaaggctttaggagttacggaacatcaaaagccttcttcagagtgactgtctgtctcatgtgactagcatcggtcagtcagacagggcacccgggacaatgggcagccacactgacgctgaagtggagtgaatctgagcacagcctccaacattctctatctttttgtagaaaacaaagaaacccaaggcagcagagtctgtttcaaaaccagatgtcagtgaaggtaagatccttcaagagatccttattttagcaaaatgcgactctagggcagtctgctaatatgttcatgctttgttttgcattgtttttgctttgcctactttgtttcttttacagaagccccagggccatcaaaagttaagacagggaagcctgaagaagccagccttgattctagagagaagaaaaccaacttggctcccaaaagcacaggtgggtcctgttgtagctacagggagctgtttcgagaaggctggaaacccaggtggccgagtccaggtttcactggagtgggtggatgggaagcccaagcctgtcctatgtcatgtctctagagagtgcactgaactctctttaggggggtaactaagaaatattgaacacaccctcatcaggagccgtggcaggagtgatggggtctgggcacaaatgctggttgtttagattcctgtcgagtaagtgcttggtgccaagcaaaagaggttgcgctgagaactggctcagatgttgcacagagactgtcagatggactgtggctcagggcctgcggggaatgcccccagtttctttactcttggggctttcatgggctccacgtgtggctctcagagtcccctctctgctgcctcttgaccaaggatcagtttctcctaaaactcactctctgtaactcaaagaaaataccatttatttcacaaaaagaaaaatacagattcattgttaagagtgtgtgatcttgtgctctaagtagcatccagggtggctgacaggctcccatcccggctctacatgggacagccactcaggttcctgtgcccatttcctcccctggaacgcaggccctgcctcatcaggacaatctaagtcattcacggggctgggaccagtgtctgcgacagagcaagacagtaaatgatagatgtgttgtgctgtgtctgctttgctggagttggcaattaagatgacgtccgccagcactcacacagccagcaagagaacgtctgggacagagtgactgatgggcttcccttctgaggatgcgaagtttagaatcatctttatcccaaccctgacagttttggctcttcatttttctagcaatgaatgagagctcttctggaaaagctgggaagcctccgtgtggagccacaaagaggtccatcgctgacagtgaagaatcggaggcctacaagtccctctttaccactcacagctccgccaagcgctccaaggaggagtctgcccactgggtcacccacacgtcctactgcttctgaagcccgcactgccaccgctcctgccccagaaggttgtttagtttccacgtaggcaggtcrctttgtgcctctgagtgcgctgctgtgtgttctctctatagttctgtgtcataaagctgtcctggccagccttcaagctggtgtggccactcttgatgtgaggcgtgtcggttccaggggggacatgggaggggctgcacagtggcccgaggtcatgcttgcttccacctgcaggtgcatttggtcctttccatggccaggaagccctgtgggctgcactttttatgcttgcagtaacaagagactccagagtcctcaccggtgcagagttggcacatattaattaactaaaattytaatgatcttgctaccagcaataaatcaagtaggccaagtgaaactgggctttaaaaaggatggatttcaaatacmctgtgcccmctagaagcttygaagggcctcgtccctctgctacagccctgggaggagccaggatccttgttggtctagctaaatactgttaggggagtgtgccccatctcatcatttcgaagatagcagagtcatagttgggcacccrgtgattgggttcaaaaataaagctggtctgcctcttcwctcctctgtgtttttatcttttctaccttctgctcatgcttgggtaagaacattgcagccgttgcattggtgattacaggagtcattccatgaagtcagaagaacccacccttctctcctccagcagatggtaaagggagaatcgtacccaaaaagaggtgcattttatctgcctataagttgtgttgacgtcaatagctagtgaaacttctcatgagactcctaatgaagaaccaagagccacaggcctctgcgtggctttctgcacacggtggtatgactgagatagtgactggttctctatacagaccccggggccctgggtttccttcagaagcagaaggagctgtgggaggtgaatggtgggaggtgaacaggcaggttctgtgggagacacagacacgtgggcagaactccagggagargccagcaagggagaaccatgtgtggccctgctttttctcaaaccctgtgtggttcccggcttcacagttgatgggaaggtttggccccaaggatattttgacattgtgagtatagagcattttaataaaaattaagtgatgcrtttttgtcatggacttttccagaacaaacctggattagccatttaatttccccaattttctatacagccaaactcaaccattttctcattgtttttatttcccccttttttttttttttttttttttwaattttgaaacagggtctcactctgtcatccaggctggagtgcagtggcatgatcatggctcaccatagccttgacctcctgggctcaggtgatccacccccctcagcctcccgagtagctgggattataggtgcgcactaccgcacccggctaattttgctattttttgtagagatgaggtttcgccatgttgcacaggctggtcttaaacttctgggaccaagcaatctgcccgcctcggccttccaaagtgctgggattacaggcgtgagccacgctgcctgggcccccttttcttttaatgaccattatttttaccaggttcggttttctgaatgttagcctgaatcagttttattttgcattgaatgtattgactgtgtccagttttttctggtaactgagtcacagcatcctcaacacaaaaattacagcatctcaaagtcctctgctttgggcctctctgaaataaacaggctgtgggcctccctccagctgccctcaggaccatccatgcaggagggatcagggtttccttggagatttctagccagcctttaatattttgctaaggcaccactcttcaaggctcctggccagcttgagggaagaaggtatccatgatctgtgctcctgctgggcatgaggcctcaatacaccaacggctggggagggctgatcattcgcattatttttagggctcactgagcagccaagcacttgacaggcttcttcccctgggactccccagccacccagtgcaatgggaagatggccatcccccactttataggtgaggtgcctgaggcccaaagcagcaaggcgaatgacagttctgcctggccacaccgcaccttctccccattcagtccgtaccaaatgaaggaatcagtggcggctggggcaggctcccacccaggcgccgagaccacgggttcaggtgctgtgcccaagaggaaagtggggcatctcctagctctccctcctcctccgtccacctccaggacccaagctgctttccaccaaggagggagctgggaggagaaaattgaaaagatgttgaaattctccaaaatagcatctattcaatttcccacagtatcggaggaaccagcccccaatatttcaatgtaggttcttttctcttttccctaagcatcggccggtctgagaaagagtacaaaagagagaaattttacagctgggtctctgggggtgacatcacgtcagcaggttctgtgttgctcccgagccgcaaaaccagcaagcttttattagcaattttcaaaggggagggagtgtacgaataggttgtgggtcacagagatcacatgcttcaaaggcaataaaatatcacaaggcaaatgggggcagagcgagatcaaagtccagggcaaaattagaatkgctgatgaggtttcatgtcccactgtgcacgcattgtcattgataaacatcttaacaggaaacagggttcaagaacagacaaccgatctgactrgaatttcaccaggctggaatttcccaatcctagcaagcctgggagagctgcaggagaccagggcgtatttcatcccttatctacaactgcakaagacagacactcccagagcggccattttagagacctccccctgagaatgcattcttttcccagggctgttccttgctgagaaaaagaattcagcgatatttctcctattcgcttttgcaagaagagaaatatgactctgttctgcccggccccgcaggcagtcagaccttaaggttatctcccttgttccctgaaaattgctgttatcctgttcttctaggatgcccagatttcatattgttcaaacacgttttacaaacaatttgtacagataacgcaatcatcacagggtcctgaggcgacatacatcctcagcttacgaagacgacggaattaagagattcaagtaaagacgggcataggaaattataagagtattgattggggaaggaataaatgtccatgaaatcttcacaatttatgttcttctgccgtggcttcatccagtccctccatttggggtccctgacttcctgcaacaccacagcacttcatttccaacaaatgaaatgaaagctgtgccaaaatgaatgaaagaagtgccgccccaccccacagcccagacaagtttggctcaaagatctggtctgcttacccactggtcctgctctattggagagtgctgtagacttttgaatacatataggaaaaagtgattcccattattaaagactgaacatttccaaataacaaaatcacatgtggcaaaacttgtgagcatttctgttgtttggggccattcctgtaaaccacgtctgtttgccccttactgctccatcgcaccacagccaccaaacttcccagccgacttaagacacrggctgactgagcactgtggctcccgtctgcagtcccagcactttgggaggctgaggcaggaggactgcttgagcccaggagttttgagactagcctgggcaacacagggagaccctgtctctaccaaaaatgaaataaaaattatccagaccctgtctctaccaaaaacaaaacaaaaaaaaamacaaaaattatcgaggctgcagtgagccaagatcattccactgcactccagtctggatgacacagcaagaccctatctcaaagaaaagacacaggctgtgtatggacatgggggcctctgaaaataattagccatccctcaaagctgctggaatggggaacactggggacagggagccgcatgatgccaaggacaggcctccaaactgaggtcacagggtggcccaaggccctggaaatcagggcrgctgcctctacagtgggtgtaattccaggcagtagctgccaagctgagtgggcccctgcaagaagagaagtgcccgtcttctggtcaacctggagatttgcatctctccatcgtgcccagtctctggcaggaagccccactccccagccgacactgcaccatgctcatggaggaagaagctgtgcagcacagcccaacagcgttttcccctttcggttttctagagtagtcttgcagaactattttttggttttttttttttttgagagagtctcactctgttgcccaggctggagtgcagtggcaccacctcagctcactgcaaccaccgcctcctggattcaagcgattctcctgcctcagctccagagtagctgagattacaggtgtgcaccaaaacacctggctaatttgtttttattttcagtggagacaaggtttcaccatgttggtcaggctggcctcaaactctttgacctcaggtgatctgcatgccttggcctcccaaagtgctgggattacaggcatgagccactgcccctggccatagtcttgcagaactactttgtcactccacagagatcagtagtttaaggcacagcgaaggtgcccagctgaactttgattatttcctrtgcagcataaagttctgctcctcgggagtaaatctgcaaatcagagccttcctcaggaagatagctctacagatgacccaggggaacaagtacaagccgtgcgttccagcacccaggatttcttgtttcatgtcattttaaagaacacatggtttcgagtatactatggagtcctaggtttattcccagccttggcctcagttgtcaagctagctgttcctttttacttgggggattcagccccttcccattttacccaccaactcttaatcatctcccctgctctactcaaccatctttttctggacactcttcctgcttcctgcataacctagtttagagcagtccccttatgctagtctctaaagcttcctgttcttatcacaattttaatcaaagtatactctctctctytttttttttcttcctgagatggagtctcactctgttgcccaggctagagtgcagtggtgcgatctcagctcactgcaacctctgcctcccaggtccaagtgattctcctgcctcagcttcccaactagctgggcctacaggcctatgccaccatgccgggctaatttttgtttagtagacatggggtttcaccatgttggccaggctattctccagctcctgacctcaggtgacccacctgccttggcctcccaaagtgctgggactacaggtgtgagccaccacacccagcccaaagtatactcttaacccagggtgggcacacactgctacgatcaatgatggtgtgaggtaatagtgagtggtggggactgtggagggaatatggccaccgaaaggacggtttcacttggctgcagcagagagactggttccatgagggtgtgcactcattgtttctggacctcccatattttcaaaggaagccagaatgtggagttttaaagtgaaatgccccccaatatttaagtactgacaatttttaaaaacaatgtaggccaaacaaaacacataggtgggccgggcgcagyggctcatgccygtaatcccaacactttaggaggccgaggcaggtggatcacctraggtcggaagttagagaccagcctgaccaacatggagataccctgtctctactaaaaatacaaaattagccaagcgtgatggtggatgcctgtaatcgcagctactcaggaggctgaggcaggagaatggcttgaactgggaggcrgaggttgcggtgagctaagatcattgcactccagtctgggcaacaagagsaaaattccgtccccaaaaaaaaacaaaaacaaattttttgtttgtttagtttgagccacataggtggctccaaatttgtaggtagcctgtggtttaatatcttyctctcccgtttaactcagctccacggggcacatgrcatctccctctgctcatcacaatgtctggatcaaacaaatgaaaaacaaaaacatgatggcctctcccagcaaagctccagggttggaaagagtcccctggcagggaattggcaccccgtcgtgcccatcctctctctctgactgcctgctggaaatgcccccatctccctttgagtcctcctccygggcaacccctgtgacctgtaacctctgtcctgaaatcatcacaatggccagrgtggcctcagctcagggcctctgtgacatcaccaagggcctggcaccaggtgcccagtctyccagttgcgagggcaagcaaacccgtcatgagcaactcccttccccatctctgctcaccatgtggacgctgaaatcgtccctggtcctgcttctgtgcctcacctgcagctatgcctttatgttctcttctctgagacagaaaactagcgaaccccaggggaaggtgcaatacggagagcactttcggattcggcagaayctaccagagcacacccaaggctggcttgggagcaaatggctctggcttytttttgttgttgtgccgtttgtgatactgmagtgtcaaagagacagtgagaagaataaggtaaggatggctccattttttttacaccatattgattcaatctcaggagtctcagggaaacggatgttctagtgagtctagacggcaccgttgggtataatgaaccgacctcatggtcctgggcaaagctggcaaattcacttcctgatgtatccttagtgaagacaattgtccccagatccacagatactgggacaaagagtggaaagtgacctctgcttactggctcacagattttctggttagatggattttttcaaatgtaggatagattcaagaacttatggtgtgtttcagaaagtcaaaattattcacagggccagattcactagcccctgttttttaaattcttgctagtgtttgacttactacaaaatcctgagctaaatggaaatgatatcattatcccaacaaaatatgagacttgtgctgaagagataaagatgtaaggtagtttgagctggtcctcaaagtgaccacaaacaactctttcaggtagaaaaggaaggggagagaaagtgcgttctcccctagaaagacccagcacttcataatcctgtgcccaaactgatgagagcagggatcggcaaacccttcccgtaaagggccagggagggtgcgaatatcttcagctttgtgggcagtatggtcttcttgcaactactcaagtctgctgttgtaacacgaactgtgtcaaaaccaacaaagttcacaatattactgaccttgagtatctttcctgacaggagcagagtcctcctggccttcgaggcggccaacttcacwctccaytaaagaaaaawagaaatgcttcyccyaacaaagactgtgyattcaataccttaawsgaactygargtggagcttwtgaaatttgtgtcyraagtgcrraatcttaaasgtgccatggcaacaggyagtggcagtaacctcargcttcgaargtcagagatgcctgcagatccataccatgtcacratctgtraaatatggggagaagaaagctctagctgaatggatttgtgtgtcaggagagaaaaaagttgagtgttgacaaactgtatgcaaactaataaaactattctgaagaaaagaacttccatgtttgagagcttgcttcttttctttttttcactagaagaaaaagtgaatgggagaccagtagccatagcagtgatggttttgtttttgcctctctcacgtcatctagagctgtgggtggtgagaagaacaccgaaagctacataatagtacgtgatgagctcgtgcttctgttcaatggccgcgggtggacgatggagctagggaaatctgggataagatgctgacgtcacttccatacaaactcttgctctctatagcatctatttgtgcaagatgcagaactgctttttatctttgatttattacaaaagacagcattaatgatagttttaaaatggtaaaatgattcaattaggaggggtgtattctagagttatctgattctctcaccacaagagtcctttcactcattccctgtcaaaggttccgtgtatattgacttttccttctaccacactagcagttacatttgtcaataattggatttaaaaaaaaaaaaaaggggatgaggcaggagaatcgctcaaacccgggaggcagaggttgcattgagatcgcaccgctgcactccagcctgggtgacagagcgagactccatctcaaaagaaaaaaacaaaaaggagaggcccggcatggtggctcacacctgtaatcttagcccattgggaggccgaggcaggaggactgattgagcctaggagtttgaaaccaccctgggctacatagtgagaccccatctctattattttaaattaacaagaaaacggagaaaaattcattcatcctatgccattggagttttggatacaagtgtgctaaccaggggctcccagattaattgacatgttctttatcctacttattcaaaatgtggatattttacatgttactgtggctgatggcatctctgtacatacttaggtgcttgcctaatggtgatttctattttcctctctcctacagtgtttattgattggaattctgctgtaagaagagctgttccttcgccgatgattgatggatgggtttctgtatggacttacaggtgtgtttttttttttggattattttctggctccacctttcccacctttggcgttaggagctgcttcgggttggcacttgtgttctgtgagcaagccccttcctcttttgagcaattccttactttctggcaacccaagatgctccatgctcatctggttcattgcctgccttcatcctggaatcagccacttccccaaggggccaggttccctttcttggagaatggtgacctgccctcctgcagccaggatcatgacttatcttaaaatccttcatttaattcatctgcaaaatgtctcttgccacatgaactgcaggcccacaggtcccaggaatgagtgcataggcatctctggggccggtacccagttgaccagtgctgtcaccctcacaagcatcaaagtcacccagggcgcaaggaagaccaagaccatgaggcaggaggccatggcttctgcggctgcagcagaagcaggagagggaggcagggcagacagcagcccagatgcctggggcctcaggggaaggaggccctgcctcgaaggcataggcgtccctcaagggtcccaaccccgggccctgaagggtgggcagcatcttcccgggaagaatatggtggctgggcatggtggcttatgtctgtaatcccagcactttgggaggccaaggtggacagatcacctgaggtcaggagttcaagaccagcctggccaacatggtgaaaacccgtctctatcaaaaatacaaaaattagctgggcatggtggaagacacctgtaatcccagctactcaggaggctgaggcaggagaatcacttgaacccaggaggtggaggtggcagtgagctgagattgcaccactgcactccagcctgggcaacagagctagactctgtctcaaaaaaataaataaataaaaagaatggttacccaggtgcggtgctgtgcacctgtggtcccagctacttgggaggctaaggtaggagcatcttttgggtctgggaggtcgaggctgcagtgagccatgattgcaccgtagtgctacagcctgggtggtggcgtgagaccctgtcttcaaaataaaaataaaaataatgtttgggggctgggcaaaatgattctcacttgtaatcttagcactatgggaaattggggaaggcagatcacttgagcccagaggttcaagaccaccctgcacaacatggcaaaaccctctctacaaaaaaaaaaaaaaaaaaaaaaaattagccgggcatggttgcatgcacctgtagtcccagctactcaggaggttgaggtgggaggatcccctgagcccaggaggtggaggttgcagtgagctatgattgcaccactgcattccagcctgggtgacagagccagaccttgtgtccaaaaaaaaaagttggggtgctttagtccttaggagtagtcctagggaaacagaatctctctctctgactttctgtcctcctttccctgcccaaggtaggactctaatcagattgggagcccaaagacctcattcgagagggtcatgccgcataccctagagcaaggaaagctgcacagagagaccaagaggaatctggacaggccctgatgggttccccaatcagtctgttaatatgagagcatattaatttttggcccaatcacatttcttcatgattgtgtatcatccctgtttaatgaagctgccattaaaacccaaaagaagacccggcatggtggctcacacctgtaatcccagcactctgggaggccgaggtgggtgaatcacctgaggtcaggagtttgagaccaacctggccaacatggtgaaactctgtctctactaaaaatacaaaattagccgggtgcagtggtgcctgcctgtaatcccagctacttgggaggctgaggcaggagaatcgcttgaacccaggaggcggagtttgcagtgagccaatattgtgccattgcactacagcctaagtgacagagtgagaccgtatttcaaaaaaaaagaaaacaaattattcttaggctgggtgtggtggctcacacctgtaatcccagcactttgggaggccaaggtaggcggatcacctgaggtcaggagttcaagaccaccctggccaacaaggtgaaaccctgtctctactaaaaatacaaaaattagcgaagcatggtggtgggtgcctgtaatcccagctacttgggaggctgaggcaggagaattgcttgaaccctggaggcggaggctgcagtgagctgagattgtgccattgcactccagtgggtgacagagtgagactccatctcaaaaataataataattaaaaaataaaaatacaggcctggcacaatggctcagtcctataatcccagcattttgggaggccgagacaggtgaatcatctgaggtcaggaatttgagaccagcctggccaacatggtgaaacctcatctctactaaaagtacaaaaattagttgggtgtgttggcgtgtgcctgtaatcccagctactcaggaggctgaggcaggagaatctcttgaacccaggaggtggaggttgcagtgagccgagatcacgccattgcactccagcctgggcaacagagactccatctcaaaaaaagaataaataaataaacaaataataaatacaaatacgaaaattaggcaggcgtgatggcatgcacctgtagtcccagctactcaggaggctgaggagtgagaatcacttgaacctgggaggcagagcttgcagtgagctgacatagtgcccctgcactccagcctgggcgacacagcaagactctgtctcaaaacaacaacgacaacaaaaatccactcaaccacccacccacccacacacccatccatccaaccatccacccatccatccatccattcatccatccacccacccactaacccatccatccatctacccacccacccatccaccctcccacccactcatccatccattcaacaacatactgagtatctactgtatgccattttggcaaggagcaggaatggaggacaaagtcataggcaggaaaaggattctggaaaagtggtccaggcagatgtcaggacaaagggaagagtttgctcaagtttgtcatgtggaggagcagagaggacgctggcagggcaggtgggaatggaggaagttgggtttgctgggttgataagggccagatcagacatcattttacagaaggattcattgaacaactatggtatgtaccacatgtgttctgttctttttcccctagactgctcaggagaatttattcatttttttttagagacagagtcttgctctgttgcccaggttatagtgcaatggcatcatctgagctcattgcagccgcaactcctgggctcaagcgattctcctgcctcagcctcccaagtagctaagattacaggcatgcaccaccacactcagctaatttttttttttttttttgtatttttagtggcgacagtgtttcaccatgttggtcaggctggtctcgaactcctgacctcagatgatctgctcacattggcttcccaaagtgctgggattacaggcatgagccactgcccctggccatagcttgtagaacttctttgtcactccacagagctcagtacaatttaaggcacagcgagggtgcccagctgactcttgattatttcctatgcagcataaagttctgctcctcgggagtaaatctgcgaatcagagccttcctcaggaagatagctctacagatgacccaggggaacaagtacaagccgtgcattccagcacccaggatttcttgtttcatgtcattttaaagaactcatggtttcaggtatactgtggagtcctaggttcattcccagccttggcctcagttgtcaagctagctgttccttctcacttgggggattcagccccttcccattttacccaccaactcctaatcatctcccctgctctactcaaccatctttttctggacactcttcctgcataacctagtatagagcagtccccttgtgctcgtctctaaagcttcctgttcttatcacaattgttttttcttctttctttgttttttttttttttttgagatggagtttcgctcttgttgcccaggctggagtgcaatggcacaatctcagctcaccgcaacctctgcctcccaggttcaagcaattctcctgcctcagcctcccgagtagctgggattacaggcatgcaccaccatgcccagctaatttttttgtatttttagtagagatggggtttctccatgttggcttggctggtctcaaactctcgaccttaggtgatccacccacctcaccctcccaaggtgctgggattacaggcatgagccaccgtgcccggcctcttaccacaattttaatcgaactatactcttttttcttttctgaaacacagtctcactctgtcacccaggctggagtagagtgtcttgatctcagctcactgcaacctctgcctccaaggttcaaatgattctcctgcctcagcctcccaagtagctgagattgcaggcgtgcattgccacacctggctaatttttgtatttttagtagagatggggtctcgctatgttagccagattggtctggaactcctcctgacctcaggtgatctgcccaccctggcctcccaaagtgctgggattacaggtgtgagcccctgcccctgtgcctggcccaatgtatactctttttttcttttcttttcttttcttttcttttttttttttttttttgagactgagccctgctctgttgcccagactggagtgcagtggcgccatctaagctcactgtaacctctacttcctgggttcaagtgattctcctgtctcagcctcccaagtagctgggattacaggcacatgccaccatgcctggctaatttgtgtatttttagta

SEQ ID NO: 97199 - DNA, 13065 bp, Homo sapiens
attatttcatcacctaggtataagcctagtacccagtattttattttcttttttctttgtctttgtttttttttttgagacagaacctcactctgtcgcccagactgaagtgcagtggtgctatctccgctcactgcaacctctgcctcccgggttcaagcgattctcttccctcagcctcgtgagtagctgggattacaggcgtggatcaccaggctcaactttttttttttttttttttgagacgaagtctcactctgtcatccaggctggagtgcagtggcacgatcccggctcactgcaacttccgcctcctgggttcaagcgattctcctgcttcagcctccccagtagctgggattacaggtgccccgccaccacgcccagctaatttttgtgatttttagtagagataggctttctccatgttggccaggctggcctcgaacacctgagctcaggtgatccgcccgcctcggtctcccagagtgctgggattaaggtgtgagctaccgtggtagagatggggtttcgtcattttggccaggttggtctcaaactactgacctcaagtgatccacccgccttaggctcccaaagtgctgggattacagacatgagccaccgcccggcttagtatttttttttttctgagcctcttcctccttccactcaatgcatctattttagtggaatgggttcctttgtgaacaatgatgttgcagttattcatgaagtaataaagtgtttgtgtattgattgatttctttggactggagggtttgcccagccctgttgagctttgtcattgtctacctcaggggaagagggagattgtcgctggtcagaggagaatgccagggcttctctcagacggaggcagcctcccatctcaccgcaagtcggatcttgagtagcacctgtttcggcccattgcccctttaacaaggggcccaggtgcccttggacttgctagaagaataatcatgactttgagtttaacaaatgtggtcacagtattccactgcagtccacctttcccacttctcctagcccttcttcttcttttttttttttttttttttatttgagacagagtttggctcttgttgcctaggctagagtgcaatggtgcgatctcagctcaccgaaacctctgcctcccagtttaaagcaattctcctgtctcagcctcccgagtagctgggattacaggcatgcaccaccatgccctgctaattttgtattttcagtggagatggagtttctccatgttggtcaggaactccccatctcaggtgatgggcccgcctcggcctcccaaagtgctgggattacaggcgtgagccaccttgcctggcctcctagcctttcttttttgcaaatctgacactcctcccctccaccccatgtgcctagacaaggccagcatgggactcacacaggaagagctgaggactggaggagtgagtaacttttacctgagtacgtttcagccctccaggtggtaccaggtacagtcctctgagaagtcgggaggaaaacgcctgtgcgggtctcattcagctctgcggtcctcagtgtctgtctgatactgagtctgtagtgaggatgcataacggggtaaccctttctgagctcctggattcatttgctgaattaatagcttcatactctctgaagagaggaatactttaggagtctcttttttgtttctgccacatttattaaattgtcacattttaacacattttaagccattttaacatctcttgagagaaggtaggggctgtggaatgtgtataaagagacaatatcttgtttttcttggatccctagctagcagatgtgattacagtttcttatcaagaactcagccagaaaataccagccaaaccctcttcctccattggattatctgaggcagcattcgtatctggtggcctctctgctctgagcagtttgtggagctccagaagatgtctctgatgatcctcttttcttcctttcaagggatttcctagattattcatcctaaaccttggtctcattcctctcctacgcccttaggtgttaaggaattggatatctatggagatagccagcccagccctaagcgacactgtagagaaggttaaattttgtttctctttgcctgtttctggtcctttgtcccttgctaagtccctaggtcgttcctgcttttttctaggtcacatcctcagcttcttcatctgcgtcatctctaaatgacagatagtagctcagtttgcattttaactgatagctgagatctttaactccagagatgctatctaaccatttagggacaggttaaatcacattgtcttctttccctagcctgccccactctccaaccccagcattttcatacagaggggcagcttaggtaggggtgactagaggtagtgggaggctggtggaagatcatgaggtagtgagtcctggaatcctccactttgctcccacttgctgagcgagggccctggccacccacactgaccatgcttgtattcatcagctgtcctagaatgtcctgcctcaggctggaggctgaggatgccagtgagcgaggcagaacggtggcttcagtcagccttcctgggttctgatgccacctccaccactgagtagctgtgtgaccttggagaatttcccaaacatctctgtgcttcagttccctgatgtgtcagccttatgcagttgtgaggattaacacgagcagctaagcacaaaaggcttctacatggcctggtagaaaatcaggatgccaccctgctggtggccactggaaaccctattacaatccagagtgcttcctaagtgggccttattattcctgtcttaaaggaactttctgcccagcaatgacaacttggccattgctacgaccattatgcatgagtttaacgggccagaaaatgggatggggtggtctgcacagcagctgcccactcgcaggtgccgagtgtatttgcaggtctgtttgagcccttacattcaggcctggggatggatgtgggtgaatgtgcgcgacaggagcgaggcagccccagtggtctgacttacattcaaagcacttcacggaatccatctgcccagacaacctcctaaagtggtccttcgttgaatgcctctcccgtctgccccccgaaaagttatctaaaagtccccactccttatgctttctctttttgagccagagtctcgctctgtcacccaggctggagtgcactggtcactgcaacctccccctggttcaagcaattatcttgcctcagcctcccaagtagctggggctacaggcatgtgccaccacgcccggcaaattttttgtatttttagaagagacggggtcttgccatgttggccaggatggtctcgaactcttgacctcaagtgatccccccgcctcagcctcccaaagtgctgggattacaggcgtgagccaccgcgcccagtcttcttatattttcttgtcacagtgcatctgcttgggtggcaggtgcacctacctgggggagagcacattttctgttcttttcttagtcttacgcagggaggattgtgattgggactctggcggctgtgagcagggtagggggtcttaattttagtgagcaaggggcacgaatgctcagacctgggccaccatggagttgtcggggtgtgggtaggagactggcgtcacccataaatgcagagtagacccacttcctccaggatatttgactgtgatcttgggccattgtgtctgttccccaggccctgagggttctcctgggataagatgggtatgaacttgctgcgctgatggtgaaggcgggtggctgaggaacaggaagagtgcgtccagtactgcttaagaattcggtgatgtatcctgggctctctagaggcttacaaacatgtggaatctaaaagtcactcagaatttggaactctctaaatgtttatgtcccagggtgaaatcccagccctgagctctatatatgggagtggccaggagggtctgagcaccgaggaaggactggcttctgcctggctcccggttttatgtttccctaacattgttatgtcttggatgtgtatttccttaaacctttcccaggttccttttggttctgggtctaggacactgagaagattgaaacattgggagtgcactggccttgctctctggaaaggctttacttttcctcttgcctatttgcagttcccttaaattagtcacattttgggaccctcttttgcattgaatttctgggacttctgtttgtggttattttgaagtgggggtgggaggacatgcctgggcccaccccgtggttctttaatgaagacgatggttttccttttaagcaaaagaaccttgtttaccattaaccagaactctggaaatagatatttaatccccaaacagaggtgatggtgtgtctagaagcaatttaaagcctccatagcttgactagtcactttatcctgggcaactttttggattgtttggtaatctagaaacgagagagaacgctaattgcttcaacattaaagaaacccaccttctagactcactcgttcccccacccctcctttatgttttctttcttgttcctctaagaaatgaaatatagaagacgaaaatataaactggactacagcagggtgcagtggtgcatgcctgtaatcccagcactttgggaaggaggattgcctgaggccaggagtttgagactggcctgggccacatagacctccttcctacaaaaaatttaaaaagtatatttaaaccagactagaaactttcaaccacaaaaatccatggggtcattgaggtgcaaatggaaagaccaggagcaaaagtagagggagcaaaagtagagggtggggacagtgtggaggtgaggacagtatggaggtggggacagggtatggaggtggagacaatgtatggaggtggaggcggtggctgagcagagcaggaaagctgctgggggctgtgaggagctaggtttggctgggtgacagcaagggctggacagaaagtgctttcagaaaagcccaaggataaagtccaaagagattaaaggttaaaaaaaaaagaaaagctcaggaagaggaagatgacaggtccccaggggaaatctgcctaatccagcagctgggaagacaggataccctcaggcccttccttagggcaaaaggattactccgtgcaggaaggaaatattacaaagtctttcttctctattttattattattatttttttatgagacggagtttcgctcttgttgcccaggctggagtgcagtggtgcaatggtgcaatggcgtgttcttggctcaccgcaacctccgtctcccgggtgcaagtgattctcctgccccagcctcccgagtagctgggattacaggcatgcaccaccatgccaccacgcctggctaattttgtatttttagtagagacgggatttctccatgttggtcaggctagtcttgaactcccgacctcaggtgatccacccgcctcagcctcccaaagtgctgggattacagacgtaagccaccgggcccggcccttcttctctatttttaactcatcttttaaaattgttctttctttcttttttttttttttggagactgtctcgttctgttgctcgggttgaagtgcagtggcgcgatcttggctcactgcagtctcaacctcctgggctcaaggaatcctcccggctcagcctcccaagaagctgggactataggcgtgtgctgccacactcggctaattttattttttgtagagatgaggtccctctgtgttgctcgggctggtctcaaactcctggactcaaaagattctcctgccttggcctcccaaagtgccaagatgacaggtgtgagccaccactgctggcctagatatctattttttatatgaaatttctatcatgtacataatgtgttcgtgcaatagcacatgtatattagatatagataaacaggttgttgggggtagaaaagtttggatatcagatcagaaaagtttggatatctcagctcagagccaygatgagagtggggagggagcccgcgcttctcaagctcaaatgcctaggagtcctttggagatggcgttcagatgcagattcttgttccatagatctggctggagcccaaagttctgcagctggcgggctgattcagaaaacatgagttggtgyttttcctctttttgccgccrtactccattgagagtcttagtcatggagggaaacccgaaaaccaccggtgtccgggacagatactctgacgcattctccyggaacaccctggggactgcgagaaagcccctgctggctcactcgtttgctgggatcagttcccatcaggcatgcggctgtgcttcttggtatcgatttgcttcttggtcccatggcttctgcagcccacgtcgggagggcaaggtgtggtgcagcctgagagaagcatgctcctttgcaggaaggagagggaggcgcacaggcgggccttttggagcagaggaggcagaggagtccaagctgggtgcagttcctctgctgcagccctgagctgggcagacaggacacttcgctggcctttcctggcctcatacttgtcactcggtgacactgcgaccagtgtgagcaaacgttcagaaagcacatttaaacactgttacttaaaattgcaacttcacagggccagtattctttttaccatgttccaaatgaggaaaccggggtgctgaatgattaagtgacttatccaagaccacagggcttgcaaatggcaagtgggaggattgtttgagcccaggaatctgagaccagcctgagcaacatgatgagaccccatctctacaaaaaattaaaacattagctgggtgtggtggcgcatacctgtggttccagctacttgggaggctcaggcaggaggattgcttgagcccagtaggtcgaggctgcagtgagctgtgattgtgccactgcactccagcctgggccacagaacragacttcatctcagaaaaaaaaaaaaaagttcacccaaggcagacaacttgtccagggagggcagagctagatgttcctgtgactgcagtgctggggcgcatctgtcctctgtcctgaaagcaggccgctccatgctcatctcccacaccttcacctcctgttaggccagcgtccactgcagtggcccagctcttcccagcatccccttacacaggatctgtgttcccttcatggtttggcctgcatgtccttcaacctgggacgtccactctctctcagttctgtcctcattgtgccctacttgtctacttcgggaactctccttcaccactcacctcacacccttcctccaggaagccctccctgactttctaggcagagttggagccctcaccctgggcatttccacagcagaaactgtcccaccacagccgttgctggtggtcatgtttgtgtttgccagcagcccacaagaggtcgaggcgcaacctgtagtcctcagctgctggggccgggcagtggtgtgctttcagcctggagggggcgctcaggaagaggttgtccacttgtgtgcagcttttatgtgtcctgtgcatatggttacagcaccgcttcctgtgaaggagttgagctaggggttgtgctgaatgcagagaacaagatacaaacttaaagaggcctagggtgtggcgggaaacacacaccccttcccccacctatatatgctcacgtgaaaaggtgcagacaagtatttgaggtagtgcagaaaataaatgcttggagaacagcaagggagggatgttagtagacacagagggaatagacagaggcaaagggggtttctgggtctccagagatctggggggctaggtgcaggaaggctttttttgggagagaagcagatcagctgcgggggtgcagagagagggaggggaaaggttgcttgaggcctcattgtagaggaccttccgtgaagcctaaggaggttgaacttggtcttagtggcagtcgggagccagtgattgtttctgagcaggggaagaaaaccaaagtactgtcttaggaagatgagtccctgtcagcggaatgcgcagtggacgcaaacgggaggcggggaggaagagatggggagtgagggcctgtggtccaggtgcggcatttagaatttaatccgcacagatagtaggcacggaaagaacatagatgatgtgtgcgggagttgagatttggggattgaccaggtgtggggattggagcggcttgaagaggcaagttccagtagaaggagtcattagtccttacacggtgctccttactccaaagcctgtattttttctgctgacttctctgagccttagtctcctcttctgtaaagtaacgggcttggatctcttgttatttgttctggactcctggcacagatctgctggttccttcatgccaatgacccaggcctgtttaccaggagaagcagacatcgtgacctttcccgtccagccttacagcctagtttatcaatccaggacaggggttcttagaagagtcctctctggtaaacaataaacaagtgctgttccgtctgcctcgcggtgcccccacacctgcctggccacgtcacactggcagatgggacgcgggcatcagctcaagttctgtggagcgagagattccgtggcccgggctgacctgggcttggaggcctggagctgcctgcggcccccgccgagaaagccaggagctggggctcgcttgtcaggcgtgtttctgtttctgtggcactgggcctgctgcccctggactgtggagacccagtgactggcgcagggtgagagccagggttgggaccagtgtgcgggcacaaagccccagaggaaggtgcgctctggtggctctggccctgtgatctccgtgcagccctcccacggctctgctgggggaagctctggggtccctgtgtgtgtaaaaactctgggcctgaggaatagcttctactttgtttctttctttaatttttttttttttttaatacggagtctcactctcatgtaggctggagtacagtggcacgatctcggctcactgcaacctccacctcccaggttcaaggggttctcctgccttagcctcccaagtagctgagattacacctgcctgccaccaggcctggctaatttttgtatttttattagagatggggtttcaccatgttggccaggctggtcttgaattcctgaccccaagtgttccgtgcgtctgcctcccacagtgctggggttacaggcgtgagccagtgcccccagactgttttgtttcttttctttcaaaattaaattgtccccagcttctctcctcaaacctcagttttaccccctctttggttcccatgcacaagtagagagaatatgaggttgtcatttcaatggccattatgaccagaaaattgtgagattgcatctctcagtcttgctccgtcccctctcttctttccctcctttccatcatggcactttggggcactttcaggtacacagagtgttggcaataacagtaaatatcctgaggtggggagcacttggatttgcctggcatggattgcgtgtttgtaggtgggaactcatccgagtgtggggaccacagtgctgttgtcatccccgtatgacagatggcacagctggggcaccgcaggcgccaactagcccggatctctcactgaccagcgctagggctgcaataggaacctggctggctggctccagggcccgggctcttatccgggaacagtgttgttcttatttgcctagatcaacaaagtcactgtagagaaagacaaaaacaaaacaaaatccaaaccaagtaagccaaaaaaagcttagcctggggacccagttctacatttggtggtggtcataaaagaggctacccaaatggcccgtaagcatagaaagcacttcaacctccctaattattcaagagatgcaaattaaagccacggtgagatactactccacacctgttttagttagagtggctaacaagaaaaagaccacatgttggggagactgtgactcacaccaactctcatatcagagtagaaatccatacaatcatcttggcagcatttaccagagccaagcatctgcacacagaaggatccaggaagcccccgccttggtgtagacgcatgcactcaaggtgcacagaagaatgttcactgcggcaccccaacgggtgagagcccccaaacggaaagaatgcaacgttccatcagtgtggagaagtcaagtgtggtgttcgtgcagtggaatactacagaaggatgaagaagaaacagctattgcaggaagggacacggtggaagaatcttatggggaaaatgctgagggaaggaaaccaggccaagtaaaacagatagaaagttcaagaccctgcagatcgtctgtatccgatgtcaagacatgggttcccttgaggtggtgatgggagggggcacgggggtttctgtagcgacctggttgatgggtgggggttgcataggcatgctttcctgtgaggatcgtcgagctgtgcattctgaatgtattctatacttctcatttacctgtttaattgtgcaagagatggggtctccctctgttgcccaggctggagtacagtgggcccatcatcgctcactgcaacctcgaatcctgggctcaagtgatccacccacctcagcctcctaggtagctgggaccataggtgtgcgccatcatgcctggctaatttttaagttctttgttgtccaggctgttcttgaactcctgggctcaagcaatcctcctgccttggccacccaaagcactgggattacagacttgcaccaccacacccggcctccatgttatatttccataatatgtttatttgaaaagtgacttgggtgccaggagacatgggccctccctagtcctggctgtctctaacttgtgagtgactcaagctgtctccggttccactttctggaagactaatggcttggatgagatcgtggttttcagatctgtcctagccacagaaccctctcttcaaacaagcccttacctgcaatctgaacataaaatgctacctggtgggactcacgagtgagttccggacaggacaggagacggctgtcactgggctccaggatgtgggtggcagtgcctgacttcccgctcctgcctgctgtgggagacgagcttcttgcactggggcctgatttcccaggctggcctctcagatcctgtggcttcaagttctcctggtcatgcagtgtcctggttcagcactgaattgttccctaatggtttcctgtgtggcagattccttagctctacagtgaactctaacagggtaggcttgaccggcttctgtggtttgcttggagtagttaggatgaaaattcagaacctgcctgctgactgaaatgggcgttcatgtcttagaatgctcaccagattgctttttctcttacacatagtagaggtcaataaaacggagtttgtgggatgtttcttttcttttctctttctttctttctttctttctttctttctttctttctttctttctttctttctttctttcttctttctctttcttcctttcttttctttctctttctttctttctttctttctttctttctttctttctttctttctttttcttttctttctctctctcgctctctctttcctttctttttcttttttttttttgagacggagtttcactcttgttgcccaggctggagtgcaatggtgcgatctcggctcactacaacctctgcctcccgggttcaagcaattctcctgcctcagcctaacaagtagctgggattacaggtgcccgccaccatgctgagctaattttgttttgtatttagtagagacggggtttcaccatgttaggctggtctcgaactcccgacctcaggtgatctatccgccttggcctcccaaagtttgggattacaggtgtgtgccaccgtgcctggccaggatgtttctgatgcagggataaggtggggaacttgggaaatggtgtacaccactgacggcctggggcacatggggtggacacactgggagtggatacctgaggtgggcacgtggggtggacacgtgggtgtgagtggtcacctgaggtgcacacgtgagggtggatatcatgagggtggctgtcaagagggtggatgctggttcagggctggcatgaagaccctagtcaggagggagccaaggcgtccaaggaggccctcaggctgcaagtgttggtttggccccagtcttggtgatgacaggacctttgggaatctgaagcccggtgaccttgggctgtggggagctggcgggctttatctgcccagcgtctctgccccagttttgggcctgtctgtgatgctgggcacctgctgatgtgcgcagcttcattcattcctcctccactcacccacctgaccactgtgtggggcgcccctgctgtgggccaggctggttccagggtccatcagcaacagaaacaaaaatgccctgtcctcttggggagacacaaccagcaacaagagaacagcgaaggaggcgtaggacatgcggctgatacgggcttaggggaaacgcaggcaggagagggggctgcaagctcaggcgggagctttggggccaggaaggcctggctcagaggggactcgggtcagggtcacaacaggggggtgaagccactgacccggagctgctggagagcttctggggatggacagagtccgccccacgggtccctcctgccctccctcggtgcctgccctgggccgtggagatgactggggagcagctgggcgttattttccccggggccagggtgggcatctcggcctcgagttgatctgaaaggatttactgctgtcagagccaccccatcgtgtgcagcacggactgggggggatttgaaggcagagggcctggggtgtgtccagccccacctgcccctcggccc

SEQ ID NO: 97200 - DNA, 212474 bp, Homo sapiens
  misc_feature (1)...(212474): n = A,T,C or G
ggaagcagcttgtggaagccccacttggggcctaggtgtcctaaggatggggctctgccctagcccctgcacaagggacctctgaaaccccaaacagggaagaggaagcagtgctctgaggtcccctcaccgctgcacggcctccccgaccccagcccctgtgcaccccgggggtcacggctctgctccctctggcttcctccgggggcttccccagcctcttccccccaggacgcacctgcagccctggcctctctcctccagcctgggtaccatgtccacacccctctgtttcctgtaccatgaaccatctgccatcacccacactggctgtgaagagatgttggccctcctttgacttctctcccatctcctacttctgcacaatcccagggcatatcggccctacgtcctaaaaatttatctgactaatcattattagatcaagtctgtctctcgttctaaagtcctaatagcggccgggcgcggtggctcacacctgtaatcccagtactttgggaggctgaggcaggcaggtcacctgaggtcagaggttcaagaccagcttggccaatatgttgaaaccctgtctctaccaaaaatacaaaaataagccagggatggtgatgtgtgcctgtaatcccagctactcaggaggctgaggcatgagaatcacttgaacccaggaggtggaggttacagtgagctgaggtcacgccactgcactccagcctgggcaacagagtgagactttgtctcaaaaaataggccgggcacggtggctcacacttgtaatcccagcactttgcgaggccaaggagggtggatcacggggtcaggagatcgagaccatcctggctaacatggtgaaaccctgtctctaccaaaaatacaaaaaattagccaggcgttgtggcgggcgcctgtagtcccagctactcgggaggctgaggcaggagaatggtgtgaacccgagaggtggagcttgcagtgagtcgagatcgtgccactgcactccagcctggacgacagagcgagactccatctcaaaaaaataaataaataaataaaataaaataaaataaataaggggctggatgcagtggctcacacctgtaatcccagcactttgggaggccaaggcagtcagatcatgaggtcaagagattgagaccatcctggccaacatggtgaaaccctgtctctactaaaaatacaaaaattatctgggtgtggtggtggacgtctatagttccagctactcgggaggctgaggcaggagaattgcttgaacccgggaggtggaggttgcaatgagccgagatcgcgccactacactccagcctggcaacagagcgagactccatctcaaaaaataaaataagtaaataaataaataccctggatgtggtggctcacgcctgtaatcccagcactttgggaggccaaggcgggcagatcacctgagttcaggagtttaagaccagcctggccaacatggtgaaacctcatctctactaaaaatacaaaaaaatttagctgggtgcggtgaggggcgcctgtaattccagctacttgggaggttgaggcaggagaatcgcttgaagctgggaggcggaggttgtggtgagccgagattgtgccattggccggggcaataagagcgaaactccgtctcaaaaaaataaataaataaataaataaataaacatagtcctaatagcatcttcagcccaaggaaaagcccagaagccctggcttgacatcaagttgttggaaactggctcattcccatggtcccagcaaggcctctgagcctcatctgtactcctcgtgcacgtgctcagggcttggcccaaccctgtccagctcaggctgggcactccccatccccccgcatctccatggccacggcccccaagcttcccagagccccacctccctccagaggggcaccttgccttcgatcctgagacttggttcacggctcacccttggtagggcgggcccctgaagggcaggaccattttttgcccaatgtcctgaactggacgtggctggcagatgacatcagaaagtgcaatgcagttggcatgacacgctcacagacatggttagccaccagcaagcaagcacacagacccactacacatgggtgcacacaggcagacacagtcaccatccacagacacacatgagcaagcatacgctggcaggagcacagacacgcggctgagactcaggcagaggcatgggacccggaatgagacccaatcccagacacctgaaggcggaaagacaggttttactcagattgcggtgtgggggcagactgcagtatttttttttttttttttgagacggagtcttgctctgtcccccaggctggagtgcagttgcaatctcggctcattgcgagctctgcctcccaggttcacaccattctcctgcctcagcctcctgagtagctgggactgcaggcacccaccaccacacctggctaatttttgtattttttagtggagacagggtttcaccatgttggccaggctagtctcaaactcctgacctcgtgatccgcccgcctcggccttccaaagtgctgggattacaagcgtgagccaccgcaccgggccaacccaggtttttaaagggagaacagaaaaggagcaaaaaaggggtatggggaagtaacgaaggggtaacccaagaggcgctggggaaatggaaaatcacagaaggactgagtggaaaacagggaaagtgctttagctgtggaaagtttgcactgggatagagtttgcactttgcattttggcagcactttgttaccttgagcagagaccaacacagagctggaatcacctttagggatgaggctcctgcaggccgatgccaggctgagctctgtcaaagtctctcaggacggcgttctggtaggtctcctccgcagtgtgagggctcacagttcgtaacacgcaggtgtgaacgcggggaccaaccgtccttccacggggcgtaccctgactcagcttggaggttctgtggtccctgtggcctgtgtgtgcttccaagctgggcagagccaggagcaccctgaacccccgaattctaaaaccaaaaatgagcatcttgcctgagacaggcctggagaggctgcttaactcccaacgccagggtcaaaagaaggtggttttctttgattgtttggttttgcattttccccttttaaaaaacaaactttattttggaataattttagatttcagaaaatgggcgacattgcaggaggggtgcggtgggtcacacctgtcatgccagcactgtgggaggccgaggtggtggatcacttgaggtcaggagtttgagaccaacctggccaacatggtgaaaccctgtgtctactaaaaataaaaaaattggccgagcacagcggctcacacctgtaatcccagcattttgggaggccaaggcgggtggatcaagaggtcaggagttcaggaccagcacggccaagatggtgaaacctcgtctctactaaaaatacaaaaattagctgggcgtggtggcgggcgcctgtaatcccagctactcaggaggctgaggcaggagaatcgcttgaacccgggaggcggaggttgcagtgaatcgagatcgtgccactgcactccagcctggccagtagaatgtgtgacactgcaaagcacagagtcctatgcacctgtcacgaagcctctgtcttccctgacgtcgccatcctgtgttgctgggttgccttaggaagcccacgttggggtccgtttatctcccccgcagaacggactttatttgaagtctaccagtcctgccattgatggccttcttcggctccagggccctatcaggtgccacaatgtttagagctgtcccatctcctcaggctctcctgtctgacagtttctcagatttccttgttcttggtgacctttgaggatcaccgacaaggtgtttttgtagaaagtccctcagtttgtgtccaggcacggtggctcatgcctgtaatcccagcactttgggaggccgaggcgggcagatcacttgaggtcaggagttcaaaaacggcctggccaacatggtcttgttactaaaaatccgtttctactaaaaatacaaaaaacagccaggtgtggtggcaggtaactgtaatcccagctacttgggaggctgaggcaggagaatcacttgaacccaggaggtggaggttgcagtgagccgagatcttgccactgcactccagcctgggcgacagagcgagactccgtctcaaaaacaaaagcaaccacaacaaaagaaagcccctcagtttgggtttgtctgatgtactttctcagcagtagactgaggttttgggtttgggaaggatttcacagaggtggggtgctctttgagtcacctcttatcagagctgtggggcatccgtgcgatcacctggcgacgctcacctggtcacctggccaaggtggtgcctgccagtcgcctcctcggccaagttcctctttgcctgtcttgactccgctctttggaaaggagtccctagacccagtcctcactcatggtgtgtgcataggggtaatctctgctctcggaacctacaggtattactgggaattcttttgtaggggaggttggtgtctttcttgcatttaattgttcttattttttatatcagcacgcgctccagcttggggtcataagccagcactatatgattctgctgttctcctctctggccctcctgccccctgtcatcccaccatggccaggagctcagcttgccttttcctgctctgccccagcaccagccatgtccccaaggggcccattcccagttcctttttatctcagaagagctcgtttatgaatttgctgacctgtcaccgactctccactcttgcaatacaaggggttttttctggctctccagacctagcacgtcctggcacgcggtaggtgccatgatccgtgaatgctaccctgcaagtgagtgagtgagtgaatgaggctgaggcaacaggctggccttgtgcagggctggggcctctccatatccaccaagggaaccccagcagcccccctctggtggaaggggacgggccacagccacctcccttctctctccttcccaggccccagcaccggaggtgggaccaggtgaccctggagagtccttcccctcactgttccccaagtagggagattcctggtacaccataggtgcaaaccttcctccagggccagcccgactgacaggctgacatggccccccgtgcctgctccactatgtcccatcctggaaggcggactgcccagtgacagctcctggaggggacaccagggagagccaggtgtccatttcacctgcagtggctatctgcagagccatcacccgcctctgcaacgcgagccctcagaggccaggggcccctggggagcagctgtgtcccttcagccgggactgaggccccggcccccatcacctcctggtgctgaccggctggtccagagcctgggatggaattacagccccaggtctgacccgcaagggcagccgtgcctcccctaggcctggtgagccaacttgcaggcacccgctgtgtttgagggatacggtctagcgggctgggggatatggaggggggtcctatgttggaggtggggatcagggaccactgggatgaatgcagagagaaagctccaaggagggaaggggcagcaaggccagggctgggactgagaagccacacgttggaacttaaagggactcaggccggccccgggtgccaggtggtgaagcaggagggagtccaggatggcctgggacagctgaggcctgggagctggttccaccctgagctgtgcaaggctggtagggaggggcccgttccccccaacatggctgggaggaccctcccggggtctgtggttaggccaagctgttcacagaccctctgagggaaggtccagctccgccctgcagctcccagggcctgctccagctgcgctctggttgccttcccacccctgcgctgggcctgacgtggcccctggcactgaggatgggctgccctgccttctcccctgcccctgcccctgccctgcccgcgctctccctgccctgcccgcgctctccctgcccctgccctgcccgcgctctccctgccccctcccctgccctcgctctccctgcccctgccctctcccctgccctctcccctgccctgcctgcgctctccctgcccctgccttctcccctgcccctgccctgcccgcgctctccctgcccctgccctctccctgcccctgccctgcccacgctctcccctgcccctgccctgcccacgctctccctgcccctgccctctcccctgccctgcccgcgctctccctgcccctgccctctcccctgccctgcctgcgctctccctgcccctgccttctcccctgcccctgccctgcccgcgctctccctgcccctgccctctcccctgccctgcccgcgctctcccctgcccctgccctgcccacgctctccctgcccctgccctctcccctgccctgcccgcgctctccctgcccctgccctctcccctgccctgcccgcgctctccctgcccctgccctctcccctgccctgcccgcgctctccctgcccctgccctctcccctgccctgcccgcgctctccctgccccttgccttctgtctgctggggcctcaggtctcagaccttcagtgcagtgcctcccccgccccatcccatcccattagggacacggcaggtgtggcctggcctctgtcccagggaaggtctggaatgcagatccctggtgtggtggcctggagtggtggtgggagccagggctcaggaagggagggggctggcagttggcagcagcattttggaaggacgattgggggtgagcaggcgcttggaatggagaccggtcgacagttggctgtggcagctggagcggcagttggggcttggcaggggcgcaggcccggaggacagttggggtggggcagccgtggggttggcaggtagcccctggccccagagcagctctggagggtggtcctggggaggcctgggtgggagggcagggccagctggcactggacctggccaagccaagcccgagaggaggcccacctctatccagcctcgacaaggccacctcccccagcccgtgggtggggctctcctgcagcccacggccggcctccagtccacccgcaggacccaggatgacgtgtggtgggcggctccctggacagccccagcatcctcaggctggtggcgggcctctctccccgccctgccctctgcctctccctctgtctgggctcccagcagaggcctggagagggcagggacaggttctgggcagttccctgggagggggcaggactcccagggctgttgccatggggacgactgagcaacaccactggctggtgaataaacaggcaggttccctgaccagtgactgagacaaagacaaccacagaaatcccagctgggggtggacaaggaaatgcctccttgggagaagagggggtggcagtaaaggccctggcgaggttggggagctgcttgggggggggtggggacacagacaggaaggggtatcttgttcctcgggaattttctttcccaaagctcctcccaggccatccttcctgaggatgagaggcagatccctactctcttggtggtgtcagagcacctggaatggggctgggtcccctcccagatccccatcccctagaagccacacagtgagggtggagggcaggtggccggctggcagggtaagtggtgcagggagtctgtgaacacaggtctgcggagaggccrtaagcgcgaggctgtgccaggaccctcggggggccctgccagccagatggctctccatttgtgtctctggttgagttttcccaggggtttgtggggggcacgtccctcagcaggtacatccgtggggcygcccagcctctgcaccttgccctgagccccccgtcctccagaactcctggcctgctgccgctcatccctcataggcctcagggtcccttggacaggctcccaacgtgctcacccagatggctgggggtgactttcaggaatgaccacgtaatgcagcgtggacaagtgtgccctacagagacctgaccttttgttcacctgtcttgttcacccacttggcgaggtcagggaccatgtccagttcatcatgtcaccctcaggggccccaccctctggaccctcccagacacccatgtgctggcctcccagccctgatcccaatgctgctgaggccacacttcacattctctgttcccagagctgcctcccagccggctgtcaggcggcagatccctccttgcatctgtggcccccaggcctggtgtgcgtcacctgcacaagtgtcccggggccctaggaagagggggcaccgcggcccagcctggcatccccccgtctcatgtctaatcccagcagcagctcagtagatgctgggctccaacaaacctgaggttcctgggccacggggccagcatgcccgtcggagcagacactccacgtggctgtaggagtccaactactccaccctcctcgtcctcccagttcggctgagaggctgcagctgctgctgctggtttttgtttgtttttcttttaaatagtaatggggtttatcagctcttggaataacggtctgtaggacttaatcagggcgctgtctctgagaccggtcttggttcttcctttttgacatactgtcttcgtctccaggctgcttgaccttctgttggttcttggagcagaaaagtcaggagtctctgtcccgtcactggcagtgttgccgagggggaagcggggaggagtggggctcccaggtgagagggggcccagagcctcatccgccccgttcattctagaactcagcacgtttctttttttttcttttttgagacagagtcttgctctgtcgcccaggctggagtgcagcggcacgaacttggctcactgcaagctccacctcccgggttgacgccattctcctgcctcagcctcccgagtagctgggactacaggcacctgccaccacgcctggctaattttttgtatttttagtagagacggggtttcaccgtgttagccaggatggtctcgatctcctgacctcgtgatccgcctgcctcggcctcccaaagtgctgggattacaggcgtgagacaccgcgcccggccctcagcaagtttctaccaagacaggcagccctaacctggcaggtggggttggcctgggtcgtggtgagatcaaggtttggttcttatgggcaggcctcctaagcgatgactgagtgccactgtgtgttccgccaggcagctgctgctgctctccatccctgcatggacaacggacatggcaaaccatcaacactgctctccttggaggctgtctagggaggtccagacatcttgggagagactggggttctcttttgcgcaagagagcatgggcaggctctgcgggaggcccttggggcaggcatcagggctctggtcctccttgctttggctcggtgggcccgagctctcctgtctccccaggcctcctttcctccgtggggtacaactgggctctgggtgggcaggtgggggctcctgcaggcagtgctgttttctccaagggggatgcacgtgacccgccagaccctcctggaagccgcctcttctcagggtggttgtgctcagcccccacttcccgaaggtcggtgaggctggggctacagtttcagaccagagcaggcagtgccaccgagagggtgccgcgcgaggtaggccggcgacggggcttcctgggccgcagtgccatcccggcgaccttggcgaggggatgggaacggggtgtccgcacagccatttccaggcgcccgcgacggcagtaagggagtgtcccaggcgttggtcccggcagccacacctcgcttcgcctttgctcactcatggagagccctcagccgcctcccactgccgctcctgaatgcgcctcacacatccagatttgaaagcacccatagggccgccgcctcccacctcccgaggaatccgctgcgctgggcccgcagggaggcaggctggacggcccgggcgcctccccattggttggccgggccgggctcgactccctcgcgcggctgccggccacaggctcacctcccttcccgccgcgcccggggagaggaagcgaggtggcctttacccctgcgcaggccggccaggaatgcggggccgcgcttcccactctacccgcccgagggctgaggacggcggaggcgagaagcgacgcgcagagtccgggcgccgagtggtggagacgcgtcccaggccgttcggatcggggctgcacacgggctggggcgaggcccgggccgctggttcccgccccctcccggagccattcgtcccccgcagacaacacgacgggagggacccacgcgcggccgccggtgcccctagtcagccaaaagcgagccccactggcgggcacccccacgaggcctgcgcccgaggtgcgccgatctccgggtgcgccgaggcccccgagggtaggcgcgcgcggtgcccaggcccttccagaccccgcaccccgggcggccttccttgggggcgccttttccgcaccgcgagcggcccgcgttgatgcccggccgggctgggggagtcgccaagtttgcgagacgcgcgcagtgcaaccgcgcgtcaggcgcggggacggccggtgacctgggcacccgcgcgcccccgaggaacctgcgcgtgggcagcgcccggtgcgcggcccgggaagggagcgggtgccctcgccggggtcgccgctcccgtggggtgtttccaggctgctccgcgctcgcggggcaagggcgcagcgggggccagggggacccccgcgccgcgccgccccagccccccgccagcccaggggagggggcttcccacaatgcccagcgagctccagcccgcacttccgctgtccggctgcccgcgggggggagaacggacccccggcgcggccccctgcgaccccgcggcgcggcgccgggagccgagcgaggggcggggccggcggccgggccggcgtgggcggggcccggggcggtggccgcggccggggcgcggcgcgggccaatcagcggcggccgggcgcgcgccggggggcggggtcagggtccgcgggcggggcgcgcgcgcgcgggcggcgggggccgcggggttggagcgggcgcgggggcgcgcgccggcctgacggaccgacggacggacggacggaccgagcagccccggcgagcgcgcagctcggacccgcccggacgcagcgccctcccggcggcggcggcgatcaccggcgccggcccggcggccgcggcgcccgccctcgcccgcgccccatggggtcacaggtaagcggcgccggctcattgtccgcgcggccgggcgggcgcatcgcggcgggggccgggcccggagccgggagccgggagccggggccgctgcgagcccgggcgcgcccccgccgccggccgccccgccacgccccgccccgcgggggcgccctcccgggggccatcggcgctcccagctgcggcgcgggctccgggggcggcggcggagaccccggcccggcccccgcgggtgccccccaggccggcggcgcggggcggggcgcgcgggggcggcgcgggttccccgcggggctgagcgcggaggcggctgggctgccccggcccctcggcccccggcacctcccgccgccgccgcgctccctccccggcacctccgagaggggaattttccagctggtaatttctgctgcgtcaacgcctggccccgaggcagcccgggggcgtcttggcgccccccgcccgcgccccccgccggcacagcccagccgcacccggagccgcccgcgccgagtttgccaagagtcggaactgcgggaggtgggcgcgggcgggtcccggcgccctgaggccggggggtcattgtctccccggacgccgggcgccggcctggtctccatcttaatcgccggccgaaccggggcgcaggggcctcggggcggggcggctcggggcgcggagggctcggggcgcgcggggcggacggggcgcgcggaggaagcggggtccgctgcgagccgcgtctttgtttctctgtaaatagacatgtcagtttcgcgggggagcgcgagccggtgtctgacaactcaatccctaaggcaaacggggaattctctgcgccagagggagggctcctgctagttggggttcccctggccccgctgacagattcactgtttgtaggtttaacgaagcacacacaatagggctggaccgaggagccagggtacagaccagatggggcgaagaacggatattttctgacagcgaagaaatataaacaaaagaaagtttgagattcgcagcgaatttcctctctcgctttccgtgctgcaatctcaacgatgcatttggagtggattacggtggcaagattgtgatcagcattgtttaaagaaatgctaattagaaacgtgtttagcgcrcggcctgggcgcagacacctgtgcgccgagaactcacgggcattttaattgtatcgattgtagaatctttcatattggctctattatcagagctaacttcccgtttgggtaacagactggatacatctctgctgctggcactcacgctgcctctgcaaggcactatttcactctacaagagtggaaaatagtttgttcatcaaaaggaaatgtatagaaggggtttttcacatgaataatgaagcaagcgacagtatttatcagagtagaacctttctgctcggtgtgttttacgtgtttccaactggcacttttgggcacctcagcctggttaccactgcagaaaggactgaggagtgaggggagtacttgggcacaagttactgcaaatttaggtgggaacttactgtgtcccctaaaaagctagacatcttctccgtaactgaaggaagagggctggggagttactgtcagatttctccttggggcgtggaatgcactcactttgaggtgtttagaaatccgaaattccgccttgccttcaggccagcctggggacaagcatttaattaagcctctcactgacagcattatcctgaacgtgagagttttcttttgcttagatgaggtgatttctgttcgggtttagctgttttgtgtgaggatgagtcgttctgtgctcagacctgagttccactcctgtttcggatgttcgggttgggtggactgttacctaagggcccccaggtcagttccaccagggccaggctgacccagtgccctgcgccctccgtccctccccagcccctggtggtcacagaggtcaggaggtaaacsctgtgaacggtgaaactgctccaaggatttagaggaaatgccgtggggggtacacagttgttattgtcagacgatgtactatttacaaacactgaattaaattttagcagagtgaactttccaacactgccctgacgtggggtttttaaattaagggaaattgggccactctgtccctgtggcctgtgtttctgggacagcggtgcagctccagtgctctgttctccatcagaggtcttagcccggcctctcagagccctggagacccacttcgtgcacggtgcctagacggctccacagcctgagaactggagccggttcctcccactgccgtgactggtgcccaggcacccgctccactgctgagttaaagtgagaggaaaggtctagaagtccttgccccttcccatcckcacacccagtgtcacggcgtctgccgtggtaggttccctgtcctggggacttcgtgttcttgcctaagtaccgttcttgtaaaaactcaggctgctgcttctccctgggctttgcatgttttacctggaagtctcatgagtgaccttgagtgatggttgatacttscctctactggtttttctagcagattwaaaaaaaaaaataccctttgaatctgtcccctcccctgggggaaaaattcatcttgttgctgctaagtttgcttgaatggcctgactcctaagaataaatgtttgattcaaaatctctattaaggccacagacttattcagggctttgagaggccgccgccttatcctgattgtggtcctcttgccgtctgccgcggctscggcgtagctgtgaacttgtgcggagtgctggggtcttaggccatggggtccatgggagggattttcctgcttttctgttatcacttagaccctttgagtgcctcacatatacagacccaggcttggtgttctggtttgctggtgatgacaaagggccccaatggtgttgtttatagatggaaaagagaaaggatgttttttaacaacctaaaagtggttctgaggctgggcgtggtggctcacgcctgtaatcccagtgctttgggaggctgaggcgggcgggccgcttgaggccaggagtttgaggctgtaatgaactatgattgtgccactggactccagcctgggcaacagagcgaggccttgtctctaaaacaataaaattaagtaataaataaacaaataaaacattgtcctgttaaagcataaaaacaaatgaaaccagtgaaatttgacctaagtatgatttatgcaaagtgttctgttgaatggttctgttgcatagttgagtatcagcagtgccgttttactctaatttacaatttaaaattattaaatgcttctaaacatcattatctggattaaaaatttgctaccatagctattttacaatagaaagttgagaaacattagtgtatttttcaaaagcatttgcagatcttttgtggttttttttttttgtttttttttttttgagacggagtctcgctctgtcgcccaggccggactgcggactgcagtggcgcaatctcggctcactgcaagctccgcttcccgggttcacgccattctcctgcctcagcctcccgagtagctgggactacaggcgcccgccaccgcgcccggctaatttttttgtatttttagtagagacggggtttcaccttgttagccaggatggtctcgatctcctgacctcatgatccaccygcctcggcctcccaaagtgctgggattacaggcgtgagccaccgcgcccggccatcttttgtgttttgacagatgggcttttgcgtcttaccggagacactcggggtttcctattcatgacagctctttggtgttactgagggcctgctgtggaccagactttgggccaggttggtgacaaagttcccacggaggtgggttgggggcacgcagaaaccactgatgtgacccagtgtggtggctggcagaggctggcaagaaacggcccaaggctgggaggagggtgcctggactgctgtgtggactgctgtggggactgctgtggggagtggcaccrgagcccaaaggtgactcgagggaagggagtccactcggagatccacccgcacggttccagacctggcagtcatccggtcctggtggagcgagtcatattccaaaccctgcttcccggagagtggattgctggccggagggcagggccactgtacgtaggaggcagcttttgggagctggtcagctgtgggggtaggcatgaggagcagttgagtttcacgttgtaccttctgaagacttggttcagcacacataatgccttcccaaggacactcgctgtctttttggaaaagtcatccgtgaagcatttctttttttgagagggagtctcgctctgtcgcgcaggctggagtgcagcggcgcgatgtcggctcactgcaagctccaccttccgggttcaccccattctcctgcctcagcctccggagtagctgggactacaggcgtctgccaacatgcccggctaattttttttttttttttaagtagagatggggtttcaccatgttagccaggatggtctcgatctcctgacctcatgattcacccgcctcggcctcccaaagtgctgggattacaggcatgagccaccgtgcccagccaaagcatttcttctctgggcctgtcattgtcggcccaggtgtcgcccccgggctcctcttggtttctctttgagcatctctgacttactagcgactcagtccttytcagtttcccccaaaatggaaaagagccacatatgtgtgtgaacaatcagtttctaaaaatgtcttcatttatctgaaagtcgggcagcattgctgcttgcatgggacacacagatactttgtttgtaagacattttcgtttacaaaagtgcatcacatcatctcttccaaccactctgaagaaaatgaagaaaatgaagsctcttgcacagaaagccttcccattcgctggcatatcgctgcacacgaggcctgcgtcggtgctcctctgtggagatgtggagaggggcactgctgtgccttgggctacgtgcagagggcttaggaactcccggtgttgacagctgcctttgtgagaggtggacacacctggaccgcgtggcccacgttactctgggcaagtcgtcttcttagtgtgggtcacccgccggatggacagaggctttgcttatctgctggggcatggggagcaaaactatggctcttaactgggcagaagaacgagaagtcggcccaagctaagcattacctgtcgcagtgttgattcgccgctttcccaactgacttccctgaaagaatcccacaaaaagtcacagagattagaagcttctgagttatgaagaaactcgaaggcctggttgttgatttctgggctgtggaggggcacatccagacacacaggctttctagaaacacactcataatccactcattggccatagccagccgctttgcagaggctgagaagtggagcaaggctgttctggttggaggaacagcaagtgcagggatagaaccagaaaacagagttgttgacacaaagtgcccagggctgtttgtgcagcatggggacaactggccctgggaagccgggagggaggggtttgatggtagtgagatggtgggcgggagggagggtttttttttttttttttgagacggagtcttgttctgtcccccaggctggagtgcagtgacgagatctcggctcattacaacctctgcctcccgggttcaagcgaatctcctgccttggcctccctagaagctgggattatgggcatccgccaccacgcccggctaatttttgtatttttagtagagatggggtttcatcatgttggccaggctggtcttgaactcctgacctcaagtgatccgcctgcctcggtctcccaaagtgctgggattacaggcatgagctactgcacccagccaggaagggtttgatgatggtgagaygggggtgcagtgatgggaagatgggggagggagggtttgatgacggtgagacgggggtgcagtgatgggaagatgggggagggagggtttgatgacggtgagacgggggtgcagtgatgggaagatgggggagggagggtttgatgacggtgagacgggggtgcagtgatgggaagatgggggagggagggtttgatgacggtgagacgggggtgcagtgatgggaagatgggggagggagggtttgatgacggtgagacgggggtgcagtgatgggaagatgggggagggagggtttgatgacggtgagatgggggtgcagtgatgggaagatgggggagggagggtttgatgacggtgagatgggggtgcagtgatgggaagatgggggagggagggtttgatgacggtgagatgggggtgcagtgatggaaacatcacctctcagagcacccagaagaacgggggtgggggaaggcggtaagtgttccttggccacgtgaaattttgggtgggattagaacctctgagttgtcctgcagaccctgagctttcaggaaaaagggcgtggttcagggcttttgtggcaaccgccaagtgagtttttctgatatttgctaaattagctttcaagacaacatggtctgtagtctttcttgtctyggtgtggccctatttgaataaaatgggtgttctctttccatgccatttaaattattgaatctggtgaatggcagtatccttttatttggcaagttcaaagccagcttaggtattttcgaaagaagtagagattattcagctcctttaggggtggaggacagactggctgaagaaggcacttgtttgtccaggtccagccccatttcttcctcctcccatttcagtgtggaatctgcagacccacaagactcggaatttcccatgcttcagggaggccggctgctcaacctcgaaggtggccctgatgcttaggtgggacrtgtctgcttgttacccattcaaggaaacagaggactttggccagcgaccctgccctgagcctctggtctctaaagaagccttgattcgcctacagcctcctctctgcactcaaaatctccacttctcaagtgtaatctggtcgtttacgttagtcctgtggggagcccattcaacggtttacatttccttttacaaacagaaaacggagcagtcccaaagaacacacacacacacacacacacacacacacaaggttcctagaggacaaagktcaggacaggaatcaggacagaggaaaaggaattggaagacaccacaacgagaaaacttgttctgggaagtgtgtggtcagggatgcagtgtgacgtggatattgtccttttttctggtctgaattatttaatttttttttgagaaggggcctcgttctgttgcccaggctggagtgcagtgrcacagtcatggctcactgcggcctcgacctgggctaaggtgatcctcccacctctgcctcctgagtacctgggactacaagcacgcaccaccacacccggccaatttttttatttttgttttatttttattttatcttatttatttatttatttttttgagacagggtctcactctgtcgctaaggctggaatgcagtggcgtgatcttggctcactgcaacctctgcttcctgggctcaagtgattcttgtgcctcagtctcctgagtagctaggattataggcgtgtgccaccacaccctgctaatttttgtactttttttagtagagaccaggttttgccatgttgcccacgctggtcttgaactcctgagcgcgagtgcacccccatctgcccacctggaacccccaaagtaccgggatgacagtgagccactgtgcctggccttttgttcccatttttatttttattttatgtatktatttttgaggtggagtctcgctctgtcgctcaggctggagtgcagtggtgcagtyttggctcactgcaatctccacctctcggtttcaagtgattctcctgctgcctcagcctcctgagtaactgggatcacaggtgcgcgccaccatgcccagctaattttttttttaagttttagtacagacggggtttgtccatgttgcccaggctggtctcgaactcctgagcttaagtgatccacccgtctcggcttcccaaagtgctaggatgacaggtgtgtgccaccgctcccgactttttgtttccatttttaaaacatgttttgtacagacagggtctcgctgtgttgcccaggctggtctcaaactcctgggctcaagcattcatcctgcctyagcctcccaaagtgctgggacgacaggtgtgagccatagcacctggcccgtggtctggaattccgagactcactgtaggcttcactctcatgttttcgtgcttgccgggttggccgtgtcctgtgctcgccgtgtggtcagtgctgttcctgtttctcctaacagcagccgttgactgatggtgcatcttcctgtggacatgtctttaaacccaagcgtgggagggtgaggaagctgtcagtctggtgtaggactgagcccagccttggccaatcacggaacccattgtactgaaatggaataggcctcctgtgctcctttgtcggggcctagagcccatcagtcccagggctgggttttgcrtgcgtgtacacgtgtcagctctagggagagcaccccaggcttttctyattgggggcccgtgtcacatacaaaagtgcccgtctcccccatgggtgtgctggtgggtgaattcagggcgcttgaactcaggaaggctggacgtgtgtcccgtcgtttattcccggttctcccagccacctccggttcccgacgctgtgagtgcagctttgctggctggtgctgcaagtgtgtttaggattttctgcctgtttcgggagtgtatcggttccgcttgatcagggctgtgttcatgtttctaaaatgttaatggtaagagctcactattgagtaaaagcacagatggtaatttttcccgcaaaaagcttcttagataggggaagttaaaggtgtaagttctcgcagtgtgctgagtgactggctgggtttttctggtgagtaagtgcttggggcaggctgcgggacagccttgtgctctgagaattgttagtgatatcacaaaggtttttatttctgaagggaaactaagggagtcaggatatttaaaaccgcctcggtgcttcctaaacagtggctgttgtttttttccaaagtgaatgaaacatttcaggttaatgttactctgtactttaagtatttctgtttagcatcaccttattaaaagtgagcctggaccagacatggtggcttacacctgtaatcccagcactttgggaggccgaggtgggcagatcacctgaggtcaggagtttgagactagcctggctgacatggtgaaaccccatttatactaaaaatatatacacaaaaaaattagctgtgcgtggtggcacacacctgtaatcccagctacttgggaggctgaggcaggagaatcacttgaacctgggaggtggaggttgcagtgagctgagagcgcaccattgcactccmgcctgggcaacaagagggaaactccgtctcagaaaaaaaaaaaaaagcgtgcctgcttgtagtcccagctgctcaggaggctgaggcaggaggagcgtttgagcccaggagtttaaggccaccctgggcaacacagcaagaccctctctaaaataaaaaataataatagtaataatggccaggcacaggggctcaggcctgtaatcccagcactttggaggctgaggtgggtggatcctgaggttaggagtttgtcttggccaacatagtgaagccctgtctctactgaaaaaaaaaaaaaaggccgggcgcagtggctcacgcctgtaatactttgggaggctgaggcgggcggatcatgaggtcaagagattgagaccatcttggccaacatggtgaaaccccgtctctactaaaaatacaaaaattagctgggcgtgatggcgcatgcctgtaatcccagctacttgggaggctgaggcaggagaatcttttgaacctgggaggcggaggttgcagtgagctgagatcgcaccattgcactctagcctgggcaacaagagcgaaactccatctaaaaaaaaaaaaaaattagccatgcatgggggcagacacctgtagtcccagatcttcgggaggatgaggcaggagaatcgcttgaacctgggaagcagagattgcagtgagccgagatcgtgctgtggcactccagcctgggcaacagtgtgaggctccatctaaaaaaataataaataggctgggcgcggtggctcacgcctgtaatcccagaactttggaaggcccaggtgggcggatcacctgaggtcgggagttcgagatcagcctgaccaacatggagaaacccggtctctaccaaacattcaaaattagctgggcatggtggcgcgcctgtaatccagctactcgggaggctgaggcaggagaatcgcttgaactggggaggtggaggttgtgtgagccgagattgcaccactgcactccagcttgggcaacaagagcaaaactctgtctcaaaaaaaaaatatatatatataatatacttcttaaaaagtgtgcctgtttacattggccaggcgcggtgtctcatgcctgtaatcccagcactttgggaggccgaggcaggcggatcatgaggtcaggagatcgagaccatcctggctaacatagtggaaccccgtctctattaaaaatacaaaaaaacaaaattagctgggtgtggtggcgggtgcctgtagtcccagctactcaggaggctgaggtgggagaatggcgtgaacctgggaggcagagcttgcagtgagccgaaatcgtgccactgcactccagcctgggtgacagagcgagacttcgtctcaaacaaaaaaaaaagtgtgcctgtttactgtttttatgacttttgctttcttttcttcgttatacgttgctaacgtcatacactgggagtttgcatgtttttgcctgaggaaatggttatgtttcgctgcctacggtgatatatggaaatacatctatagtatttcgttgcttttattttagtttgtatgtagacttgttctgtacttcggagtgttttgaagaacttttcggaaatcattagcagacaccctctgctggacggtgaaatgcgtgtcccgtgactgacaaagcggctgtcagtgctccgagcgtcccagttgcttttcttacttgttggcggagtgaggcagggagttacgaggtggcactaactctgatatcccatctagttaaagccattttcacggctgctcactggatttcactagacgttgcagtaacattcagggaggccgagaagtggtygttttaatccgtttacctctggtctggcccctgggacactgttgctgtttttgctttcttcagtgtggaaattgctagagaccttgggagaagggagggtaggaggtcccatcgtctgtgggaccctgtgtctgtgtaaggccatgtcgagtgcccatggcagagccctcacaggaagcagagctgtgatcacagacgcctccgggtgagcctgagaktcagggtcaggaagggtctgagtgagacacacacctgcaccctggtgagggctggctcgtcttcttcgggatgcgctcctggagggagcaaagctggcaggcagcatccattagcrtccygggtgckctctctgttcgcttaatgttattgataacaacctcattttgtacttcacctaatttttgccttgtcttaagaaggaagcgcatccaggaagtcatgagttggtgtctcagtgatgctcttctcttctcagacagagtctcactctgtcgcccaggctggagtgcagtggcgcgatctcagctcactgccacctccatctcccgggttcaagcgattctcctgcctcagcctcctgagtagctgggattacaggcgcacaccaccacgcctggctaatttttgtattctgtagtagaaacggggtttcaccatgttggtcaggcggtcttgaactcctgaccttgtgatccgcccaccttggcctcccaaagtgctgggattacaggcttgagccactgcgcctggccttcttttttttttttttttttgagctggagtttcgttctttcacccaggctggagtgcagtggcgcgatctcggctcactgcaacctctgccttgcaacctctgccttccagtttcaagcgattctcctgcctcagcctccccagtagctgggattacaggtgtctgccaccatgcccggctaatttttgcatttttttttaatagacacggggtttcaccatgttggccaggctggtctcgaactcctgaccttgtgatctgtccgcctcggcatcctaaagtgttgggatgacaggcatgagccaccgcgaccagccagtgatgcttttcttgacatgctgacatgaatacataactatcaggagagatggcgagtgcccaggtgttggctggagctgtggccactgttgctgtagaacatgccctgggggtccgcactggcctggcccaccctccctctgcagaactgactgcggggcggcactgcgctgctctcctcctcacgaagacccagggttggacctccttacgcagcccagctggaggggaccgtgacttggatgcaggggctgcaccgagggcttctgggctttgcatctggtttctgggtggctttgccacgtgctttccagcaggaccgtggtcaaggcatgcctcacctggcaggggcagcgtggatggcgccagtggctctcaccccagcgcccttgtccagctctacaaagggccccttgcagtgtacctcaaaactacagactcaaaaggcagggtccctggcggatgggaccatgtgagtcctgggtgaagacccccagtgccaccactcagagcgtggtgccgtgcagtctctgtaggtgagcttgctgtttgggcgagttcctggggctgcgttacatgggaccatggcctgagtggctgaaaacggtagagccttattctgtcacagggctggaggctgacacccagcatcggggtggacggggccactcttcctcccaaggctccaggggagggtcctcctgcctcttcagctgcaggtgttgaccacagtccctggtgcctcttggcttatagacgcctcgctccagcctctgcctctgtcttcacacagtctcccctgcgggtgtccaggttttttcctcttctttcttcttcttccttttttttttttttttgagacagagtctcactctgctgcccaggctggagtgtagtggcaccatttcagctcactgyagcctccacctcccaggtttaagcgattctcctgcctcagccttccaagtagctgggattacaggcgtgtgccaccacgcctgactaattttttgtatttttggtaggtacagggtttcaccatgttgcccaggctggtctcgaactcctgacctcaggtgatccgcccaccttggcctcctgaagagctgggattacaagcctgagccactgcacccggcctctttttctttttctatttttttttcttgagacaggatctcactctgtgggccaggctggagtacagtggcacaagcacagctcactgtagcctccttctcccagactcaaggatcctcttgcctcagcctcccaagtagctgggactacaagcatgcaccatcatacctggctaatttttttactttttgtagggacagggtctccctatgtggcccatgctgggctcaagcgatcctcctgcctctgcctccccaagagttgggattacaggcatgagccaccacatctggccctttccttttcttttcttttctttttttttttgagactgagtttcgctcttgttgcccaggctggactgcagtggcgcgatcttggctcaacgcaacctctgcctcctgggttcaagcgattctcctgcctcagccttcctgagtagctgggattacaggcatgcgccaccatgcccggctagtttcgtatttttagtagagatggggtttctccatgttggtcaggctggtctcgaactcctgacctcagatgatctgcccgcctcagccttccaaagtgctgggattrcaggygtgagccaccgtgccaggcctggccttttccttttcttttaaggaagctggtcctattgggtgagggccygccctaatccactatgacctcatcttaacttgattatatttgcaaagaccctatttccaaataaggtcacgtttgcaggtttaggacttcagcagacacatttcagcccttaacagcatcacagcttgggttttcttgatgcatcttycacacgtatttctctatggaggcttctccacacatcagcagctgctacctctcgtggccactgtatccttgacgctgctgttatttacagcagaggtggcaagtaaccagcgtcaccaaaatattaactaatgcattcagccagtgtgcacgcagccctgggcctgtggcaggtcaggttcctggcctgggtacacagcaggtcatggagtccttgctttgctgggttatgcagatgggggagatgctttgagtatcttgggtgatgtgagcctgtgaggagagacacggggtgggtggggagggagtcatgttgggggtgagcagagatggagccaagaggggcagctgagtgttgcggctgcttgtgcctcccaatccgaagcaggactcgggccctcctctgggcaccccctttgccttgctcactgcacctgtgcccactgcatctgtgcccaccgcacctgcacccactgcacctgcacccactgcacctgcgcccacctgcgcccactgcacctgcgcccactgcacctgtgcccacctgtgcccactgcacctgcgcccaccgcacctgcacccaccgcacctgtgcccacctgcgcccactgcacctgtgcccacctgtgcccactgcacctgcgcccactgyacctgcacccactgcacctgtgcccactgtacctgcacccactgcacctgtgcccacctgtgtccactgtacctgtgcccactgcacctgcacccactggacctgcgcccacctgcacctgcactcactgcacctgtgctcacctgcactcactgcacctatgcccatctgtacccactgcacctgcaccttctgcacttgtgcccacctgtacccactgcacctgtgctcacctgcacctactgcacctgcacccactcgacctgcgcccacctgcacctgcactcactgcacctatgcccacctgcactcactgcacctatgcccacctgtacccactgcacctgcaccttctgcacctgtgcccacctgcacccactgcacctgtgctcacctgcacctgtgcccatctgcacccactgcacctgcacccactggacctgtgcccacctgcacctgcactcactgcacctgtgcccacctgcactcactgcacctatgcccacctgtacccactgcacctgtgctcacctgcacctgtgcccacctgcacccactgcacctttgcccactgcacctgcactcactgcacctgtgcccacctgtacccactgcacctgcacctactgcacctatgcccacctgcacctgtgcccatctgcacccactgcacctttgcccactgcacctgcactcactgcaccrgtgcccacctgcacccactgcacctgcacccattgcactcactgcacttgcaytcgtgcccactgcacctgcgcccactgcacctgggcccactgcacctgtgccttcagctcagacttgggctctcggccttttgtgtcttctcagcagctggtgagctgtggccccttttcagaatagcatgttttgtttgtttattttgagacagggtcttgctctgtcatccaggctggagtgtagtggcgcaatctcagctcactgcagcctygacgtcctgggctcaagcgatccttgtgcctcagcttcctgagtagctgggaccccaggcatgtgagaccatgatcagctcacaatagcatttttagtgcatccagtaagatccctggaaaatgaagggtagcaactactgaaatatcattgctaaaattcaggaaagtttgrtttgtgaggtagtaacatgtggaactttaatttagcacatagcattgtgaatggtgcatctgatattcctaattccgaagtagggtgagtatcgagcattctaagttgcctgcggtggccatggtgcgatgtggacatggctgtgtctgtggcttgtcacccacagtcagactcctgaggcccaggcttgctgcactcctctgggaggtcaaccccaaatgaggacccttgcctgggggtgggaggaggcaggtcttggggttctctccccctgcagaggcaggtcttgggcctcctgttgaggggtggggctgcctgtgggtttccagatgagattctctctcaccgcatttgcaycgctggattgtatattttcccagttttgtaaaagttatattattattttaaaacctaattatatttttaaaaacttattttggaacttttcaaacatacacaaaattagagagaacgtccacgtcgcctggctgcrggaacccccagtgctctgctcttgtcttactcatctctcccactctctcccactgttttttctttttcctttctttttttcttttcttttttttttttttttgagacggagtcttgctttgttgcccaggctggagtgcagtggcgtgatctcggctcactgcaagctctgcctcccgggttcatgccattctcctgcctcagcctccctagtagttgggactacaggcgcccactgccatgcccggctaatttttgtatttttaatagagacagggtttcacgatgttagccaggatggttttgatctcctgaccttgtgatccacccgcctcggtctcccaaagtgctgggattacaggcgtgagccaccgcgcccggcccttcccactgttttttctctcaagtgttttaaagcaaatctcagttttaccctcggtgcttcgttgtgtgtggctcacacgcagccgggcaccccgcaacacttcctcagcgtcgcgatgctgggctgggctcagcgttcttgactgtggcctgcacattttcactgtggctttacttgaatcagagttgggatgagggccatgtgctgcttgtgggtggtgatgtccctgaagttgcgtttcttctctctgtttcatgctacttatttgctgaaggatcagttttggttctgtgacacttcctacctgaaggtctggctgggtgcatccttgtgaccttgaactcctgcctgagccgtcagtagaaccaggtagaggcgggagggctgggactcgcccgcgcagggcagtggcaggggagcagttactctggtgtgtagccacaatgcttacattggaatttccaacttaatgtattttatttatttatttattttttttttttgagatggagtcttgctctgtctccaggctggagtatagtggcacagtctcagctcactataacctctgcctcctgggttcaagtgattctcctgcctcagcctcccgaatagctgggattacaggcgcgctccaccacrcccggctaatttttgtatttttagtagagacgaggtttcaccatgttggccaggctggtctcgaactcctgacctcagatgatccacccgcctcagcctcccaaagtgctgggattacaggtgtgagccaccgtgcctggccccaacttaatgtattttaaaacacgggttgtttcatattttgatgcctgtttttkttttgttttgtttttttgagacggagtctcactckcaccaggctggagtatagtggygcgatctcggctcactgcaacctccgccttccgtgttcaagcaattctgctgcctcagccttccaagtagctgggactacaggcacgcgccatcacacccagctaatatttttctctatttttagtaaagacggggtttcaccatgttggtcgggatgctgtcaatgtcttgacctcatgatccacctgccttggcctctcaaagtattgggattacaggcattagccaccacgcccagccgtagtttttgttttgttttgttttgttttttgttttgagatggagtctggctctgtcaccaggctggagtgcagtggggtggtcttggctcatggcaacccccacctcccgggttcaagtgattctcccgcctcagcctcccgagtagttgggattacaggcgcctgccaccacacccagctaattttttgtatttcttttactagggacggggtttccacatgttgaccaggctggtcttgaactcctgaccttgtgattcgcccgcctccacctcccaaagcactgggattataggcgcgcaccacattgcctggctaattttttgtattttagtagagacrgggttttaccatgttggccaggctggtctcgaactcctgacctcgtgattcgcccgcctycgcctcccaaagtgctgggattacaggtgcacaccacattgcccggctaattttttgtatttttagtagagacggggtttcactatgttagccaggatggtcttgatctcctgacctcgtgatctgcccgcctcagcctcccaaagtgctgggatcacaggcctgagcctccttgcctggccttgtgaaaaattttaatgttaattttcttatttcaagttgattttcatttagtttttactaaaaatgcaaatgtagtttaccgttgcttctcttttttttatgtaggaaaagttgatgcaaattttgcctgaatttggagttttcctattagtgagagttttgttccgaaaagatcgccgccactttggtgggtcagcactaaagccttgtttcaatatctgcagggtcagttcttttgaatattttaatgcttccacgtttggagtctaagagctatttttactttagttttttttcccaggcaagtacttggtctgaacgatgtatgagccagacctggcagaaaagtgggagttggtgaaatagatgtgctacttagtgacagggactgtgattctaacattttgtcttatggcagagttggatgaaaggggtttgttcctgcaccatggctcacctgcccagtgagtcctgagtcctcatgtggcagggagtcagacagcagcagctctcttcccagcggggtagagctcacctggctgcaaggtgagccggctggcccgtcgcccagctcagagctgaccctcacacgtgcagatctctgctgggcccaggggtcagggtcagttgtctgcgtcacctatgggccaccccctctctgcacccccgagatcttcctgctctctgcgttgcctatggctatgagcacagtgggcttcctggaaatactttcagaggaggtgacagtcgtatccttccagggcccctcctgccctgtggaagaacttacttctgctcctggaagtcagaagctgggaggcctggggctgtagtgtcttctgtatgagaggtggggtggggctggggagaggaaggctgcttgactcttcttcagggagacccaccccatggcagctccgaggtcctagtgggctggtggctcgcatcttgtccacctgttgtcgtctcttgcccctaggggggctcatgcccatcctgtggggttctgggacccagactcgcccctgtgggctgggcggggtggggctcatgcccattctgtggggttctgggacccagactcgcctctgtgggctgggcggggtggggctcatgcccatcctgtggggttctgggacccagagaggcagactcttcgcctgcctgttgggtttgtgaaaagtcaaagagagtggaacacggacgccggctggtgctctccagtgttctccggctctgccgctggagctcctcgtaggagtgaggaaagagagtggagcctggacgccagctggtgctctccggctctgctgctggagctcctcgtaggagtgaggaaagagaaacgtagattgctctcatgttcgcgctctgttcacctcctgggtgctgatttcctgtggcgtcatcctaccctgcatctgtgctggtgggcacgttctcgcgtttgtgttttatttttatttatttttttgttttttgagacagagtctcactctgttgcccagactggagtgcagtggcacaattttggctcactgtaacctctgcctcccatgttcaaacgattctcctgcctctgcctccctagtagctgggattataggtgcgtgccaccacgcccagctaattttaatatttttagtaaagacagagtttcgttatgtaggccaggacggtctcaaactcctgatctcatatgatccacctgtctcagcctcccaaagtgctaggattacatttgtgttttatgaataaggaccttggtttgcgaggggaaggggggttttggtgcctatcctgagtgtggtcggtgtgtgtgagcttgtgcagacacgaccagctgggctttctgttctcatttcttcccgttaatttctgataaacttctaagcatccacgtgactggcatttttaatgttcctggaattgggttttgctcagttttaatacttgacggttttctgggccatcttcgaattgtcgagtgtttgggtctttttctgtttgtcactgttagccatagcagtgcttggaacatcttggaaccaattagctttttgggttatttccttggggcagagtctcagaagtggaattagtcaaagaggcagaggcatctgtaggcctcatccccacgctgcaggctgcttcaagggccgccccactctgggcctcctgtgtcacggccacctttgtaattgacattacgttaatgtttgccagttccatgtatttagagttttcttttctttttttttttttgagagagggccttgctgtgtcacccatgccggagtacagtggtgccatcttggctcactccaacctcgacctcccgactcaagggatcctcccacttcatcctccagagtcgcggggactacaggtgtgcaccaccatgcccggctaattttttctattttttgtagagatggggtctcaccatgttgcccaggctggtcttgaacttttgggctcaagccatctgctcgccccggcttccctcagcgttgggatttcaggcatgagccaccattctggcctggccttgaaatcttttctcagagttaagcacgtgtcttttaagtcctttccagaaatctttaaaattgtatcattgagttaagccacactggccaccacacggctaacttcgtaagggagaagaggggagaggaagggaggtcgcggagctcctgctgtctcccggagtcctctccacctgctgggctctggcaggtttgctgaggaccgcgtgagggcgctgctgtcttctgggctcagggctcctgtgagctcctgaggcctggacccaggggtggcctttgttgctcccttgggcataatatggggggacacaggcaagatgtggggccaccaccccagcaggcctgtgccgaaccccaggaccccattcctggaatagacgcggccatgaggactggacgcgctgggcgtggcccacggcggggcccccagggctgcgcccccagggctgctgaccttgccccccttggctccaccgagtctgcacctttagtgcccacttcggccaagcccatggcgaagtgccccaggcgctgcggtccctgcgaaggggaacgtggaaggcgaacgtggagagccccttgagtgcctctgcagcaccggagcaccgagccgccagctcccaggtcttacctcatgaatcatggagttttctttcttttttttttttctttttctttttttttttttttttttttttgaagcggagtctcgctctgccgcccaggctggagtgcagtggcgccatctcggctcaccgcaagctccgccccccgggttcccgccattctcctgcctcagcctcccgagtagctgggactgcaggcgcccccaccacgcccggctaatttttttttgtattttttagtagagacggggtttcaccrtgttagccaggatggtcttgatctcctgacctcaccatccgcccgcctcggcctcccaaagtgctgggattacaggcgtgagccaccgcgcctgctggttttatttcttaaggcggccttggcgcctgtcctggccgagcgctggaccgaggagggccttctctgggggaggctctgtccgcctcccacccacgctggaggagctcaggtctcatggggaggcaggactcgcttaggggcgggaggtcacactgccccggagcccaggccctgccctaggaggaagagcctggcttcccccttccctcccgccgggcccggggctgagactccttgtgggtccggatgaccctgtccgtgacctccgccctggccccgcttccgccccacgcccccctgaagccccgggctccgtggcgtctgccttccgggccctcccctgcgctcagcccccggggcargggctgggaaggatggcttgactggcctacagggtacaggggacccctgacaggttcatcgctggggccccatgggccccccctccgtctgtgccgtgcggatgtggagactgaggactcctccatcgaaggcggccggysgtgaaatccagtaatctgggtggggtccttaccgcgctgtccgcggggtttcctcactgctcaggcggctgctgctcatccacgccacctccgtcggtccgttcagcttccgtgagtgtcccctgtgggaagktccgttcagcttccgtgagtgtcccctgtgggaaggtccgttcagcttccgtgagtgtcccctgtgggaagktccgttcagcttccgtgagtgtcycctgtgggaaggtccgttcagcttccgtgagtgtcccytgtgggaagggcctgtgccgcacaaggtggggacttgggcacacggcctcrgaggccrgacaccgggcgagccccgctctgggagtgagacccgctcggagggggagcgagccctgaggcgccgcctgtaagccagacccgctgcctcacacagacgggtgcttckcttgttttggcctagtacagcttttaagcaaaaagtaactggttagggattctatcatattgcttgatgtaaacaaatgcggcaaaatgttaaaaaatggagtagctgaaggccgggcgcggtggctcacacctgtagtcccaacactttgggaggccgaggcgggcagattgcttgaggccaggagttcgagaccagcctggccaacatggtgaaaccccgttcctactaaaaatgcaaaaattagccaggtatgctggcgtgcgcctgtagtccgagatactggggaggctgaggtgggagaatcactcgaactcgggaggtagaagttgcagtgagccaagatggcrccactgcactccagcctgggtgacagagcgagaccaaactgactcaagaagaaacagaaaatctgaatagacctataacaaataaagaatcagtagtcaaaaaacttccaatgaaagaaaagttcagaaactttcactacagttattgtactttttagcttccaaaaagaaaagtcaatttcaataaagaaattgaatcaatagtcaataaacttccaacaaaagaaaagtccatctctgtctctctctatatatgtatatgattgtatatatcacttcactgttgaattctatcaaacattttaagaattaacaccaatcctggccaggcgtggtggctcacgcctgtaatcccagcactttgggaggccgaggcaggtgcatcatgaggtcaggagatcgcgactatcctggctaacacggtgaaaccccgtctctactaaaaatacaaaaaattagccgggtgtggtggcgggcgctggtagtcccagctactcaggaggctgaggcaggagaatggcgtgaacctgggaggcggagcttgcagtgagccgagatggcgccactgcactccatcctggccgacagagcgagactccatctcaaaaaaaaaaaccaaaacaaaacaattagctgggcgtggtggtgggcgcctgtagtcccagctacatgggaggctgaggcaggagaatcgcttgaacgtgggaggtggaggttttagtgagccaaggtcgcaccgttgcactccagcctgggtgacagagccagattccatctcaaaaaaagagaaagattccatcatattccttgagagcatagtgttgcctttattttaagcaggtattacaaccttcttatttaggttctattttttttgaagttaccatttcaggtcagagttagccatagcagtatctcagatttaaaatgtacacaaatagttttcttgccttgttaagctgattagctttcttttctttcttttttttttttttttgagatggagtttcactgttgttgcctgggctggagtgcagtgatatgttctcggctcactgcaacctctgcctctcgggttcaagcaattttcctgcatcagcctcccgagtagctgggattacaggcacccgtcaccatgccaggctaatttttttttttaacttttagtagagacggggtttcactatgttggccaggttggtctcgaactcctgacctcaggtgatccgctcgtctcagcctcccaaaatgctgggattacaggcgtgagccacctttcccagccagctgattagctttctgagaaaattataatatttttaaaagttggggccgggcatggtggctcatgcgtgtaatcccagcactttgggaggcggaggcgggtagagcacctgaggtcaggagttcgagaccaacctggccaacatggtgaaaccctgtctgtactaaaaatacaaaaaaattatccgggtgtggtggcacacacctataatcccagctactggggaggccgaggcacgagaatcacttgaacccaggaggcggaggttgcagtgagccgaaggcttcagtgagccgagatcgtgccactgccctccagcctgggcgacagagcgagactccgtctcaaaaaaaaggaaaaaaaaaaaaaagctgatgcatggctttgtgtattagtttcctggggctgctgtgaaagtaccacctgctgggcagctcgcggcagcagaggtgtctcctctcagttccagagtccagcgctggaactcagggtgtctcagggccatgctccctctggagactccaggcagggtccttcctgcctcttccagctcctggtggctccaggcatcctttggcttgtgactttgtcactccagtttctgcctgtggtcacatgaccttctctcctccctgtgtctttttttttcctttagagatgggggtcttgctctgtcactccagctagagcacagtggtgcaatcggagctcactgactgcagcctgcaactcctgggctcaagtgattctgccgcctcagcctctcaacgtgctgcgattagaggtgtgtaccacactgcccggctgctgtttcattttaccttctatcagcacttagtatgagacatttttgaaatactgtaaatcagtattacagatttaattttcaaaaggtactgtaggtcgggcgtggtggctcatgcctgtaatcccagcactttgggaggccgaggtgggcggatcacgaggtcaagagatcgagaccatcctggccaacgtggtgaaaccccgtctctactaaaaatacaaaaattagccaggcatggtggtgtgagcctgtaatgtcagctactcaggaggctgaggcaggagaatcaattgaacccgggaggtggaggttgcagtgagctgagatcgtgtcactgcactccaacctggcaacagagcgagactccttctgagaaaaaaaaaaaaaagtcatgtaggttttttttgttgttgtttttttgagacggagtctcactatgttgcccaggctggagtgcagtggtgccaactcagctcactgcaacctccgcctcccaggttatagcgattctcctgcctcagcctcccgagtagctgggactacaggcgccccccaccacgcctggctaatttttttaattttggtagagacggggtttcaccatgttggccaggctggtctcgatctcttgacctggtgatccacctgccttggcctcccaaagtgctgggattacaggcgtgagccaccgtgcccggcctggtactgtagttttgttgaccccaagtgtatgtgttgggcctgtccagcattgagatgtggtccctgggctgagaggagggcagggcagtgtcaggcagcgaggtggcatgtgtgctgtcagtgtaagaacagtgacgcccgggagggcttcctggaggagggggaggctgtgtccattggctgagagggctcaggactgctgttgtgattcatggcaggattcgcctttacagatctgacctgttccactgtgtcatctataacccaaatgacagactaggagctcagctgccccggccccctcctgggtgcccagagcaccttgtgcccatctgraggcacccctgccaccctcacacatggcccgagccaggcactgctccaggcttcccctgcgtgtgactggtgggcacctggctggagctggagggatgctgaggcctggagctgctgaggtgggagtggaagcccctccattcagggaccccacagcccacygagaccctggtggctggggctgagatgggacagcgcagggcagtgagaggtgtttggaaaggggaagcgtgctgggctctggctggggacgcccgacagaaggaagtgacgttatgtcggtgcagtggctcacgcctatcatcccagcgctttgagaagccagggcggcaggttcgtttaggaattcaagaccaacctgggcaacacgacagaaccccgtctctacaaaacaaaaaaattagcccgtgtggtggcrtgcccctgtggtcccagctgctcaggaggctgatgtgggaggatgccttgagcctgggaggttgaggctgcagtgagccgagattgcgccactgcactccagcctgggggacagagtgagaccccattacaaaaacaaaaagaaggaagtgacggtagccaggttcgggaaggcggaggaggcggcctgggcgtcagagccgggctggagatgaaggaactgaaaggggccagtgggcagggaggggcggggctggcagggcctccgacagagacctgggcagcccggggcctgggcagcccggggccggcagacatggctttgcatcttcagatggccacatgggggctgccatgtggaaaacctaaagtcctcatcgccagcacccacttgctcactggagatgatgtggatagtaccaccggtctcgctgtcgaaagacgactctgctaacatgtcttggagtgttttctagtcaggagctcacttaaaaattttgaaatgcgaccacgaacaatggtaatatgatgtatatgaaatttaatttgtacgacagtttcacagtattcatgtcttaaccttaattttttcagaagaaggtaaaccatgaacgccttggtgtgaggggaggtgcctggttcctgctggtgaggcgccctgggggatggtgcccacactggtccctgcctggatggcatcctgggggatggtgcccacgcctggttcctgctggtgaggtgccctgggggagccgggttggtgggtttcttcgcaagagtgggcagagctgcccagaaacgtgtttcctcctgttggcgtctgtggcatcgcgctctttggtggtagaaacggggcgtcagtgacctggggctgccatgtcaaagggccacaaagggaacgtcgtaaacaacagacatctgttccctccagtcctggaggccggaggtctgaggtttgggcatcagcccgccgcggttcctgggagggtgctgggggcctgaggttcggtcgtcsgccgcggcggttcctgggagggtgctgggggcctgaggttcggtcgtcggccrcggcggttcctgggagggtgctgggggcctgaggttcggttgtcggcccaccgcggttcctgggagggtgctgggggcctgaggttcggtcgtcggccgcggcggttcctgggagggtgctgggggtctgaggttcggttgtcggcccaccgcggttcctgggagggtgctgggggtctgaggttcggttgtcggcccgccgcggtttctgggagggtgctgggggtctgctccaggcctctctccagcctcttgccggggcctccgccgctgccgctttgtgccgacctgtgtccaaatttcttccccttttaagggtacttatcatactggattaggggcccccagtaacctcattgttttttttttgagagggtctcattctgtcactcaggctggagtgcagtggcgcaatctcagctcactgcagcctccgtctcccggttcaagtgattcttgtgcctcagcctcctgagtagctgggattacagacgtgcgccaccacacccggctaatatttgtatttttagtagagacgggggtttaccatgttggccaggctagtctcaaactcctggcctcaascaatctgcctgcctctgcctcccaaagtgctgggattacaggtgtgagccatcgtgtccagccccagcgacctcatcttaattaattgcatctgcaaygacctatttccaaataaggtggaattctgaaatatgaggggttagggcttcaacatgaatttgggaggcgggggcggggggttcaacccgtaacaaatggcagtgaggtccttggataagcacaggattatagctgaggaaaaatatttttacaaaaactaatcctttattgaggcataatttacgtgcagcaaacagcacttgtttaacgagcataatctgatgagctcgaactcttgggtggagctgccggtggctttggagacacaggccgtccccattgtgtctggaattggtgggttcttggtctcactgacttcaagaatgaagccatggactctcgcggtgagtgttacagttcttaaaggcggcgtgtctggagtttgttccttctgatgttcagacgtgtttggagtttcttccttctggtgggttcgtggtcttggctggcttcaggagtgaagctgcagaccttcacggtgagtcttacagctcataaagacagtgtggacccaaagagtgagcagcagcaagatttattgcaaagagcaaaagaacaacactttcaatgtatgaaaggggaccccagcaagttgccactgctggttggggcagcctgctcttattcccttacctggccccacccacatcttgctgattggtccattttacagagagctgattggtctgttttagagagagctgattggcccattttgacagggtgctgattggtgcgttgacaatccttgagctagacacaaaagttctccaagtcttcactagatagctagacacagagcactgattggtgcattcacaaaccttgagctggatacagggcgctgattggtgtgttcacaaaccttgagccagatacagagtgctgattggtgtatttacaatccctcagctagacataaaggttctctaagtccccaccggatcagctagacacagagcactgattggtgcatttacaaaccttgagctagacacagggtactgattggtgcatttacaaaccttgagctagacacagagtgctgattggtgtatctacaatcccttagctagacataaaggttctccaagtccccaccagactcaggagcccagctgtcttcaccgagtggatccggcactggggctgcaggtggagctgcctgccagtcccgctctgtgcacctgcactcctcagcccttgggcagttgatgggacccagcgcggtagagcagggaggggcactcgtcagggaagctctgcaggagcccactgcggggagggggaggctcaggcatggcgggcttcaggtcccaagccctgccctgaggggaggcagctagggccggcgagaaatcaagcacagcgccggtgggccggcactgctggcggacaccctccgcagctgctggcccgggtgctaascccctcrttgccctgggccgctccgagtgyggggccgccaagcccacacccacccgkaactctagctggcccgcaagcgccgcacgcagccccggttcccgcccacgcctctccctccacacctccccgcaagctgagggagccggctccggccttggccatcccaggaaggggctcccacagtgcagcagcgggctgaagggctsctcaagtgcagccagagtgggcgctgaggtcgaggaggygccaagagtgagtgagggctgtgagggcttgccagcatgctgtcaactctcaccatcaccacaggagcttcccgcagcctctccccctaccccagcccaggcagcccctggccggttgtctgccactgtggactcacttctgttgtctagagtttcctataaagggaatcacacgctttccttggtgactgtcttctcttactcagcgtaactgtgggataatccgtgtggcgtggaygtgacctgtatagggggacggaaggctgagcagggakgtgccccagggtgccgaggccgggacggagcccagcagccccttcttgtgcctgagctgcctctgcagtttggaagcatcccgtgtttacctgctcacctgttgatgcacatttggacattcgggttgttcccaaaccttggctgttctgagcgaagctggtgtgaacgttcacgcatgagtctgtctggacaggtggttttgcttctcgggtaggtaccggagttgttgggtcctgtggagttcagctttgctgaactgttttccacagcggctgcaccgttccatgtgccctcagcagctgagcaggctccaggtgctcgtgtcctcgaggacacatggtgtggccttgcctcttagtcctggccactctcatgggggagcttgctgtggttccgggcgcacttccccgacagctggggaagcctctgtccatgtgtgcctgctgatgcttcttctttgtgatgtgtctgttcaaaacgttttcctgctaaaagattagtttcaccaggctacacgtggtggcttgtgcctgtaatcccagcactttgggaggctgaggtgggaggatcacttgaggccaggagctcgagaccagcctggccaacatggcgaaaccctgtccctactaaaattacaaaaattagctgggtgtggtggcacacacctgtaatcccagcttccctgggaggctgaggtacaagaatcgcttgaacccaggaggtggagattgctgtgagctgagattgcaccactgcactctagcctgggcgacagcaagactccatctaaaagaaaaaaaaaagttagtctcaccaggccacaygtgatgactcacgcctgtagtcccagaactttgggaggctgaggctggtggatggcttgagcccagcacttcgagaccagcctgagcaacatggtgaaaccctgtctctgtaagaaattaaaaaaaaaaaaaaattagctgagtgtggtggtgtgcacctgtggtcctagctactcagggggctgaggtgggagaattgcttgagcccgggaggtggaggctgcagtgagccctgwtcatgccactgcactccagcctgggtgactgagtgacaccttgtctgaaaacaaaacagtttcaccaaaataattgtggagagcagttcttagagtaggtgagttaaacttgatctggacagatggctgcggccacctttgtcttccccagagccctcctggccactggcagtttgattctagagccaagggtatcttgcttccactttaaaatggtgatttatctgttaattacatttttttttttttttttagacagagtctcgctctgtcacccaggctggagtgcagtggcaccatcttggctcactgcatcctctgcctcccaggctcaggtgattctcccacctcagcctccttagtagctgggactcacaggtgtgcactaccatgcccagctaattttttttttttttttttttttttttgagacagagtctagctctgttggccaggctggagtgcagtggcatgatcttggctcactgcaacctccacctcccaggctcaagtgattctcctgcctcagcctcctgagtagctgggattacaagcatgtgccaccatgcccggctaatttttgtatttttagtagagacggggtttgaccatgttggccaggctggtcttgaactcctgacctcaggtaatccgcccacctcggcctcccaaagtgctgagattacaggtgtgagccaccacgcgcggccaacgcccagctaatttttgtattttttgtaaagaccgggtttccaatagaacagaacagagccctcagaaataataccacacatctacaaccatctgatctttgacaaacctgacaaaaataaggaatggggaaaggattccctatttaataaatggtgctgggaaaactggctagccatatggagaaagctgaaactggatcccttccttacacgttatacaaaaattaattcaagatggattaaagacttaaatgttagacctaaaaccataaaaatcctagaagaaaacctaggcaataccattcaggacacaggcatgggcaaggacttcatgtctaaaacaccaaaagcaatggcaacaaaagccaaaattgatgaatgggatctaattaaagagcttctgcacagcaaaagaaactaccatcagagtgaacaggcaacctacagaatcggaggaaatttttgcaatctactcatgacaaagggcgaatatccagaatctacaaagaacttaaacaactttacaagaaaaaatcaaacaaccccatcaaaaagtgggcaaaggatatgaacagacacttctcaaaagaagacatttatgcagccaacagacagatgaaaaactgctcatcatcactggccgtgagagaaatgcaaatcaaaaccacaatgagataccatctcacaccagttagaatggtgatcattaaaaagtcaggaagcaataggtgctggagaggatgtggagaaataggaacactttcacactgttggtgggactgtaaactagttcaaccattgtggaaggcagtgtggcaattcctcaaggatctagaactagaaatactatttgacccagccatcccattactgggtatatacccaaaggattataaatcatgttgctataaagacacatgcacacgtatgtttattgtggcactattcacgatagtaaagacttggaaccaacccaaacatccatcaatgatagaccagattaagaaaatgtggcacatgtacaccatagaatactatgcagccataaaaaaggatgcgttcatgtcctttgtagggacatggatgaagctggaaaccatcattctgagcaaactatcacaaggacagaaaaccaaacactgcatgttctgactcataggtgggaattgaacaatgagaacacttggacacagggtggggaacacaccagggcctgttgtggggtggggggaggggggagagatagcattaggagatatacctaatgtaaatgacgagttaatgggtgcagcacaccaacatggcacatgtgtacgtatgtaacaaacctgcacgttgtgcacatgtacccttagaacttaaagtatatataaaaaaacaaaaacaaaaaccgggtttcaccattttgcccaggctggacttgaactcctgacctcaagtgatcctcctgcatcagcctcccaaagtgttgggattataggcctgagccaccgtgcctggcctgttagattacattttaagcaaaattttattttattttatttttattttattttatttttttgagatggagtcttactcttgttgcccaggctggagtgcaatggtatgatctcggctcactgcaacctccgcctcscaggttcaagtgattctcctgcctcagcctcccaagtagttgggattacaggcgcctgccatcacgtcctgctaatttttgtattttagtagagatggggtttcaccatattggccaggctggtcttgaactcctgacctcaggtgatccgcccgcctcggcctcccaaagtgctgggatgacaggcgtgcgccaccgcactcggccttaagcagaattttaaatgaaaggtttaagtggagcctaacggaaatgcaggtttcaagtcagaggcaaaacagagagatcaagtgtgaatgtggtaaaacagtgtgagttgatgtttgagagggtcgttcttgcccgctgagtggtttggaattagacgcagggatgggccctaggggaggagccggaggcccgggacgccgcgtgccaggcgctgccagcagggggcacccgaggcctcccgccctccctgccttgtgccctacgcggatcgggcgtccggtggatgcggcagacacactaccgcctgaatcacgcctgctgttttacatttttattagaacaaacagccttccgggcagagctccttagggacgcggggaaaaataaccccagtctgccccctaaattaatactttgaacacacagtgcagcaaatggagtatattcatcgcggtcttcagatttccttggtctgcgtcctgcgacacaggcatctatccaggctgtggccagggcacattcgtcctcaaatgagaggattggagtgagtgggaagtgtgcgtcctcaacagcagcgcgcctgtttacagtcttcaaaggcgctcaatgatggacacccgtcaccttccgggagtctgttggagagaggatttgggatgggcaccgccacttccaagatggccctagaggctgggccgttcctatgygcattcggcagaggccactcttccttcactccagctgacccagggaggaggaggatagaagccacgtttggcggagcctgtttgccggtggtcattctgctggggacacaggtgcatgaccttgctccccggatcccagggaggattggccgacctggtgccagcacaggacggcacgatgggtgggagcacccgggctttggacctagaagcacaggctcgccgctgaatccctcccagctgtgctggttttgaggccctcagttcgttagcgtgcactgtggagaccacctctccctctcctggtggctattggggtttgaaatagcccccaaaagcacagtgtgctggcgcattgcctgcctggcaggacaggccccacgcagcccccctcactgcctgcacaatgtaactgcaccgcgtcctgtgcacctggggcagagcctgcacggtgtaactgcgcagcgtcccgtgcacctggttgtcggcggttgaggcrgagccatgcgtgggtttgtgcccccagcacctgcacggtgacgcggcttgtgagtttggagcatggcttcaggttgttgtggtcaccagagtggttatgctgatgcccgtttcataagcgattctgtttgaagggaaggatcttgagattcrtgatatataagtaaagcagataccaagaagcctcagaaaaagctgaggcggtgtttggaggagacagcagaggcggcgtccctctgagggtctagggtagctattgggcaacctgacatcagtgcagccgcgggtgccccttrgtccctgcagcccgcagcacccactctttggagacttggcacctgtgccccagtgtggatcgggagctcctctctgaaggggcacctcgcgcacgggggtgccacacggggacctgagatgtaccaagtgcttgtgagcctttgccgcagccacaggtgtgcccagcaaacaggtgtgtgtcctgtggatgcagctgtctgcccacaggtgtgtcctgtggccaggggtgtgtccgttagatcttgtgctcctccaggccagggcaggtgcttcccacacagaatacgggttgtgagctcaagtccgctgcttgcgtgtcgagcctgagtagccccgggtgcttctgttttggggttgcagctgctcttctaccacagtggggttgacgtggccccacgagcagatttctgatgctgagagattattgaatttgaaatgtaaattcaaatattctcctagaacttccctgttctgggcttagagagattatgtgtattcttaatatttccgtagctgactaatctcttttgaagattatcgttttttgtcagggtgtggtggttcacgcctgtaattccagtgctttgggaggccgaggtgggaagatcgcttgagcccaagagtttgagatcagcctgggcaacaaagcaagactcctgtcactacaaaaaatgaaagagttagccaggcattggggtgtgcacctgtggtcctagctacttgggtggctgaggcaagaggattgcttgagcccaggagttggaggctgccgtgagccgagatcgtgccactgcaaaagattgttacttttttccttttagtggatagataacttttttttttttttttgagacggagtcttgctctgtcacccaggctggatggagtgcagtggctcgatctcagctcactgcaagctccgcctcccgggttcacgctattctcctgcctcagcctcctgagtagctgggactacaggcactcgccatcacgcccagcaaattttttgtatttttagtagagacggggtttcaccgtgttagccaggatggtctcgatctcctgacctcatgatccacccgcctcggcctcccaaagtgctgggattacaggcgtgagccaccgcgcctggcctgacagataacttttttcccaaatgaaaattttatttatttatttttttaactataaaatctctgagtatataactgattttaagctgccctgattggattgaaatacattattaaatgtatttcagaacttttgatttaagttgaacttatgtggagatgtgaaccgttgtgaggtagccgctgcttctataaaatcttacgtggaggtgtggaccgttgtgaggtagccgctgcttctataaaatctctggcattttttttgttgttgttttcatagttctccttaattcttacaggctctgttttcctgatgaataaagagacgttttattcacgtaggaaattaaatatgatcggtcagcttcctagcctggatacagggtgcctggagcttttgacggttcccatcacgtggcccggagccaggtgtcacttgtggaccccccagcttcgggattgaatggttgttttcctgggtttgaagtgtgttttggtcacttccccgatgcctagttaatctgggtgaagctgtgcctggtgggacacctgccctgccctcctggggctctgagatgctctccggtcaagaaccacygggcggcctcagcacatgaccccctccccacagcctgctccgaatgtcatctcttccttttcggcagctccttgttctgctcgcacccacacgcgtttgcctccagccctcaagcccggggccagtgtggggcgggatggggcctttgttctctgccgccgttgaggcagcacctggagtcaggcgggggcctggtcttggcatcttgggggcttgaggcccttcctgtaatggtcagcggtcaccgccgtcacagccctcgtgcccrgcgggcaggaagtgaaggggaggctgggcccggtcttctgcagcgcgtctcccggcaggcaacaccggctgtgggggcctgggaaccccacaccatccaaggaggggatggcccaggaccctgaaggcagagacaggcacaaaagcttctctctcctttctacctcatcttcccggcctgtgaaatgtgagacagaataattacttttctcaggacattttaggctgggcgtggtggctcacgcctgtaatcccagcactttgagaggccgaggcgggtggatcatctgaggtcaggagtttgaaaccagcctggccaaaatggtgaaaccccatctctcctaaaaatacaaaaatgtcagccaggcgtggtggcrggtgtctgtagtcccagctactcgggaggctgaggcaggagaatggcatgaacctgggagcggagcttgcagtgagcggagatcaaaccactgcactccagcctgggggacagagcgagactccgtctcaaaaaaaaaaaaagaagaaaatattctgtcatgactaagtgaaggtgtgtatgtcgtaaccagtcggagcccaggagtgtgtgatacaaaactgctgagcccccgaccccgtcccccatgagggctgcatgtgggggctccttgccggaaggacatgtaatactcccacgctcgcttagttttctcctattaaacacatttagcatttcaggtgagtcctacttgacttatcagctggagaatggggtttgtaacgggagagacccaaccactgtttctttcccaggcagggctgtggggtgaacgtgtccccttacgatttgtctgtggaagttctagccccctaggaccccagaatgtgaccttattggaaacagggtcactgtggatatgattaattaagatgaggccgtgggggtgggcccctactcccggacgactggtgtccttgtgaaagggtgacatttggacacagacgtgcacaccgggagaagccgtgttgagacagaggcagagctcgtgcgatgcctccacacagaacgccggctgggggaggggctggaacaggcaccagctcggccgacatcctgattctggacttgagaatacgtttctgttgtttgagcctcccaggcttgatagggcggccccagcagacgagaacaggcggaggactcacatccctgagtctaaggagagacaggagagactccgggacggggtgtacccaattcagaaatgattctgtgtgtcctgtgactctgtgaggcagggctgtcttctgatgagggggacccagagaccagtcgtgtctcagacgtccagggcgctggcagccgcagggcctgagctccctcctgccctgtcccagtgctgggcagggacccaggcctaagccaggaagcctccctcctccagaagacttcagctcgtttgagctcagagttttggaaattttcaggactaaggctatgaatgctttaattccttattctgtggttttttgtgtaagaagttttttttttttttttttttttttgagatggagtctcgccctgtcgcccaggctggagtgcrctggcrcgatctcggctcactgcaggctccgcctccygggttcacgccattctcctgcctcagcctcctgaatagctgggactacaggctcccgccaccatgcccagctgctttttttgtatttttagtagagacrgggtttcaccatgttggccaggatggtctcgatctyctgaccttgtgctccaccckcctcggcctcccagattgctgggattacaggcatgagccaccgcgcccagcctggaagttttattctttttccttaagaatgtttcttcaagcgtgagggatggccacagtgtakgtcatttaaccgagttctcagtttgggtaagagttgctcagccacggctgggtgttctcatcgttcctgggatatgccagttgccgtatgtgggattctgttcagaaccccattagcctcgagcacggaaacacgtggcagaygtcccaccctggacgcactggtgccctccggtgtttgctgccctgcttcaggcggagacacaggcctcccgctgcacacctgtggatgggctctcgcgtgggtcgtcctcccactggccgcactctgtgccccatggccctcctgcsccccgcccggcgtcctctcacggcctctgtctgtgctgagcttgggtaactcttgttcttacctccacagagtctgtagaagaggcgacaccagggcttccaaatgaacaaccgaaaggaagatatggaaatcrcgtcccactaccggcacctgctgcgggagctcaacgagcagaggcagcacggcgtcctgtgcgacgtctgcgtggtcgtggagggcaaggtcttcaaggcgcacaagaacgtcctgctgggcagcagccgctacttcaagacgctctactgccaggtgcagaagacgtcggagcaggccacggtcacgcacctggacatcgtcacggcccagggcttcaaggccatcatcgacttcatgtactcagcgcacctggcgctcaccagcaggaacgtcatcgaggtgatgtcagccgccagcttcctgcagatgacggacatcgtgcaagcctgccacgacttcatcaaggcggcgctggacatcagcatcaagtcggacgcctcagatgagcttgcggagttcgagatcggcgcctcgtccagcagcagcacggaagctctcatctcggccgtgatggcygggaggagcatctccccgtggctggcacggcgaacgagtcctgccaattcttccggagactcggccatcgccagctgtcacgacrgagggagcagctacgggaaagaggatcaggagcccaaggccgatggccctgatgatgtttcttcacagcctctatggcctggagacgtgggctacgggcctctgcgcatcaaggaagagcaggtttcaccgtctcagtacggagggagcgagctgccttctgccaaggacggtgcagtacagaactctttctcagagcagagtgctggtgatgcctggcagcccacgggccgaaggaagaatcggaaaaacaaagagaccgtccggcacatcacacagcaggtggaagatgacagccgggccagctccccggtgccgtccttcctgccgacgtcggggtggccgttcagcagccgagactcaagtaagcctttcactcgttacgggggctcagctgccccagtgtgtccaggcctcacggccgcgtgctgtgcggaggcagtgacgcatgtccaggctcacactggtggctttctagggtcacttcctcttacaggaggttgtcgtgaccgctgggaatgcagccaatgcatctcaaagggcagggcatcaccagggcccttggagaccctgtgtatctgtccccatcagcacggcactggtgtcacccacacacgggggctgcctgggctgggcccctctgaagccacagggacgtgagccggggggtgggtgacaccgggaggggacccctcagccctggtgagggcgtggcctgcagggtcggcttcccctggcctgtgggaccctcccatgagccctgactggggtaactcgactggccgcttgccagggtggccttcagctccaggcttttcatcctggacttctgcctttggtcactgttgctatagtgaatgttgaatggaaacaccatgtgaatgtactttgtccttggtggctcagcttgccttgacctggggacctgagaggttacagccaagaagcagcctttcccggcaagtggattttgtgtctgctgacacctgtgggttctgctgttgaagccaacaggcgatgtttgtttcctctcttttctctttttctttttttttttgagacagtctcagccaggtgtggtggctcacgcctgtaatcccagcactttgagaggctgaggtgggtggatcacctgaggtcgggagttcaagaccagcctgaccaacatggagaaccccgtctctactaaaaatacagaaaagtagcctgtaatcccagctacttgggaggctgaggcaggagaatcgcttgaacctgggaggcggaggttgtggtgagccgagatcgcgccattgcactccaacctgggcaacaagagcgaaactccatctcaaaaaaaaaaaaaaaagagacagtctcaccgtgttgcccaggctggagtgcagtgacgtgatctcggctcactgcaacctctgtctcccggattcaagtgattctcctgccacagcctccgattagctggggattacaggcacgtgccaccacgcccagataatttgtgtattttcagtagagacagggtttcaccatgttggccaggatggtctcgaactcctgacttcaggtgatccacccacctcagcctcccaaagtgctgggattccaggtgtgagccaccgcgcctggctgatgttttttcttacacctcatgatacagggtctccccttgggtcctgcctattactcactgcaaaggggctctgagcttagctctgttgaagctggacgtcaccacctgaatggttgtcccttatgtgtcttccatatttgtaaataataaattaaatgtttgctgaatactggccaccattcatggtgctgggcatgtgatattaataataattgtggggatttggcctctgctcttttccccaggctgtggcccaagtcaaggaaggatatttggagttgggtgtggtgttgcctgtgcctgtacttcagctacttgggaggctgaggcgggaggatggcttgagcccaagatgtccaggctgcagtgagccgtgattgcactgctgccctccagcctggacgacagagccagaccctgtctcttaattaaaggaaagaagaaatggaggtgtcctagcaggtgctgcccgtggggaggttcctccaggatgaagcctggaaatgaacgtgggagggcgtgagtggacagagsaggacgaaagacagcaagccgcagggtgggaggccctgaaaaatgtcgcagatgccgtgtgtgggtggcgcagtgggagacgctgcctgcccccctggctggagggcttcctgggcagggcgggtgtggcctcttctcctgaccctggtccctcctctccgtcgctgagagatctgcgagagccgggagtgaacacagctcgataatacgttaacttttatcattgtggtagaacatacataatgtaaaccttaccattttaaccattttcaaatgtacatttcactggcattaaagtcacgcgttgcttgatgacagggataggttccaagaaacgcatcgctaggcgattctgttgctctgggagcgtcatggagcgcccgtcacaaaactagaaagtgcagccggttataggcccagcacaaacctgccagtgttagttacggtgctgagcactgcaggcagctgtggcaccatgggaagtgtttgtgtgtctaaacatagaaagggtgctgtaaaaatagggtatacaagataacggcatgcctgggtagggcccctgccatgcacagagcttgctgcactgcaggttgccctgggtgagcgagtgctgagggaacatgaaggctgaggacagaactgtgcactgctgcagactttataaacacttggcgtggcctacactaaactgattttttaaagttgtgctaggatgtggcgatggctaggatggcgatggctaggatggcgatggctattcctgtcacgccaccaggtgacaggaatttcccggctgcgttctaatctacgggaccacagtggttatctgtggtccatccctgaccaaaatgcccttctgtggcgcatgaagttctgcgatcacaacttttccatcatcccaaagggaaactgtatccgtcatacagtaccttcctcttgcctctaccccacctgcgggtaaatgctgttctactttgacacaatgtagmttttattcattctcatctgttgttgctgtgcgtcctgcactgagctayggccaraccctggatgttcagtaaaagttggtgaccacgtgcagtcgctcaggcccaaaatcccttttggaggcaatttgggaggccgaggcakgaggatcccttgaggccaggagtttgggactatcctgggcaaagtagtgaaatcccatttctaatacaaaagttatccgaggccgggcggggtggctcacgcctgtaattccagcactttgggaggccaaggcgggcggatcacaaggtcaggagatcgagaccatcgtggccaacatggtgaaaccccgtctctactaaatatacaaaagttagctgggcgtggtggtgcgcgcctgtagtcccagctgctcaggaagctgaggcaggagaatctcttgaaccagggaggcggaggttgcggtgagctgagatcgcgccactgcactccagcctggagacagggttgagaccctgtctcaaaacaaaacaaaacaaatcaaaaaacctcaaaacaaacaaaaaacagcagttggtttaactcagcctcgggctgagttgtgctccatcgtgaggctgtcctgggtactgcaggatgttagcagcagctgtggcctccacccacagaygccaggagcacctgcctttggatcccccgttggtacaaccaaaaatgtctccagacattagcagttgggaaaatcgtttctctatgtgctgctgtgcgtgtggagagtgtacaggcagcaggtcagggccagtggcctttccatctgcttgtaactgtttataatcttccactagctccaactaaaatctgagaagcagtggtccctggcaagagacacggctttggggggtgtattctgatgtttacagatgcgctgcagggtccgttgtcagcacagcgaggcccctcccagtggtcccaggccacctccctgtgcgtgcacrtaactcgctggcaggtgcccgtgctggaggcctttgtattatgagagtcgatgcaggcactgagaaatagtgcactccttaagcctgtgggctgaatgctttaaatgcagttgtcgagcagaaggtgtttttagaatccaacaagtgattttggctgtgtacttttgttagagtcttaaatcccttgggtttccaaggcaactgtgaaactcttccattagattattcygagttgctaagatgaggacacaaggctgtgagctgtgtgaggatggaggatggttctgcccacgctgtggcggccagtgactccctgagctgcgtcctccgtctgagccctcaggctgggatttggaagcttggggtttggaagtagatcrtgatcccatggaggtcagtttgtttccattaaagatttattctatcttagagaagaggatttttaattttcatcccatttatagaagcaaaggcccttttttaaattttttttatttttgagacagagcgtcactgtcacccaggctggagtgcggtggtgtgatctcgactcactgcagcctccgcttcctgggttcaagtgattctcctgcctcagcctccgagtagctgggattacaggctcccgtgaccacgcccggctaatttctgtatttttagtagagacgsggtttcaccatattggccaggcttgtctcgaactcctgacctcaagcggtccgcccgcctcagcctcccaaagtgctgggattacaggcgtgagccagtgtgccgggccacaaagtcccttttccttctttctttttcttttcttttcttttttttttttttttttgagtctcgctctgttgccgggctggagtgcagtggtgcaatctcagctcaccgcaacctccacctcccaggttcacatcattctcctgcctcagcctcccgagtagctgggactacaggtgcccaccaccacgcccggctaatttttgtatttttagtagagacggggtttcaccatgttggccaggacggtctcgatctcttgacctcgtgatccgcctgcctcggcctcccaaagtgctgggatgacaggcgtgagccaccacgcccggccacaaagtctcttttctaaggacacatgtcaagtggtcaccgtggatcattcgacgccgatgccccaacccctctgtgcatcatcccggcccctggtgaccctgaggcctgtttgcttttaagagtgattttctaggcagggaggccaaattcattctaactgagcagcttccaagaaacagtatcccttgaaatttatttctgagttacagcagttcacttctatgagagcttgtgggaaatagcattaaaatgttcagattcatgtttgcagctatggggcaggcaggcaggcccgtgcctccccaggccctggcgtctccttctcatctgcggagggagcacagtaaggacctgagaggtgactggtgaggccttgacaaagtggatgtgtagctactgcatgagaagatggtaaagaaacagcccaggtgccccaactaaatggccccacacatgcctaagcggtgctgctacaggaggatctgtgtgttctgtgaagtgtgtacttgaaccctggtgaggtgggagcttgacatgttgggatttttaagcgtacatcagaactgcgggagctccagatgggggacaatggcctctcgggtgcctagcrctgcctgcaagcctcctgtctgctccgggaggggagtgagggtcccagctctcagggtagggtggtcttcgagctgcttcttggaccaggccggcctgcctccggcgggtctcagggtttctctcccttgtgctgacagcagctcctcaccgcccccagagctctttgctggggataaagcaggaactggtgagcggagggggccgtggctgtgtccccttctggtgttccctctttctctccacgaaggttggggaggaggacccccaccacggtctcagccgtcctgatcacacgagggcagggagttacctctgaggttacgtccctgcagggactcctgtcctgagtgtgcgtggcatctcggccctcctggtgcccgacggaatgtgaggttcccccacctggcctcctgaacaatgtttcgcctcctgaacacctttcacagcctgtttcagcagcacggcagatctgattgttctgttgaagaaaatttcctgcacttgggatggtctttttattttttgggtggaagggtttcaaccaaaagatgacatcatgtgctttggtcagtagtggggtgggaagggcgtccggctccgcaccccgatcccacagctgctcgggakatgcttggcttggcctcttttaatccactcccctgttcagtcctgtcctgggaagcttgagaactcagctgcgccttctctagatgtttttgctttcaggtatgaacagaattacctgcaatcagctttgatcacattacagtctgttggggagcagctggtgacggggacagagacaataacacccttcacaggaacgtgctgttttttgtttttgttttatttttaaaaaaattctgcactcggcactggacagagtattttttgtttttgtttttgttttgagacggagtctcgctcggtcgccaggctggagtgcaatggcgcgatctcggctcactgcaatctctgcctcccgggttcaagtgattctcctgcctcagcctcccgagtagctgggactacaggcacgtgccaccacgcccagctgatattttgtatttttagtagagacggggttttgccatgttggccaggctggtctcaatctcttgaacttgtgatccacccacctcggcctcccaaagtgctgggattacaggcatgaaccaccacgcccagctgtgttttttgttttttttaagacaaggtctcactctcttgcccaggctggagtgcagtggtacaatctcggctcacagcagcctcaacctcctgggctcaggtgatcctcccacctcagcctcctgagtagctgggactatgggcgtgcgccaccacgcctggctaatttttaaaaatgttttttatagagatgtagatctcactatgacgggagacgggatctcactatgttgcccaggccagtctcaaactcctgggcttagcgatcctcccgcctgggcctcccatggtgctgggatcacaggtgtgagccactgcctggccaactgaacttttaacgcagccactcggcagggtgtccttgcatctctggctttgctccttgtcctggtgtgggagggactcacggccgcagccagcagcaacactgctcctcacctgtgggtgtggggcgtgggtcgtggggcatggggcgtggctgcagcctgttctgtggttgtctggatgtgggcgtttgggtgtcaggctcagggctgtgaggctctcctgcaggtgtcttttgtggcttttgtgcttttggcaagcacctggctcctgatggctgctgtaataaatgaccagacttattgtcagagcaatgcacgttttgtctcacrgttctctgaagtctgaagcagccggcagggctgcatcccctggagctccaggggagtccatgtgcctcttctggcttctggaagccatagcatccttggctcgtggcccsacatcattcctgccccttcccatcctcgcttctgtcaccctcctgcctccttctctgctgacggggccctkgtgggtccgtttagggcccacgtggctcatccaggactcatcgtgagatcctgaaccgaatcaggtctgcggagtcgttctgccacaaggtggcaaaaccacggctcgggggttgcagcctgggcgtctctgcaggagtcattggctcaccactgggggtttgcatacagtagccggggattttggtgaaaatcgccacgcctcttttctttttttttttttttgagacggagtcttgctctttcacccaggcctgagtgcagtggcgccatctcggctcactgcaagctccgcctccccggttcatgccattctcctgcctcagcctcctgagtagctgrgactacaggcacccaccaccacgcctggctaattttttttgtatttttagtagagacgaggtttcaccgtgttagtcaggatggtctcgatctcctgaccttgtgatctgcccrcctcagcctcctaaagtgctgggattacaggcgtgagccaccgcgcccggcctctattttttttttgacagagtctcgctctgttgtccaggctggagtgcaatggcacgatcttggctcactacaacctctgcctcctaggttcaagcaattctcctgcctcagcctcccgagtacctgggattacaatcacccagcaccacccctggctgattttttgtatttttagtagagacggggtttggccgtgttggccaggctggtctcgaactcctgacctcaggtgatccgcctgcctcggcctyctacagtgctggcatgacagacgtgagacgccacacctggcttctctatggtctttgatttgcatttctttgatggcggatgatgccattcatatatcttttttggtaaagtgtctgtccaggtctttttgccgtgtttcgattgggctgtctacgtggtgaccgtgaggctctggccgagtgagtgtcgtggctcagctggcggtgatgagcatcgggcacctgctccacatctgggtctcttctttggggaagtgtctgttcagatcttctgcccatcttttattactgagtggtgagagttcctaggtgttctcgttccaagtccttcatcaagtatgtgctttgaaaatattttctcttggcctttggctccttttttctttctttttttttttttttttttttgaggcagagtcttgctctgccacccaggctggagtgcagtggcaccatcttggctcactgcaaactctgcctcctgggttcacgccattctcttgcctcagcctcctgaatagctgggattacaggcacccgccaccgcgcccagctaatttttgtattttttttttttttttagtagagatggggtttcaccatgttggtcaggctggtcttgaactcctgacctcatgatccacccgccttggcctcccaaaatgttgggattacaggcgtgagccactgtgcatggcctccttttttcatttaacagtgtctcttcaggaggatcctttttttttgagacggagtatcattctgtcgcccaggctggagtgcagtggtgcaatctcggcycactgcaagctctgcctcctgggttcacaccattctcctgcctcagcctcccgagtagctgggactacaggcgcccgccaccacgcccggctcattttttgtatttttagtagagacggggtttcaccatgttagccaggatggtcttgaactcctgacctcgtgatccgcccgcctcagcctccgagagtgctgggattacaggcatgagccaccgtgcccagccaacaaagactttctcctatggtttttcttgagtttttatcaatttaagtataacgcatagctccatgattcaagttggtttttttgtatgtggcgtgagatcagcttgaggttcactttttacataggattataaggttgttccagtgctgcttgctaagaaacctgtcttttatccattgagttaccttgctaactactatatacataaaattaatgagaatttcttttatctgtcttttttttttttgagatggagtttcactcttgttgcccaggctggagtgcaatggtgtgatctcggctcaccgcaacctctgtctccctggttcaagcgattttcctgcctcagcttgccgagtagctgagattacaagcacgcaccgccatgcctagctaatgttttgtattttagtagagacggggtttcaccgggctggccaggctagtctcaaactcctgacttcatgatccacccatctcggcctcccaaaatgctgggattacaggcatgagacactgtgcctggcggaaacccaaattttagcatttcacacaagggagagttctttcagcttatcctgatttcttttatgtgtttttcaccttgatttgttacaataatttagatttaaaatttggctttaaaattgggtgattttggccaggcatggtggctcatgcttgtaatcccagcactttgggagtctgaggtgggcagatcacctgaggttgggagtttgagaccagcctgaccaatgtggtgaaacccygtctctactaaaaatacaaaaattagcggccgggcgcggtggctcacaggcctgtaatcccagcactctcggaggctgaggggggcgaatcacgaggtcaagagatcgagaccatcttggctaacacggtgaaaccccgtctctactaaaaatacaaaaaattagccaggtgtggtggcaggcgccctgtagtcccagctactcaggaggctgaggcaggagaatggcgtgaacctgggaggcggagcttgcagtgagccaagatcatgccactgcactccagcctgggtgacagagcaagactccgtctcaaaaaaaaaaaaaaaaaaaattagctggcgtggtggcacgcacctgtaatcccagctactcaggaggctgaggcaggagaatcacttgaagccaggaggcggaggttgcggtgagctgagatcgtgccattgcactccagcctgggcaacaagagcgaaactccgtctcaaaataaataaataaataaataaataaaattaaataaaattgggtgatttttttgaagcctgttatgagctgaatgtgcacccccacactcatgtgttgaaaccccagcccccgtgtggctgcgtctggggagggccttgaaggaagtgataaagtgaagtcacaggcggggccctgatccctgaacacgctcgtgagcacacagcacccaccacccactctgctcccagactctgaggaggggcccccagggctcacctgccgccatctgcaggtcaggaggggcctcaccagacagcagatctgctggcaccttgaccttggacttcccagtctccagagcgtgaggaaactaattttcgttgttaagccgccctgcctgtggtattttgtcatggcatcccaagctaagacaaagccttaacataagtttggatataacctgtatatttagttcctagaaatgcacaattaatatgatgtgtcatcgagggatttgtaaaaaaatataaaaaggagtatagtttggaaaaagagtagagtttggaaacatatcccttagaggcctccagaagaagtcayaggtagctcgacggtccgaatgtcactgtccctggagactcccacccgctcctgccaggctggactcaccccgtgtgctgcctgacgggggccctgcccacctgccacgcccagctctcagctgctgggcctcacgtgtgcatgtttgttccaggggtgtttgcagacgtcacctctgcccctgctccaagtgccccctgccccatgcccctgtgtttctgtggttctgatcccgattcctgtcaacgaccacggtggaaaatccattctcttgctgtgggaaaatatctgcaaatcatcatcgctcagcatgttctgggggtgttttgatatcgtgcatacagccccactagagggagggtactccacaaagccctggctggcctgagctgacactcggaggaatccgttgaattcatgactcaagtcgtcaccttttgttgtttttgttgttgttgttaaatagaagctttactgagagatgattcacaccccactcacccatttaaagtctgcagttcagaggtttttggtatggtatattcacagcatcctgtagccatcagcacagtccccttagaacattttcctcggctcagagggaaaccctgcaccacttagccctcatccgagacccctccccagcccctttttgcagccacaaacctactttctgtcttgatttgcctgttctggatatttaatggaaatgaaatggcatgtggccttctgtgtctggctttgttcactcagcagttttcaaggctcctctgcgtggttctgtgtctggcttcgtccgctgagcatgttttcacggctcctctgtgtggtggcctgtgtctgttcttcatgccttttcatggccacataatattccattgtggggatggacctgttatgtttatccattcgtccatcgatggacttgttggctgttccaccttttggctgttatggataacgtgctacgcgcgtcctggacgaggttttctgtgagcttttgtgtcttcatttctcgtgggtatctgcatgcgtacatgtggaactgctgggccccgtggtgattcctgtacctgatgttgtgaggacctgccgacctgctccgcaggagggcaccatgttacactcttaccagcaaggttccagggttctgatttcttcccatccttgccaatattatctgatcttttttgttgttgtttttgagatagggtctcactctgtcacccagactggagtacartggctcgatcacagstcaccacagcctcaacytctcaggctcaagtgatcctcccgccgcagcctcctgagtagctaggaccacaggcasaacccaccacactcagctaattttgttttattttaactttttgtcctgctgtgttgcccaggctggtcttgaactcctgttctcaatagatcttccggtcttagcctcccaaaatgttgggactggaagcgtgagccacggtgcctggcctttttatatccagccatcccagtgggtgtgtgctggaaccgtggcgtgtgstggaaccgtggcgtgtgstggaaccgtggcgtgtgctggaaccgtggcgtgtggtggaaccgtggcgtgtgctggaaccgtggcgtgtggtggaaccgtggcgtgtggtggaaccgtggcgtgtgctggaaccgtattgtgtggtggaatcgtgttgtgttttgcgtttccttagtgatgggtgatgctgagcatctcttcctgtgcgtcttggccatttatacatcttctttggacaaatgtctagtaagattttttgcccatttttatattgagttacagtatttgcctttttattatcagatatataggttgcaattttttttttttttttgagacagagcgttgttctgtcgcccaggctagagtgcagtggtgtgatctcggctcattgcaacctccacctcctgggttcaagcgattctcctgccgcagcctactgagtagctgggattacaggcacgtgccaccacgcccggctaatttttgtatttttagtagagatggggtttcaccatgttggccaggctggccttgaactcctgacctcagatgatccgcccgcctcggcctcccagagtgctgggatcacaggcttgagccaccgcaccyggcgtcactttcttggtagtatcctttgaagcacagacatttaattttgatgagtccaatttattttgttgcttgtgcttggttttgtatctaagaacctattgccaaatctgagatcatgcggattttcttctaagaattttatagatttagctctaacgtcattgatccattttgagcctctcctcgtctttgcgagatggaaatactgccgccccaggagcctctgactctcaggccctcggccctggagcagagcagstaccaggtctgcagcgcctcgtccagggagggcaaccccgttgttctgagttgagccgtcctccaaagccttggctgagactccaccgcagccatgggacctgggtgggcaggaaaggccgggctgggccgaggctgctgcattgctggggcaggtgcccggctcccagggtgggctggacttgatgctgctctgtagctcaggcagaagctggtcgctgtccttctaaatgtgtcgcctgtcccacttggagagtctgggaacgacccgtgtcttctgacgtgtgtccctctgtccccagatgcggacctgtccgtcaccgaagccagcagctccgacagccgaggagagagggccgagctctatgcacaggtggaggagggtctcctgggaggagaagccagctatctgggccctcccctcaccccagagaaggacgaygccctgcatcaggccaccgcggtggccaacctgcgcgcggcgctcatgagtaagaacagcctgctgtcgctraaggccgacgtgctgggggatgacggctccctgctgttcgagtacctgcccagaggggcccactcgctgtcccgtaagtgcaggccctgggggccgcttggctttggtgtggttttgaaggctgagggttgcaggtcccgggycaagawgagatgaggctgagggtctgtccctgctgctcggccgcctgctgacctccctgttgcgggaggtgaggrtgcggcgtcacagcctggactggcctctcaggtgcacggggggctggctttagagtgaggagggaayggacgcggttgtgagcgcggcgggcaggggagcagccgagtgcttgctggaatgtttctcacaggagtcrttggctgaatgcgagctcgtccgggtcgcgcaggggccgggggtctttgtgctccagagacgggctcgggcgccccctgccggcccctctgtcgccttcgtgctgagrctcgtttcgcgcaagggagatgggggcggccgctgcgagccgattgcacttgggggcctcgccttgcgttgccttcgctggatgatgctggtggcgtgtgacttttaaagatgcgtcggaggttgtctttaaaacgtaaatgtccccagctgaatccaaacgacgacgcgcctgccgagatgtggccaaaagttcagccactgctgcgtgtcgggctcaccccagactgactgacttcctgacaagacgggggcattcagctttcggagtttaaaaaaacaaaggggccgggcgcggtggctcacgcctgcaatcccagcactttgggaggctgaggcgggcagaccacgaggtcaggagatcgagaccatcttggccaacacggtgaaaccccgtctctactaaaaatacaaaaaattagccgggcgtggtggcgggcgcctgtagtcccagctactcgggagactgaggcaggagaatggcgtgaacccggcaggcagagcttgcagtgagccgagatcgcgccactgcactccagccggggcgacagagggagactctgtctcaaaaaaaaaaacaaaaaaaaaaacaaaaaaaacccaccgcagccagcccccagccagctgccttctggtctcgcgctcatgtgggcccccgggcaaggcctggtgctggcacctagcacatagctggcactcagcatgcggctgagagtgagtgaggcgcctcccgtttctctccaggggaggagggagcgagtccggcatgagatgcccccacctccgcggctggggtccaggcgtgctgagtggtgtggacacattgtttgctgagtattgagggaagtgaaggaaggaaacgtgccagctgtccttgatgctgggatttgggaagtatatctgtttctctgtttctttacgctgctctaaaaaacaatatttttacaactttgttttcataagcactaaaatattctttcgaattttcgcgttggtgtgagcactgatgccaactgtttgtgggtaataaagactacatgtggaaagtggtgttcaccttccctttattccgtgtactcagtgaggagccgtgtccgtcgaagggtcttggccctgaaagtgaggctcagggctgagcactgcacagacgggacaagctgtgggtgctgggctgtcacagacatcctgaggcctcacttcccacatctgaaaaactgggggggggggggggyggggggtgccacttacacagctgttgtgaattcaaacaaaatagcgtttctaaaatatcaaacacggtgcaggcagagtgtttgtgatttatgctccaagatgttggccccgtcccctctcaaatgcaaaagtgtacttgtcagcagaaatggttggatttgagcaaaccccggggtactggggcctttccaggaggcggtggcagggcatgtgggcatcctgcagtcggccagccggtcagatggagcgctgggcacgtttcgtgggcgtcaggagggacaggctgggtgcggccagcggcgcatgcccgtgggtgcggtcggagggggatcccgggcctccctcactaccctcccctccgaccgccttttcacatgagcagcttgggtgcggccggtggcacatgcccgtgggtgccgtcggagggggatcccaggcctccctcactaccctcccctccgagcgccttttcayatgaggggcttgggtgctgtttcctgtggatctctcagaccgtcgtatacactcattcagggcagggaccccaacacacccagttcctttgcagcaccccaggtacagctggtgtgtcttggtcattaagaacgactttgggagcctgggcaacgtggggaaaccccatccctacaagaagttagcccagcatgatggtgccttgtgcccgtagtcccagctactcaggcggctgaggtgggaggatcgcttgagcccaggaggttgaggctgcagtgagccatgattgcatcattgccctccagcctgggtgacagagtgagacgctgtctcaaaaaaaaaaaaaaaagccattggactgaggggaaacaatttgtttgtgctttttctactgtttctgcgtctgacagccctccctgggtgtggctccgtccatgaagcctttgctggtttgtgtgtgcagcagatggggtcggagggcacggcttggcagaagatgtcgatttcacccgtggcatacgagctgtgggccctgtggtgccaggtctgaccttggggaacacayaccccagctcggccttggtggccctggcagtttctccccttcctcggggcttttctgttctgggcccctcctttccggaagcgagccccggagcacgtggagggagtggccgcggagcctgaggctgggaccttgagtggttctggctttttcccagggcctctccctgcagtgagagtgctgtgtcctctgcatcctgagtgtgtcctaaatcctgaaggtggggtgagggcacaccccgcacttctgggtgtgtgtgtgtgtgtgtgtgtgtgtgtttttgagacagggtctcgctctcttgcccaggctggagtgcattggcactatctcagctcgctgcagcctctgcctcccgggctccagcaattctcctgcctcagcctcccaagtagctgggactacagatgggtgcccccacaccccactaatttttatatttttagtagagacagggtttcaccatgttggccaggctggtctcgaactcctgagctcaggcgatctgcctgcctcagcctcccaaagtgccgggtttataggcgtgagccatcccgcctggccccatctcactcagtttttagttcatctgtgactaattccaggtgaagttggctggtgggtcttttgttatttctcttaagttctagcctcatttttaatattctaaattttctatttctcttgtaagaatttgcccttttgggccaggcatgatggttcacacctgtaatctcagcactttgggaggccaaggcaggtggatcacctgaggtcagtagttcaagaccagcctggccaacatggcgaaaccctgtctctactaaaaatacaaaaaattacccgggtgtggtggcgggcacctgtaatctcagctacttgggagactgaggcaggagaatcgcttgaacctggaaggaggaggttgccgtgagccgagatcatgccattccaacctgggcaacaagaccgaaactcgtcagaaaaaaaaaaaaaaaagaatttgcccttttgttttctgtaaacacggtttagaagttgtcagcatccttcgcctgtcgggctgtgaactggatgccccagacgcctgcccagcagagtggctgtagaactcggcgggggacaggttattttaaaacgtaattttctggcatcctgtgtggcccctgcctgtttccggcatgcactgaggtaaataatggaaatactcagaaaaaacttggattttccaaagttctgtggtcctccctcactgccgtaggccttctgtccccgacaggtggtcccgtggaatccgcgcgggagtaaaccgtggacaccagcgcctgcgtccagggaagccttagccgaggcgcctcggtgtgatctgaaggtggggtccgggggcctggcctctcrgggggcygccgcggyggaggagcgcctcagagttcacggcgtagccccactcgccggtacccaggtggacgctgatcgggggagagaactgagccycggggtctgacgccgtctgctgatctgaagcgttgaactcacggacttctaagtctctcaacaccgtgcgggagcgccaggcccggcgggaccgcgtggcccccctctctccctcccctccttctggagggtcatggacgcagagccgtgtcctcccattgctgaatgtgggggtgactgtgggggccggagagtgggggcagctcattgcagcttgtggcgtagcccccccgccatcttgcagctctggaaatgcgcccctgagccccgggggccgccggctcctctctcctccgctccctgtcggaagagagaagaagacaagagcggcctcggctgggcgagggtccccggtacccagccctcagagcgggaggaacgcagcttcaactcaggccagctctgaagagggcctgggagggcgagtagcccctgctgtggttcgagcggcgtggctgctgtgccgggcgtggccggtgctgacttgcgacctcctgctgacgtggcccctgctgtggttcgagcggcgtggctgctgtgccgggcgtggccggtgctgacttgcgaccatctccatgtgctggttgcaggcgatgagcatttccagggctgggcctcttgttagcgtggtctctagggtgtcctgtcgagtgtacctccccgtgggctggcgcatcgtgcaggaaatggggacacggcggtcctcactgtgtgtccactgcccctttgcggtacggggtgccgggtggggatcccaccgcctgcccagttctcctcgtcatgaatgcgccgtggttcaacaaacagcgtccggccgtggcaattctgcacaaaaatgggatggtggtcgcagatttctgaatttagagaaccattaaatatgcaggcagcaggccagcagcacagagcagccgacactcagagggcctttggggatgggttctggaacattctagaaaaattgaactagtttccttggatttgtaggaccagtaaccttggcttggctgttaaattaaacagatggcagtttcattactagaccatcaatctctgacatccctgtcagaggacttgccatacttctcattcaattctgttgaacttcgtgcttacttttattcctttttcagcagtaggcggkcctcytctctgttactagacattgttctcccagtagaaaccatgaaaactgtcatttaggctcagaacatggctgcccacaagttgtgctgggctggcgctgatctcctggggccttgaggtgtgtgctgccttcgtgtctccaaacagcacgaggaagccaacttcacactgacaagccgaggatgcgccgccggccggtcggccggggacaggagactgtaagccccgcatcagccgtgcccggaaatgtgggacgcggcctctggagcgttgctggtgtaacccccctcactcttttaaagagtcaaggattctagggacagccatggcggtgcggtgccgcctcccgtgaagctcaccccagctccctgcagtcctttcctgcggggacggcttctgaccagctcgttactggagaaggtggccgtggagatggcggagcggctgggcccgggcgtcaggaggcgttttgcagagaacagttgcagcttgtctttgttttggttgtggtttaaagactgtttccctgtggtatttaaaggatgaatcgagaactttaacttgattctgratcgagactggaattgtgaacagttgctractaaagggcatttggtggacatggtgctgcactttcaggtggtccaggccagcgtgccttggcgttctcatcaggagagcatttctgcagtccagaggtgttcacgctccgacttcctccaccaaaaccctctgttggaatcacttggctcctaggaaagagacacaccgcagagaagtcatgggtggagacctcgggcatttggggttggccagctgatcaaagcgttcaaacacctgcctccagcgagacccttggggcatcaccgggctcacaccgcatgccgggaagatcgtcagtgcttctggaactctctagaacccagcagctggtgcgcgttcctgtgggtgagactcctcctttcctgtgttcccagggcctgggtcccttgtgagggtcgctgatggcagaacagaagcccctccaccctccacccycagagccacaggatgagctctggggaaccgccagacccagcccagggagccggcacagcctcccccagctcaggtaagacaccagggtggccagctttgtctggggcaactgggccaaacacttggggcatggtgtccctgacacccatgtgtgcgtggccacggcccagatgagcccgggcacctccgaggaggcactttggtggcacctgctctccatgtgccctcctctcccaccctcaactcagccaggtacagagaaaacccattttaggtcagccgagttattcgcttttgcaatagtaattgttccactcccacagcaacaggttgtatgaagttgaattggtttttatattttgagcaatttttttcccttaatgtaaagacattcaattcatgttgcagtgggttggaaacatcagttcctagagctcagtggtggtggccggtcccttccaggcctggtcactgcacatttctggccaacccccgactcggaggccactgccccagtccgagcctcacagagccctggtggaagccgttccactgccccagcccgagccgcgcagagccctggtggaaggcattctccttcctgtgcctgaagtcgcggagtcttttctataaagaaagggccatggggtgtgtrcctccctggagaaaaaaaaattctttaacaagagctcaaccactttttttttttttcttttgagacagagtctggctttgtcacccaggctggagtgcagtggtgcgatcttagctcactgcaacctccaccttcggggttcaagagattctcctgcctcagcctcccaagtagctgggattacaggttagggtatcccgttgggcacaccaccacgcctggctaatttttgtgtttttagtagagatgaggtttcaccatgttggccaggctggtcttgaactcctgacctcaggtgatccgcctgcctcggcctcccaaagtgctgggatcacaggcatgagcctccttggtctcccaaagtgctaggatgagcctcrgtgcccagccttaaccacacattttggattttgaaattaattgctattcccacacgagtcgtttctcatttctcacaggatagttttggtggcaggtgttaatgttttgttaatgcatatatttttgagtgtctctttattgagaattaattacagtcttcctttccagatggctgttgacaggctgtcttagtagtgattggacaacatcccaggtgagtgagggcagcagagtgtccacactagaagtcttgctgcttttatcccatcctgacggtctgtaacttgtctgtctctggttccagatcgacacctctcatggcgtggagagctgggcggagcagtcctcttccagagttggctcccgctggcatgagggtgggtttctgcagggcctgtggcctgtccaggatgcctgaggagtcttcttccagcccaggcctggatggacttgcccagccctggatggacttgcccagccctgggggcagccagtgccaggacggcttggcctcgcctggagctccttgggcgctgacagctttaccctgaggccagctaaggagctctgtgaagcaagtgacagcagcgaaggcacctcccctgctggaagtggtttgggacagaactgcgggtgcctctggtctgtgcgctggagccggcgtttgctttgacctcagtgctgcggccagagctttggcgtccrggtcccgggctccagctgggtgcagctgcccaggcgagagagctctcaagtgtgtgggagcaggaggggaactgggtgaccgaacagccgcgtcggagggggatatctgyggagagctgtgactgggagccggtgtgtgcctttctgtggtcatttctcgagtcctctgccggctgctgccaggtgaaggcatctccatgcccagccggtgggcagctggggcgggtggacctccagcttctgcccgacggggttcagatgaccgagatcctacgggattgccaatgtgtggggacggggggctttcaggggcgggaaaacatgtccccatccgtgggaagtggagccacgtggctccgacccagcaactttctagggagatcgaaagacaaagcctgccacggcgtccttggcggtgtgtgcctggcatgtgcgcggcgctccacgtgtcggcgtggaattacgggaatgtgctgcttttcagaaagagcgccccgcggtgcccttgcccgtcctcgtcggacgtgttaggttcaatgtcagctttctattcagagcaggtggttgtggacttggtgggctccagggacccagagcagcaggtgggctcaggagggggataggcatcccccattccagattctggaatacccagaagcaccatctggcagggaaggtggcgtgtcgggggagcccgctcccaggccagagacgcgtcccaccatctgcccaacagcccatcccctttccggacggtccccatctccactgcagctggaaccatctgctggagcctcccctggttcctcaaatctttatgttcctttatgttcctgagatgagtttctgaagatggagaaaagtgggatttctagtgaggtttggggcattttaccaaaggtgaccgcgctctgctggcrtctgtgagggtcgggagagcagtccacacaggccgtgccttctgagctgccagacgcctctttatgcaaatgcctgttggagttttaatatcagttgtagagaaaatgaagctttttttttttttttggtcaaaatgggatctcttggccaggtgcagtggctcatgcctgtgatcccagcactttgggaggccaaggtgggcggatcacctgaggtcgggagttttagaccagcctggccaacatggcgaaatcgtatctctactaaaaatagaaaaattagctgggcgtggtggcgggcgcctgtaatcccagctatttgagaggctgaggcaggagaatcacttgaacccgggaggcggaagttgcagtgagcagagatcatgccattgcactccagcctgggcaacgagagcgaaactccctctcaaaaaaaaaaaaaaaaaaaaaaaaaaaggatctctcagctgttgggcctgagatgatatgtctcaacctgggcaccatgacagaagaaacttgtggcatctgactgtgagattagtccacgcctgggctctgcgttcatgggcagggcacaccctagtgctgttgaagcaggtacatcagaggccgcatgacagctttgccttttgctctccagggtgggcagcaggtgggcccagcggggagagagttgtcttgggggttgataaggaggcctggttgtagagattctctccgtaccattttgctgaaagagtttggttaactttttgaaaacaatttaaaaattgtagacatgtgccatagaacctaaaaaaatatgctcgtggcagatagtaaaatgataagggctctaagaacatttttagaatagatagcagtatgactttatccctacttctaacattctttcccctgaaactacacagacattcattcagcatatgaagtgggtgcaatggctcatgcctgtaatcccagtactttgggaggttgtggcgggaggattgcttaagcctgagagttcaagaccagcctgggcaacatagggagaccttgtctctacagaaaaagtttaaaattagctgagcgtggtgctgtgcaygtgtggtcccaggtactcggcaggccgaggagggaggatcgcttgggcacagcaggtcgaggctgcagtgagccatgattacaccactgcactccagctgggccacagagtgagaccctgtatcaaaaaagaaaagaaacgcccacacataacctacccgggaagggggccagtgcaggtgggacaacgctgtgatccttgagagaagagagaacacagatgagctgcccttcaccccagtggtgttgctggcatatttcccaaaccctggagcaggaagtggaccctgagcggacggcagtgtacagatagagattgtccttcggggcagccagaggagccgggacttgaggggcaaaatcccaagaagcaagaaacaaagaggaggaccccagcttctgcatacaactgccccccaccccaagcctctaagccccacacacacacacacgcacacacacacacaaccacacatacacatgcacacayrcacaygcacacatgcacatacaaacatacacacacacgcacgcacacacacacaagaatcacttgaacctgggaggtggaggttgcagtgagccgagaccgcgccattgcactccagcctgggtgagagagcaagactccgtctcaaaagaaaaacaaaaaaaaatcttaaaagcagccagagggccaggtgcagtggctcacacctgtaatcccagcactatgggaggccgaggtgggcagatcacctgaggtcaggagttcgagaccagcctcaacatggagaaaccccatctctactaaaaatacaaaattagccgggtgtggtggcacacacctgtaatcccagctactcgggaggctgaggcaggagaactgtttgaacctgggaggtggaggatgcggtgagctgagatcgagccattgcactccagcatgggcaacaagagcgaaactccgtctcaaaaaaaaaaaaaacagagaaaaaatgcttaacattcagaagaacaacagtgatggctgactttcccagaaactacagaagctagaagacaatgaatgacgtctttgaagtactggaaagcaaaagatgccaacctggaactctatacccaacaaaaatattcatcacaattttttttttttttgagacagggcctcgctcagtcacctaggctggagtgcaatggtgcgatctctgctcactgcaacctctgcctcccgagttcaagtgattctcctgcctcagcctccccagtagctgggattacaggcgtgagccaccatgcccagctgattttttgtatttttagtagagacggtttcaccatgttggccaggctggtctggaacccctggcctcaagtgatccacccatcttggcctcacaaagtgctgggatcacaggcatgagccaccgtgcttggcctataaatttttttttttaattagctgggtgtaatggctcatgcctgtagttccagccacttgggaggctgaggtgggaggatcgcttgagcccaggaggtcgaggctggtgtgagttgtggctgcactgctgcactccagcctggatgacagagcaaggccgtctcttatttaaaaaaaaaagaaaaagaaaaaagaaagcaccagataaggcaactgtgtgagtaatagaaaataatcttgattgtttaaagcaacaattataatttgggggatttttaaacctaaatagaagcaaaacatatgacactattagcatgtggggtggatgagagttaactgtcgtgtggttctgactctttatagtcacaggaatgatgactgaaaataggaaaagtggtgtgattcaaaggctcaatgaggagaagaaatggaataattcttgatacagtttggatctctgtccccacccaaatctcatgttgaactgtgatccgcaatactggacgtggtgcctggtgggaccttccatggatgatttagctccctccccttagtgctgtcctcatgatagtgaggtctcacaagatccggtcgattaaaagcgtgtggcacctcccccatgaccctccgtcttgctcctgctcctgtcctgtgaaacgctcgctccctcttcgacttctgccatgattggaagctccctaaggtctccccagaagctgatgccaccatgcttcctgtagagcctgcagaaccgtgagccaatcaaayctcttttctcataaattatccagttgcaggtatytctttatagcagtgcaagaatggcccgatacaatacgtgattaatttgaaagaaggcaagaaaggaggaataagaacaaaaagcataaaggacaaataaaaaacaagatgatagccttacaccagccacatcaataattacattattaaaaatgaacaaaacacatagcctgtttttaaaaactatttattggctgggtacagtggctcacacctgtaatcccagcaatttgggaggctaaggtgggaggatcacttggggccaagagtttgagacctgcctgggcaacttagcaagaccccatctctaaaagaaytaaataattagctgggtttggtggtgctcaccagtgattcaagctacttgggaggctgaggcaggagatgacttgagcccaaaagtttgaggttaccatgtgctatgattgtgccactgtactccagcgtgggtaacggagcaacaccctatctctacaaaagaaaaaaagaaaagaaaaagatgaatcaascaaacactaaccaaaaagaaagtcagtatagcaatcttaatatcaaagtaaactttgagaagtattactcaagagggactggcataatgataattagtcaattcagtagtaaatataacaatcctaatgcatattgctcctaacagctcagttgkttttttktttrtttgtttgtttgtttgtttgttttttgagagaagtctcactgttgcccaggctggagtgcagtggcgcgatctcggctcactgcaacctctgtctcccaggttcaagcaattatcctgcctcagcctcccaagtagctggcagtacaggcgcgtgccaccaccctggctcattttttgtgtatttttagtagagacaggatttcaccatgttggccaagatggtctcgatctcctgacctcgtgatccacccacctcggcctcccaaagtgctgggattacaggtgtgagctactgtgcccggcaacagctcagttttaaaatacatgaggtaaaagctggcagaactaaaaaaagagataacttcacaattacaattgggggttttaaaacacttatctcagtaattgatagaacagcaaacaaaatctcagtaaggatagagaatatttgaacacagttttcaaatgttaaattcaccttgaattcctggaaataaacacatctggtcacaagctgctattctttttctgtattattggattcagttwgctaatgtttggtttgagtcttgcatctgtgttcatagagatactggctgtaacagcacaattagcccagtttgaacgttacaccaaaagtgcaggatattccaaatggacaggaaacatttaccaaaatagaccaaccagggccataattcaggttcaacaaatatcaaaggattgaaatcagagagtatattctctgaccttagcaaactggaattagaaatcagtaacaagaagacactagaatatccccaaatgcttgcaaatcaaatagtatacgtttacacaaccctcaagtcaaagaataaatccctatggaaatgataaacttttttttttttttttgaggcagagtctcgctctgtcacccagrctggagtgcagtggtgygatgtctgctcactgcaacctctgcctccggggttcaagtgattctcctgctgcagcctcccgagtagctgggattacaggcaccggccaccacgcctggataatttttgtatttttagtagagacagagttccactatattggccaggctggtctcgaactcctgaccttgtgatccacctgcctcggactcccaaactgctgggattacaggtgtgagccaccgtgcctggccaaaatatttttaactgaatgataatgaaaaaatgctgtatcaaaacttttaggcccacatctaaagcaatatttaagggaaacttacagctctagttatatattaggacagaagaaaggttctaaatttctttgtcaagaagaaaaagcatagcaaattaagcccaaagaaagtaacagaagggaaataaagaatagatatcagggtgagtgtggtggctcatgcctgtaatcccagcactttgggaggctgaagtgcgtcaatcacttgaggtcaggagttcgagaccagtctggtcaacatggtgaaaccctgtctctactaaaaatacaaaaattagccgggtatggtggtgggtgcctgtaatcccagctactcgggaggctgaggcaggagaattgcttgaacctgggaggcggaggttgcagcgagccgagatcatggcaccacacaccagcttggatgtcagaacgagactccatctgaaaaaaaaaaaaaaaaagagctatcaatgaagtagaaagcaggcatacaaaaatcaacagtgtagctggcatggtggtgcacacctgtaatcccagcacttcgggaggttaagtcagaaggctcgcttgaggccaaggagtttaaggttacagtgagctatgattgcactgctgcattccagcctgggcaaaccccaaaaccgaaagtgaacaatgcccaaagccagtgtgttgaaaagataataaaactgatataactcggcctggcgcggtggctcacgcctgtaatcccagcactttgagaggccgaggcaggcggatcacgaggtcaggagatccgagaccatcctggctaacacggtgaaaccctgtctctactaaaaatagaaaaaattagccaggtgtggtgacaggcgcctgtaatccyagctactcgggaggctgaggcaggagaacccaggaggcggagcttgcagtgaatcgagattgtgccactgcactccagcctgggcaacagagtgagactcygtctcaaaaaaaaaaaacaaaaacactgatataactcctgtgaaaagtgatcaacggatattggatagataagattattatacacaactttatgcgaatatatttgacacattggaggaaatgggaaaattcctggaaaacagaatttatcaaaactggagcaaacaggaagagctcaatggttttatgatctgctgagaaaattgaattaataactttaaagccttcycacagagaaagcttcagggcgagtgcctttactagtgaattctttccaattttaacggaagaaaatgacgccaacgttagacatatcttccaaatactagaagaaaggaacagtctccagcctatctaagctggcatggtcttgatcccagagcctgacgtggcatttcaagaaaggaaattatcactcagcagagatgtgcaactattaaagtaaataccagcaaattgaatccagtgagacagaggaagaaccgtgttgcatggtccgcaggctcattccaagaactcaaggttaagtgagtgtttggaatcaatgtgtagaatttaccacattagccgaataaaggagagaacccgctatatcacctcaataaatgcaggaaacacttttgataaaattcagtagccttcgtgataagaatcggcaaattggagtataaagaaatgttctaaatctgacaaaaagtatctacaaaaaaaaaagttaaccttttggttaattgtgaaatcatgatgacttagcctctgagcacgggaacgatacacagacgcccatcgtcaccacttatattcagagttggctggagatcctgcccaggttgtgtgtgcagggctgcccctgagagctcttgccttcctaatgtttgtgtcatgtcaggaacctcccttgcccccctcctccctgagtcctaccccttgtcccaagctgtgcaatacagtgataaatgaaaggggccaggcactgtggctcatgcctgtgatctcagcactttgggaggctgaggtgggtgggtcacttgagctcaggagctcaagaccagcctgggcaacatggcaagaccctgtctttactaaagaaaaaaaagaaaaagaaatgaatggaagggaataagtaaaagcatcatttgtaggtgacatgactatgcatatagaacattcaaaagaatctagaaacttagatttttaacaggataattaaatatactggatatacagccaatgtacgaaactcaatatacaaaagtcaattgtatttctataaataacagagtttcattttataggacatcaaatgcctaggaataaattaaacaaaaaatatgcaaagacctctacacagaaaactataaaatattgctgggagaaattaaagaagataatgataaatgaagggagatactatgttcatggaggagaagactcactattgttaagatgtgaatctccgctgggcaccatggctcacgcctgtcatcccagcactttgggaggccgaggcggccggatcacgaggtcaggagatttgagaccatcctggctaacacagtgaaaccccgtctctattaaaaattcaaaaaaattagccgggcgtggtggcgggcgcctgtagtcccagctactcgggaggctgaggcaggagaatggcgtgaacccgggaggcggagcttgcaatgagctgagatcgcaccactgcactccagcctgggcgacagcaagactctgtctcaaaaaaaaaaaaaaaagatgtgactctccttaagttgatatattgggtcagcacaattctggttaagatcccagcagaggggtgtgtgagtgcccgtgcgcgtgcgtgtgtgagtaaactgactgctaaatatatttggagatgcaaaggatctaggatagggatctaagggcacctggggatttgtgttaatctggtgtcgtaggacacagacacagaaataactcataaagggaagaagtttgttacactcaccaatttccagaatagcakgcccaccagcccaggcagagacacatggggaagcaccagggtcagtcaggaggcagagggagagggggaaatgcaggccggagccttgtttggtttctgtggggaggaacgggcaaggcagggtaagctggtttgggattgtgtgatttgaataatttcagcaggctctgggcataggagctgtgtctagttgtatggcccaggggtgattaggggaggggatactggctgtagtgtgagaacctatggagcaggaggagggagtgtgagctctggacggggcgggtggggggagtgtgagctctggacggggcgggtggagggagtgtgagctctggatggggcgggtggagggagtgtgagccctggatgggcaggtggagggagtgtgagctctggatgggcgggtggagggagtgtgagctctggatgggcgggtggagggagtgtgagccctggatgggcaggtggagggagtgtgagctttggatgggcgggtggagggagtgtgagctctggacggggcgggtggagggagtgtgagctctggacggggcgggtggagggagtgtgagctctggatgggcgggtggagggagtgtgagccctggatgggcaggtggagggagtgtgagccctggacggggcgggtggagggagtgtgagctctggatgggttggttcacctgtgaaaggtgcactcaaaggtgattccgactgctatctctaggaactgggaggggaagttcctgcagggtcatggagaccccagatgtcagggcatcagaaacctggaaataaaagccagggttcctacacatggctaaggtgatcttggaaaggaaggagaaagctggaggactgacagatgcagacatcaaggcttctagtgctgccgtcgtggagacgctgtggtggtgatgcagggtagacgcgccgccagggcccgtgaggcaccagaaagcccactctgcaactcaatgtgggacagatggtcttttcaagatatggtgctgagtgactggacattgacatggaggaaaaaagtgaatcgtggccaggcgcgatggctcacacctgtaatcccagcactttgggaggccgaggcgggtggatcacctgaggtcaggagttcgagaccagcctggccaacatggcgaaaccgcgtctctactaaaaatacaaaaatcagcctggtgtagcaatgagtgcctgtaatcccagctactcgagaggctgaggcaggagaatcacttgaacccagaggcggaggttgcagtgagttgagatcgcaccactgcactccagcctgggtgacagagcaagattctgttcccctccccaaaaatagggaatcttgacccctagttctgaccaagcacaaaaattactttgagaggaatcataaatctttggaaaattggcaatatctgcggaagccaagcaggtgaacaccctgtggtccagaagccccccttccccgccagggcatgcccaacagaaataatgagaacttaagtcaccaaaagacacatgtaagagccatcagatctccattgttcaataggcccaaactggtatctacaggatggacatgtggcttagtggtgtcatggagtaccacgcaccacaaacaaccacatcctcctccaggcagcagtgcgggccacatctagtgaagaaagcccaacacgagggtaggatcccacgtatacgaagccctagggcaataaaacgtgtggtgattgagggcagagggtgctctctgggggttacaactaggggagggccagaggcttgttcgagggtgctgggaacacgcagtgcctgtttggcgatgtgtggtgtatgtagataaagttcattgagctgtatacgtatttgcactttacataaggcttaaaacgtttttgaaaataatctggacagatcacaatttcatcacattctaacacagagttaagtgacagcctaatacatttgtaaacaaaaaaacaaagaacagttgatgtttggatccctttcggagatgctctcaaagtgcagtcttttgaaaattatatccagaccaattcaatatccagatggttttgtgatgaagactcaggaagcagcaaacttgaaccctccgaagatgccttgtcccctgtctgcccgtctgaagccaactgccagtccatttgcttcacggctggtttcttgcagtctttgacactatcatgaaaaggttctggaatgttccctggtacagtggctatttaggacaggtccgattctcctgsagcggaaagcgcactgggaggggacagaggaagggccaagggcaggtggccatgcagccgacttggcttggtgcagggaggccagagacctctgctcttccctgagcttaggggaggcctccagtccggcacgaatgactgcagtgttttcacaggggcaattctgtacagtcgcagccggatgtcgctgaatgtcctattttagggggtccacgccagctctgatagcatcgcttctcagttactcttttggaagttggccttttccttgcgagaacacctgattcctggcaaagggttccrtttttaggacaggtcgtgagagtgcccgtttccgtgtaatgatctttatgcttttttatttaattcctgttaccaaatggactttaaaggcttcccagtgtttatgagaatgaagctacgtgatgtaagttttttctaagatatatagactrtaaatcacaaataaatcatggaaggtgttgtttccagtaagaaattattttagtaatgacagccagtgaaattccctcaatgatcacagtactgtcagtcaaatgtcgtgggttgagcagtgaacactccgtcctgatcctcagagcttgtggatgtgactctttggaaaaaggtcttgcagatgtgataaaggatctcaaaatgakgtcctcctgcattgtccagatgggtcctaagtccaatcacaagtgtccttctaagagaagaggaagagacacagacagagaaaaggccacacagatggtggcagagactggagcgatgcrgtcacaagccaaggggcagctggagctactaggagctgaagaggccggagggaccctccccggagctactggagagagccagcccgtgctgatgccttgatctctgacctttggcctccagaactgcaagagagtggaccgggctgttctgagcctcacgctttgtggtgctgtgttatggtagtgaccggaaaacagagcattaagaagaagccgaagtgcatcgcaggcagcttcagcacatgcaggtggtgaggggaccgtccgcagctgcggctctgccctgggtccgtggcgtttattctcacggggttattaacgctgagtcctgctcatgtccattctaagttgtttttctaggtaaaaaaatacagggtttctatacagagataaatatttaacatgtaggtctgaattaaataaaaatggctaaaatatataattcaaaattttaattttcatgtttatataggaagagtagaaaccatgaatgaatatattctcaaaagagttttggccaggcgcggtggctcacgcctgtaatcccataactttgagaggccgaggcgggcggatcacgaggtcaggagatcgagaccatcctggctaacacggtgaaaccccgtctctactaaaaatacaaaaaattagctgggtgtggtggcgggcgcctgtagtcccagctactcgggaggctgaggcaggagaatgatgtgaacccgggaggcagagcttgcagtgagctgagatcgagccactgcactccagcctgggtgacagagtgagactccgtctaaaaaaaaaaaaagttgttttgggccaggcacagtggctmacacctataatccccatcacttttggaggccaaggcgggaggatcgcttgagcccaggagttcaagaccagcctgggcaacatggygagacctcatcttgtttaaaaaaagagaaaaaaaatgctgttttaaataaactaatagaaaaactcatttccttgctctccttttctagcctagaatgtgtggagcgtttgctctgttgggtgtgataatgcgagaaccaggcgctgtcagggtgagaagggtggcctgggggacggtggcggtaaggagaagtctcttgttactgactcacggaggagagccaggggcacagtgtggctgacagaggacaggccaggaagagcttgggatttcctcgtcaggagccrctcgggggatgtgcggyggggacatgcgtccgaacacagccagctggtcagaggtgctgccgtgccaggcggggcctccggggttttctgtgtcttggccacacagacatgstccagtctcacaaaatgagcgctcctggcagatgctgagtttcctgttagagctgccttttgggagatccttgtcatgggggtgtgcctgtccactggagcccccagagcctcagtagaccctccctgcagggcaagtggggactgctggtcaggagggcaggtgcttatcccacttgtcagaatttatcttcaggaggtggcagagggctgcaaagacccatctgtaggagcctcactgaagggtccacaagggtgaaaacacagaaacgtgttcagcagtagtgcctgtttaattaattatgatgtgttcagacatccaaaagctgtgtagttaaaaatcccagcactgaaaggtggtcacagtatgcagaggggaagatgtcctgcacagcagcaagtacatggtaatcccagggtgagcagccctcggcacatgcgtgcaccgggcttcaggtgggtctcccgtagggtyccgtggacgtggctgctccgggctctctcagtggcccatgcccaggtctgacgtgctggtatctgggcctgagtagcataacggcactgggcgtgctgagggtcccccaggtttttgagcctggccccagggcacgcaccatggagatggtggtgtggagttcctgccactgagtgacgttgggtctcagggttgggggaaaagaacttgattaaatgggtctggctgcttctccggcgtccagcaagaagagcccaggactttgagttgcacccacatctcccatttcgcctgcacacttttgggtccgtattactccacagtgtttgtttcttctctgcctccagggaggcgtctgatcggacacsacgcccagggcctgctacccacasatgcccagtggggtctgagggctggaaggagggtcctgcagggaccgggcactgtgttcagcattggccgttcttaccccttgcctcctgcctttggcctggatggaaagatctcctgagagctggggctcctgagctccctggggctcagccttgctggcaccgcccctgccagacagtgggtgggacaatttatgcagatggtgggggagcctggcctgtcgcagtgctgaccagcccccagtgggtggccgtgggagacagcccgtcstggctgctgggctgcggcgtgcagccgtggtctgtgggccgcagggcggtacatcccaagccctgctgacgcctcgcgggtccctctctttcagtgaatgagttcacggtgatcaggaagaagttcaagtgtccgtactgcagcttctcggccatgcaccagtgcatcctcaagcgacacatgcgctcgcacacgggagagcggccctacccctgcgagatctgcgggaagaagttcacgcggcgcgagcacatgaagcgccacacgctggtgagtgcggggagggtccgcgtgccgcgcgctgcgcgtggccacgatgtccgggcaggcgggtcctgatgagggcgcagaccgccccggaccccacaccgggtccactctgcacgggggggacgacagcagggcagggagatccgccccgggcccctgtctgctctgccccggcctcctgggtgtggctgggccacatggcccctgcagaggcttcggcccaccctgctcacctgctggccsccaaggcagccaggcctcggcaaactcagctcgctctgcttggagcccccaaccctcagccacctctgcgcccccccgcccccgccctgcctcgggagggagaaccctgtccttgtgcctgccgacctgtctgcacccaccgcgcccaccctggagctcagcactggcaggtcgttgtcaggtagcaggtgtggagtggatggatttgcttggggaggaaataatagaaaaaggcagcctgggaacagggaggcagatttgccaaaaaaggcctggcgagggcatctcaagtgggtgagatcaaccagtgaggcgggtggggcacaggcagcccagagcggggcggccccaagggttcggggagtcctggaacgcccaccccgaggcgcagggtgcagggggagctcgcggcgggcagctgtgtgaggagaggcagtggaggcgccccgggctccgggcagaggtggggctgctgtcggggcggaagaggctctggagcatcgctgccagtttaggaatcgcaggagagtcagcaggttccggagcggacctgcaggagccgagctccaccgggagacccaccggggggcggggcttcatgggagacccaccggggggcggggcttcatggggagacccaccgggggcggggcttcatggggagacccaccggggggcggggcttcatgggagacccaccggggggcggggcttcatggggcgacccaccggggggcggggctttatggggagacccactggggggcggaaccgagcgccagaggtcaggttctgttggttgctgcttttccagtgcagtggtggatacccatttggggtaacgacccctgtgggagctccctgaggtcaagctgcagagctagaggggtgcagggccctggcctccccgtgtttgcctggccggctgtgggcgaagggccactccaggccctcggatgccgcctgggatgtgtgctggagtggatatggagcggggcttagtgctgggctctggccttccctgatgcccccacatttgcctttgcgaggtggaggacagtagagaaggaacagtcctgggagggggcccctggaccacgagatggcaggtctgcaaggccagaagcagacccacatccacgcggagccgccggggccccagccttgttttccgtagcggaggatgtgcttctgttcacacaggccacagggctgatcttacaaaccacttataaaaagccgcgggggcggggggaggggtagctgcaccaggccgacatgtttcctattcagagaaaatcgcatcttgttttttaaactgataggtgctaacacgttttaacaacatggattgcaacgtctttcttcagcaaatccgtattaacctctcagtaaacgttttgatcctgtttgaggttcagtgtggctgcctgttccttctcgttggatagggttagggtttgtttttttgttttttttttgagacagggtttcactgtgttacccaggctggagtgcagtggcgtgacacagctcactacaactttgacctcccgggctcaagcgatcctcccacctcagcctcccaagtagctgggactacaggtgtgcaccaacatgctcagctaatttttgcgttttgtggtgatgggatttcgctgtgttgcccaggctagtcccgaactcctggcctcaagtgagccacttgcctctgcttcccaaagtgctgggattacaggtgtgagccactgtgtccgaccagggctgggatttttgtcctggggttcatgattgggcttcagggggtcataattccctggaaaatgtacttataacatatggaaagccaagtgtggtggcacatgcctgtaatcctagcacttcgggaggctggggcaggagaatagcttgaggccaggagtttgagaccagcctgggcaaaattgcgagactctgtctctacaaaaaattaaaaaaaaaaaaaagttagccaagtgtggtcccagctacttgagaggctgaggcaggacgatcacctgagcccagtgaggtccaggctgcagtgagctgtgattgcaccactgcactccagcctgggcaacagagtgagaccctgtctctaaagaacaacaaacacaagcaagcatatggggcttgactttttctgaggagaggctctgtgtgtggccttctctggggtcctggacctgagagcgtggagacccgagtgtgagacagcagctctagccggtccagcctccactttcacgatggcacttacgagcactgtcagcccttccctggcctgggtggcccctccacccgctccaggaagagcaccagtggctggggcagggccccccatgccttggcagggccacatttggagggtgggccagccgtgctcttgcagccacagtgccccagagcctgggcgggctgccaaggtgtcccgtcttccttcttgcttccttccagggcatttgcccatttgcatgagttcccagccatccagccctggccacatggtccctgtgccaccccaagctgcccctgctgcctcctcaggtgccctggcccctgcacacatgggagcctaggcctcaaggggcctcagtgtttttcactagccccgctccaacccttcctgggcctgtgtgcaccaggttactgtgctgggaagtttctactgtggcttgtcttgaatttttgttctggaagtccttggtttaaaatacagcaaaacaggctgggcgcggtggctgacgcctgtaatcccagcactttgggaggccaaggcgggcagatcacgaggtcaggagatcgagaccatcctggctaacacggtgaaaccccgtctctactaaaaatacaaaaaattagctgggcgtggtggcgggtgcctgtagtcccagctacttgggaggctgaggcaggagaatggtatgaacccgggaggcggagctggcagtgagccgagatggcaacactacactccagcctgggtgacagagcgagactctgtttcaaaaaaawaaataaataaaatacagcaaaacaaaagcccaaaggagcagttctggcaccaagttgtctgaggctctgtttctagggttagcgtgtttgggcatctgaggtgtgctgtgtggtgctgccctggccctgaaagccaccagctgcccctgaaggtctcrcatccctggacagcrcccatcccggkccaggcttagagctcacacagttgctctggaagcagacatttgagaagtgaggtctttatggttcccggctttgtggaagaagttacaggcacctctgccctcaaggaagcgggtctagaaggggaggtcgggccgtgctgggtggcctgtcggcctgtggattcggaacactgaggcaggaagtacrtaagggcccgggyccagccccaggatggggaggtggtagctgtggtgcctgcccgtcagaggtctttgcaagtgtagcaggaccgtcttccgccatgacacacattrattatgtatgtacttgctcatgggagaaaactggtgagtttggaatggtttaaggaagagctaaactcacaagcacatcccagcctcagttctccgtgcagcctcagaggtgctgcaggcccsgggagacagccctgtggatggagggaggagccgaggggagcctggggtcattgccgggttcagcctggaggactgacctgaggccagcccacctcagagaagcccctsgtgtggacttggccaggggccaggggttgctattggggtcctctgtgggtcctgccctctcggtccttggagggcagagacaggggctgtgctgtgagggatcagggccagccccccaaggcctcctctagctggcstggccgagggtgcccgtgagtgggtacaagggccacctctccccatccctggccatgtctgaggtctggttctgcacagcacaggtgtccacacccaccctcmgcrgaagcccacctggggccacatgtccccagcagtgtgtggtagttccctcaggccttgaggccagtgctgagaccctccaggaacccagcacctcgcgtcctgccacatgggccctcttcagggtgctgccccatctccctgccgggcccagcacagggcacagcacgactgccctccctggcagccacacctcctcctctgaccataagtgctcayctctcttcttgcatgtctcagtcgaccttgaaacagcctgagagtgggggagttgcctcctttacacgttcctggagtcagggtcgggctgaggggtcagggactgagggggtcaggggctgagggggtgtccacgcagccaggctgaggtgtgggcccacctgcccggctggcagccccaaccccggcccgtccctgtacggctgggtacaggaagagctctgtgagctccagtccaatgcggggccctcagcctgtcctgcagggaggtttggaggaagccaggcttttaggcagaggccggtggtgtgacccccgtgagaagtgtgtcaacccagggggcctctggtgggggtgcttggacacacagtgtagacgctgagactggcccacctaggggctgggtttgcgggggaggggcactgccgccctcgtgccagcatccccttgggacagggctgccttggtgccacctgcagttctgctgtgtggctctgataggagctggggctcaaggtctgagcrctcctgtctgcgcacctcccccaccaggagtctctgcctgtgcagacactcggagggcccgggaggctgtgcccccccaaccccaaccgggccctgctcacccccgcaccccccccacccaccaggccctgctcaccccctggcccccctcccaacctccaccgggccctgctcaccccctgccccgccccccccacctccaccaggccctgctcaccccctgccccctcttccaacctccacctggccctgctcaccacctgccccccccacctccaccaggccctgctcaccccctgccccgccccccaacccaccaggccctgctcaccccctgccctgcctctgcaggtccacagcaaggacaagaagtatgtgtgcaaggtgtgcagccgcgtcttcatgtccgccgccagcgtgggcatcaggcatggctccaggcgccacggtgtgtgcaccgactgtgctggccgcggcatggccgggcccctggaccatggcggcggaggcggcgagggctctccagaggcgctgttcccaggcgacgggccctatctggaggaccctgaggayccacgaggggaggcggaggagctgggcgaggacgacgagggcctggcccctgaggatgcgctgttggcrgacgacaaggatgargaagactcgccgcggccgcgcagccccccaggaggccctgacaaggacttcgcctggctctcctaggcccgcccgccggcagggtcggtggctgcctcgctccgtccacccgtgtgtgtgtccggtgggtctccactgcggggccagggccacgctcacccctctcgcggcccctcctctgcttccccctgaacccaccccccacggaaaccagccctgcgggctaarcaggtgcgaccccagcaagaggggtgctctgggaccagacatgaagtgagttgggggagggcacagggtgggtttgagtgaagggagagcacggtcctaagtccccagcaggtggtgcgggtgtgtgagtggcccctgtgatggccagcctggcttggacacgtgatgggcctgtggccgggtccagtgggcactgggcggggtggtgtgttcggcccagaggcccctggcctgagcaggtgcagagttttacagacacccggtcagcccggctggagcccgccctcccctcccctagcagccaggtcactgcctgtggctgcagccgtggcccgtggtgcagccgtggcccatggcagcctgtagaatccaggtgcacagagagccctgccaccgtcttacctctgggctttggtgcttaacacacaacacagctgcagaccctgctggaggccgagggctccaggtgctatcttaggtggacacagccctgggggctccttccaggaggggaccctcagccctgtgccccccaccacttcaggccacaccaggttccctctgcaagggcctcggctcagtcgtgtgcacttcctcggagagccttgggctgccacgtccaccccgggctctgcccgtcctgttctgcccatggcccagcccggccgctcctgctgacccctcctggacgggctggagctgggctcctgcctttgctgctaacactggaggcggtgttcctaactgcagtgtgctgcttacacctccccgcgtgggtaaccaaatttttaagtagtcagagacatatcgaggtagttacataaaattattttgtttggcattatttttctcactcgaagaaactatatagggttgtttttcctttagcttgtgctcaagtcctcttgctgtgttttcagaagcactcacatgttctttcttttcctgagtgaaaagcaaaggtcccacggtgtgtgctgtggtgcaccgcctggctttgggggtcccggaggcaggctgcctagactcacagcctcgggaccgttgccacggcctgtcttctcgttcaggcctgcctctgacagcactcaccatgaggacattccatccttcaccccctcctctggcacaggccaccactgcggtgctgtgccttcagatgggaggtgggcgcggtggcckcctccttccctccaggacctgcccgtgtgaagaccccccggagtgctgagcttcagggctgcgtggaaagagtttttactctctttttctagcctgtataccaggcttttccccacattgtcaggtagagcaccagcttccctgaccgctgctgctcggggagggctggggctggccgggggtcctgtggaggagtacatggaggactccaggtacagcgcaggagtcacggcttttgttttttgacattggcccccggttctaccaatgacagggtgccctggctggagctgtcatcacacacacccctcagctcggaggctgtgggctcctcaaagctggagaawgaggccaagatttttctgcacacggagtgtggggataggagccgggccaagcgctggcccctcagcggtgagccctgcccactcttacygagcaaggtgggtggctctggcacgagtcccccagggggasagcatggctaccagggagctgcagcggagccctccagccctcaccccaggccagccccaccccggcctctttgagaattctcagaactttgtacctttcccctgatttttaaaccctttttctaaacagactgactttcttacaaaatgcatttggaaaccagacctttgctacccaccaatgtctctgggttttgtaccagtccctgctctcaggccaccctgcccaggacccrggcccgcctccccctccacactcaggatgtcctgctccatctggccggctcactccgtgtggcctgcctttgctgaccgttttggggttccccgccggagctacaggggcattttcttccctaaaaccaacagtgtcccactgacctccccaagtgtttgctgcgtggcagatttcctgttcttgttcgcagtttgccgactgaagagtgtgggatttccgaggcccaggtgagcacgtccatctcaggaggcgtggagggaaaagacatgtcatgaagggttttttttatgtgactgatttttttttaaatcgatgttcaaactaataaatatttttttatgaagaggaaaaatgtgtagattacatttcacattttgtatttttgtttgtgtctgtttgtattttggtgtttacaacaccaaagtgggaaatacagtccattggggatggtgttatttgggggcggggagggggcagggacaccacgatttttctgtcaagctctggatcctgaccaggttgtacactggggctctctgagctttgggacacaggacactgccagggctacgtagggaactgactcagaagacgcagcttactgcttccaactttgcacatcttcctctttaaaaaactgagaaaatgcaaaaactggaactttttgcaatattataaaagaagtaatcttattttagctcattctgtgacatgtgcgactcttaagaaagccatacttaatggtggtggttttttttagatcttatattgtgttttgtatgcagcccttttagaactacttgtagtgagggtgctgtgtgtgcttttcttaaatatttatttttttcaacatgctttcaacctgtcaacaaaaacaaaacacacaaaaaaagggcagtgtttgaagattgttgatttttttctggggataatctatattatattgacttcctattacttattataaacctgtgtttgtattggagatgtgtctactattgggggaagaggttctcgtaatcgctcggtgggaaatcatggctctgccgtcctgcctctctgtggccgtgggttcacgtggcctctgcggtgagtctccaagtttctgcctaggcgcctgtgcgtttcctttctgtgacgggattagcttagacatccttgcaaagcgatcactttcaataaattgggaaattgctgctccagcagatgcctcctgcgtctcagatgatccttcctccggcctcgcctggggtggcggcggccgacgggtgaccctcggccctctgtgggcagctgccagactccacccacttgcccaccacagggtcccagccccacggccttcctcccgagaggcagacaaagcttctggaaaaacctcaaatctttaatttctctcttcgcctggtgcagcccagacgtgagacacctgagcttcaaaaacaaacatggtaaaaacagccccagggcccgagagccgttgagttaagtgcgagtgggggagtcccctctccaacacccctcaaagtgcatcgggactggccccccaaagctgggcccataacacccttgataaatctacgggccgacaggcgggagggtggctgcccccagggcccttggggctaaggggacagcggtgtggtttggctttagtgcaaaaagctggtttctttagaggcactttgagtggtgggacccctccccgacctggcgggggggagggttcagggtcagccccgcccccccaccccaagtaaaagcagaccctgcagctggtgaargccagcccctggggctgtcctcgggctgtttcagccccgggcctggaggggrtggggagggagaaggtggtagcttatgttcttgaacgagccggacttagtccaggaaccgctggcaggctttcttccagcggcaggctgtgcaccagaggtcccggcgctccatgccatacaccttccggcacttcttcgcgtcgccgcggggcttcctgtgcggggggkcacaggacatggggtgctgtgagaccaggaccctccccacctggtgccagccgcaggccctcagcccacacgcacctcagggtgactccgatcctggaggacaaggsgggtgggcaggctccracctccgtgggctgcggctccaggcgggcgggcgtcaggcagccctacagggagacacagccagggcttcactcccctccagagagccctgagacccgccccagctgccaccygtggcctcacccacctggtagacacggtcactgtgacaggactgggggttagcaacggtgctcaggacagggggcgggggcaggggcggggcaggcggccgcaggggactaggcagggctgggggctccagcagctctggcagctccaggcgggggaaggcaggcggcatggaggccgtgggggacactggagtcaggctggacagcccgtcggtcagcgtgtccacaccaacatccagctctgtgtagtagaagtcctcctcaccatcactctgmtcaggctctgcctgcctcctscrggwgacacagccagccagtgggagctgaaggggtggcctggccgggcctcacaaccccagccaacccgcaggccccgccgcaccccaggccccgccgcaccccaggtgcaccaggcggatgtgtctctgcatcgccgacgccgtgctcagcaccttcccgcagctcttccacagacactggaacatgacctgggccgggctctgcagcaacaggggccagggtcaggctcagccgccacacccgcccctccctgggggccgcccccaagctcaccttcctttttctcagggtgggctccccaaacagaaagtgggctgcctcggggggcagtgggggtgacggggtggacggagaggactggtcactggccaggtcccatccccagtctccactgttgctgctgctgctgtagctgcctgggggccgcaccagggcctccttccagggctccaggccaggctctgtggggacacgggccccccgccttagaacttcgggtgggtccagggagtccctaatcctgagctgcccctgttcaccaagtccggtgagactggtgggcagagcgtcttggaggagctggccccagggcttggggagaaasccccccggcacaggaaagggttggcagacgtgtgtggccagccgcgtggaggtgagcaggtcagggaggccagaaggcctgggtcctgccgctttggcctcagtagggggcactgagggtgcrggagtccattttagaaaggagtcccaggtttgagggctctgcttgccccacagaggctgggtggctgtaggttctgagccctgtccccacccacacccctaaatgcagacatctgagtcttacctgggctgaaggctgcaacyggggcccccagaaggagagggctggtggacaggcttgtaagggcagcggcagccatgacctcgtccagccgggcttttcctggggtggctctggaggagatgggggyggggtgcgggtgacccagccagagctctgggcccctcccctggtcggtccacgtgcaggcctgggcacgcgtgcacaccaggctccccactcccagccctgggcatgaggcctggctcctcccccagctcaggttgcagagagagctgaaagccacccggagccgccaggagcagggccagggtctcctgaagcctgagttctccacatcgcgggcttggctccactgtggttccttcagatactggggctgggcaggggtctgaagccctggcagaggggcgggccaggcccaggcctccccccatcacacattaaccagggttgtgcaacagcagctgtgggcctcacgccaggcctgggaggtgggagtggccagcagccggcagcagccagggggagactgggctggaagcacgggcagctccccaggccccagcgagccaggccagggcccgcccctgccctggcagccagaccgaggtgtccggcctggcaggggttgggaggtggcggtcaggagccccagggattcctggacagtcgccccatgccgacsgcgcagcctcttctgcacagagacgcacagccacccgctccgggttctgagctctagccccgaggaactgcggtggagggaggtgtagggactcccagtcatcgatmatttctgctcagctcctccagggctgaagagcttgggggtggctggtaattacaaacctggggccctgacctggcctccgtcggggccggtgtctccgcaccccacccaccgcccctgcgcacaccgagtcccgaggcaccgggcctcccgctcacctctgcgctgggacggggatgtgcgccgacggagtccggggccccgccgccgcccccgtccacgtccggggggcccccaggtccgaggcccgcggctccgactcctgcggccgcgcgaactccaagcccgcgaagccgccgcccacggaagagccctgcggatggggagggggcagactcagcggaggcggtggccgggggaggggggtccctcaacctccgccgcggatccgctcggcgcccgcctcgaaaaccggctgcggccggtgtggacggcgcggccccgcccccggccccgcccccagcccggcgcggcgggaagggctccccggccgcccggcgcagccccggcgggacccacggacacgcgcggaccgacgcggccgccctccccgctgccccgcccccgggggcccgaagtttgggcagcactgacgccatctttgcagcgagagaaacttggtcggcgcccccgcccaccggcgcccggtacctgcggcggcgtgggcaccgtcacgggcgcggcgcgcggccccggaccctccgcgcgcagccacggcgcctcggcccgcagcgcactggggtcccggccggcggcgcggggcggggggcgctccatggccggccggccgggcgccgaggctgcagcggcgagggctgactctcaggacgcggccccgggccgggccgggctggccgggccgccgacccccgccctggatccggccgccgcccgcgccgcgccgcccggaggctgcccggcccgccccgccccgccccgtctcgtcccgccccgccccgccccgtcccgtcccgtcccggcgcgcgcattggccgcgcggcgtccacaccgcaggcgggcgggcccggccggccgcgctcccgccggccagcgcttcgaggccccgccccgggcccgccccctccgggtcgctcccgcgctggcctagggagggaggcccggcccggcacagctccgaggcctccgcccaccccgcgcgcccgcgcgccccgccggggagggcccgttccccacgggcgcgctcgcagagctgccagagccggggaaggggccgcgattgcttggcgggcttcccggcagcaggttactctttaacgctcgactgcccacctccaccaccccttatgtaaaaccaggctgggtggcggagccctcccgtggagtccagggtccaagtcccacccgggggcggccaccctgccggctgcgctgccccctaggagtggctgggaccccgtgcccgcactgaccgagagtctggccggcaggagcaccgcctcggctaggcccgggcgccccgggggcagccagtcccccaaggccagaggggacagctccaagccttccagagaagccccccgccccaacccgcccagctttcaagaagagcaggctgcgaggctggccgctttcatcctgcgctggcgctttatttagacgcgggccttctctggagcccggggaggccgcggctgtcagagcggccaggacctcacggacctcacgggctggcrgcccggggacctgggactggcgctgtcagctgtgaggcggggcggggcgggggacgggcctcactctggaggaaggagcacaggtccttgagtgttcagggcagggaggcagggaggggtctccagcccctccctaggctggggcagctggaagcagggggcgtcccagccccgcacgtgctgctcctgccagcagggtcccccagctcccggatgctctcatacacgttttccagggggccgctgtccacatccagggccctgagcgggagggtctggtaggccaggtcacccgccagggccagaatcgctccctggcccttggggtccagcgggtctgtggtgggtcctrggtccctccttttaggcttgcagaccctggagtacaggacgtccacctggagacaggaagccaacccgaggaggggtcagcaccatccaacctgctgaggayctgccggccccacccacagcgccctaccctggcccacgttacctgagcggccggggtcacctcagtcttcccctgctgtggctcttggggactgcgatgggtccctttgcgcttctggacgcgggcatactcggccaccacagggctggccgccaggctgaccccgggaagggccgccagccccacgttggaataggtggcctcgaggccagcgcaccctgcggtggctgcagctgccggcagagcccggggcagctcctggtgtgggaaggcagagggggctgcctgcggtccggtgatgtccctggacacctccagccagtgtgggcgcaggagatccatgctggcaggccgcagggctgggggtggggtcagggcagagttcactccgggcagggggcaggagcgggtctggcccaggggttggcacgcgctgcacagtaagccccgcccggccgcccccgcccccgccccgccctctgctcacccctgctgctgcgcgggccccggtgcagctcgtgcagtctggtgtccgacttgctgagggagcagaggtgggtccgcctcagtagggactgggggcgaggaaggctggtcggtsccctgcggaccccaccctggtccccgggacagcctggcactcaccgcttccgccgccgtcgcactgccctgcagcctcgcccgctgcctccgcgccctcttcctgggggctacagcgtcctcgggccttgggggtagasgtggggggcggggggcggggtcgtcagcctcgggtccaaggcccggtgcaggcgcgcgtgccgagctgggtgcgcggacctgcctccagccccttcccgcgctgggctgtgaatggcagccgcagcgaggccccagacagaacgcggctgagggacctacctgcggcaggctgtgcacagcgcccacagcgagaggagcagggcgcagcaccctagaacccagagggcaggaggggcccaggacactggcagccccatcctgtgaagccgaggccctggggacagaagaaaggggcgctgggggctggccaaggggacctggcgccacctggcagccccaaatctgcacctcccgcrgctgcggggctcctgcgtctcccgttccagctctgactcagcacaggaagccccaaggcctggcagtccctccctcccagaggtgcccaccttctggcgggggctcccggtgaggtgaactagggctgctctgcctggcccctccgtgtccctgcgggtgaccacggtaacacccagcacggccgtgaggaggggcargacagctgtggccaccatagcccagatagtaaccagcatcgggggagcccctgggtgtgcgccacasgccacagactccacctgcagccaccctctgcccagacatggtctcctgtgtcaggtagtgcccccaagccgctcgctgcggagcccagaactgggaagagctggaggctggtcagcaggagggaccctgcacccggaggagctggaggctgggtcagcaggcagcagcagctgctgggggtgctgatgcccccaccccacttctctctggctcttcttgtctgccagtgtctctgccagagaggatctgtccccttcttggggatcttagcagaacttctcggggtgggggatgccttacaaacagcacagtccagcagcagagacagaagctggggggtgaggggtggtctctggagtttggggccagtctgctcagacccagggagtgggcttcagcctggctgactgacccagctgcagccacatcccaaggcctcccagaccccagctgccccccaggagggcacttaccaagcccacggccaggggtcctcagctctgtctggggcaggccaggaaggtctttgtgcagccctcggctgagctccccacctcatcacttcctgctcctgtcgccaagcgcctcccctgagcctcccaccctgggcagcagccaccaccgcagcctcacccacctgctgcgccccgcccgaagcctagatgaaacgtgtgcgcctctagcccgcactgttctgacagcctaactcacaacccctccacacacgaagacgtgagcagagctggcacagaacccccaaacccacagggccaggtccgcctgcctcaccaagagtgccccacgtggtgggccacagtcctctcccgcccgtctcgcccgctggagcagcactgagctccacccatctgtgggtgtcaggcagcctggcgggcaccctggcctccgatctgccttggtcagagaagggtaagaagggagaatgccggcctcctaggcccctccagcccagcccgtctctcaccacagccctgcacagacccttctctccccagagaccctgcagccagctgatctccactgaatgacactgtgatgaaatcactttaatgtccttgccaaggaaatgcccaagacactggcaggtgggcaagtaagtgtccagatgggaccccgcagctctgtctccactcagcagtgtcygcacgccccaggccagcaggccggcccctcctcgggcaacactggtcttcctgagggcagcccgtgctggggtcccacgcttcgtccatagtgcttgtggggtctctagaactcagtcatcttcttgtgggtgtctgccttcctctgctcctgctgcaggccggcttcctgagcccggagctgccccagctggcgctgggctcctgccagcttctcctgcagctgggctgacgccacgctatgcctgcggaggggctcactagtcagcgtggggtcctgggccatgccaccaaccccagtctgccgtacccactgcctgtgtgcccgctgcccgtcctccaacatgcagacccctcctggactcagcccgctatgcttgggtcaggtgacctccagcatgtatcccgggggcagggccaccctgggtcgccctttgccctgagctgggccccacacgtaccggccagcgttgcgggcgagagcctcctggatgctcctgatgtcccgctgggttcgctcgatcttctcctcagtctggaagagccgcaggctcagggcccgcttggcactcttgctggcatggtacatgtccttgctcctcctccccgctggggccgccccggcttctagggccccaggagcctgaccttgcagcttttcattgaggaagtcaaacacattccgaggagctgggcggcccccaggcctggcccctcttccccggcacctggggggcttgttggtgccagccttgccaaccctggtctgcttctgcagggtctccacacactggtccagcgacttccctcgaggcaacaccacagcatggatgggctccacccggccttccgcgtgtcggcccaaacctgcggaggcacggggatggcagtgctgtggcygcgggaccccgggaatctgaggagcacggggatggcagtgctgtggccacgggaccccgggaatctgaggagcacggagatggcagtgctgtggccgtaggaccctgggaatctgaggagcacggggatggcagtgctgtggccgcgggaccccgggaatctgaggagcacggggatggcagtgctgtggctgcgggacccygggaacccgatggctgcgggaccccgggaacctgatggctgctggacctgggctatgctgcagcagcctgcccacttctccagggcagcttgtactcacccttgccaaactcatagcccatcttggtgaggagtctggagcctatacctcgcgtgtgcacctcccagccagcaaaggcagagctgcaggtcccagagtccacagcatctgaccccaccactgcaagagacggacagagggcagaggactgtgcagagtccacggcgtccgaccccaccactgcaagagatggacagagggcagtggcccagccaggccagaggattgtgcatggtgacccgggctttgaccaatgagctcagatcctgggcagagccacgacaccccacctcttgggctccgtgctctcrtcaccgaggctgctgtgggcatgtgacaccaggcagagtgcatggcagtccccacggcctgctgcaccgtggcccctcctccgcagccctctcctgcccctgcccttctccaccttcgcgaggctgtgagcgcctcacctgccctcacagagtccttggttcagtcctccttcaccagggacatggggcttcagaaaccaccatcactgatccctgggtacacctccaacatgcagacccctcctggactcagcccgccatgcttgggtcaggtgacctcccacatatatacacacacacgcacacgcayacacacacccctctggagagctggacactgcccaccagttcccattcccgaaacttccatgctggctgtctggacacaacctctgtctgccaggatcccaggcacccaggtcccaagtctgagaagccatgcagaggagctgcccctcctgcactccaggccccatcagttggtcattttctgtgacttcctcggcaactccaggcccctcctctcccatggccacagccacgaccatggcctcccatcaatgagactgtagctgttgcacccacactccttgaagataaaggcygccacggatctacycctacccacacggcctcctcaggcacaggtggcaccctcgccgcagtcacacactctccaatagtttggttagatggttggtgccctcaccggccaggagcctctcagggtgaccccaccttcctggctcctgggctccgcagctgcwgccatacctctggcatagctggagtcacccgtaccgtcgctgtctgagtcggactctgtggcctctgtgcgcagtgggggcaggatgccgtccccctccaccacggcctccctcagcagcagcgagtcaaacttgactgtgtagtagccgttgtccacatctgggggcagagacaagctgcaggtcagaatccttgacagcaggtgccactgawgggaaccaccctggacatgaggagcaaggcagggcagaggctgagggtaggtgtgctcatttcgggcccagagccagagtcccgacactcaacccaaaggaagcagggagcagccacacagtgacaacacacgtggggcctgggagggtgttcccgggaggcccccacggccagcctcaccggtgatgcgtgctgcgtgccagaggccatcctggtgcttggccagacacgcagagccggcctgcagggagctcaggtctgggtcctggaaggggcgcagctcatccagagagaccacctgcccatgggagaacctgcagacagagccgtaaggggcagggctcagacatgggccaccaggggcaaacsaacccaggagcactgacccatccgcctgggcactgtcctgagggagacagacacacacgcgtgcgtatacatacacactctcacacactcacgcacacacatacacacgcacacatacacacacacatgcacacactcaggcacacatacacacatgcacatatacacacgcacatacagatacacatgcacacatacactcacacatacacatatatacacacttgtgcatatacatgcaggcatatacacacacatgcatatacacacgtacacatacacgcatacgcacacgcgcatatacacatgtacacacacatgcactcacacaggcatacacaagtacacatacacacgcataaacatgcactcacatgcatacacacacgcatatacatacgtacacaggcatacacacacatatacagacatacacatatacacatacacaagtacacatgtatacacatgcatacacacacatgcacacaggcatatacacatgtacacacacacattaacacatgtactcacacgtcatacacatacagagaccctgacacgcgtataaacatgcactcacacatgaactcatgcaaatacagatgcagtcatacatggatatacgcacacgccatctcacccacatgcgcgcacacatgccctcacccacacacatgcgccctcacccacacacatgcgcacacaagcacccttacctacacacatgcgcacacatctctcacccacacacacgcacacacaggccctcacccacacacatgcgcgcacacacaggccctcacccacacacatgcgcgcacacacaccctgacacatgcacacacactcacccacacacgtgcacacacatgccccctcacccacacacatgcacacacacgccctcacccacacacatgcgacctctcatccacacacacgtgcacgcacacatgcacccgcacccaaacatgcacacacagatgcacccgcacccacacatgcacacacatatgcagtcacccacacgcgcacacacatgcaccctcacgtgtagactgtcacgtgcactcactcatatatgcatatacacatacatgcacacacatggcatgcatatacacacatgcatatacacactcacacttgcatacacacgtagtctcttggtatccatgggaaaccccctgtgcaaaccaaaatccaaggatgctcaagtcccttatatataatgacatagtgtttgcatataacctacgcacatcttcccacgtactttaaatcatccctagattacttgcagtacctaatacgatgtaaatgctatgtaaatagttgttatacagtgtacagacgcagccatccttttcttccccaattattttcaactcgagattggttgaaatgatggatatggaacctgcagataccaagggccaactgtacactttacacacgtatgcacacacaatctcacacacacaaagggccaactgtactttacacacatatgcacacacaatcacacacagggccaactgtacactttacacacatatgcacaatcacacacacaccaagggccaactstacactttacacatgtatgcacatgcacacatacacacaccaagggccaactgtacactttacacacgtatgcacacaatcacacacacaccaagggccaattgtacactttacacacgtatgcacatgcacacatacacaccaaggaccaactgtacactttacacacgtatgcacatgcacacatacacacacaccaagggccaactgtacactttacacacgtatgcacatacacaatctcacacacacaccaagggccaactgtacactttacacatgtatgcacatgcacacacacacacagtctcacacacatcacacacacagacacccgcattctctctcgggatggacttggctgctccagaatatgccccgtgtgtcccatagcctctgctggagtcacagtgtggcagcagccttctgacagcagctcccacagcctcactactgcacaggccacagcaccagtgcatcaaggcagatgtgctgggggtgtgtatgtgcatgactgagtcctcccccaaactaggagaacctgcttatgaaatagtgatgccttgacttttaggcatcagtgaaccagtaaaattaaaaccaaaaccgagacacacacacacacacacacagagagagagagagagagagagagagagagagagagagagagagagagaatgaagaggaaatgtggggacagacagaactgcaatcttcaactttgccaaataaagacatgaaaaaccaaccgccatccactgctgccatgccatcgtttcaaaaaggaagttctttcaaccccacaaaagcaactgaggggccaggtgcagcggctsacgcctgtaatcccagcactttgggaggccgagacgggtggatcacgaggtcaggagttcgagactagcttggccaacatggagaaacccgtctctactaaaaatacaaaaattagccgggtgtggtggcgcgtgcctatagtcccacctactcgggaggctgaggcacaagaatcgcttgaacccgggaggcggaggttgcagtgagcagagattgtgtcactgcactccagcctggaagacagagtgagactgtctcaaaaaaacaaaaaaggagcaactgaggacaggccttcagcccgtgacatggagccaaggctgtctttccagtaggaacgggtgggtggagcagagtgaggtggaacagggattttgtctyatgcgtagacaaaggtggcctcgtacacctccccaggccaggattttgggcggttccttctagtgcctactgttcttaggcacacagggccctgccaatgaccgggggcgccaggggctacaggactgtgcctcaaatgcactgcagcagagactggctgaaaggagactgagaacatgttcaaaaagagagggttaaacccagagtgaattcgattaaatacgccccttcagcacacccacaccatcattagtaaaacctcttctagaatatttgacaatattaaaagccttgaaatttgtaaactctttaacccagaaagtgcttctattattttgtgtgtgtgtgtgtgtgtgtgtgtgtgcgcagtagagtcttgctctcttgcccaggctgaagtgcatggtaggatcacagctcactgcaaccttgacctcctgggctcaagcaatcctcttgcctcagcctcccaagtggctgggactacgggagtgtgccaccatgccagctaatttttgaatctttttgttgagccaaggtcttgtcatgttggccaggctggtcttgaactcctgggctcatgtaatccttccgcctcagtgacatgatttttaaggagaatgtatgtaaagatttggccacaaagatattaaccaaatatgaaaaacttggaaataacctaaatttctaaccatggagagaagttaatggcatatccatgaagttaactgaaaaccaagagaacaggcaaatcgatcaatggagcaaaagagagcctccaggaagagccccccctcacacagaaagcctcgtgtggcagaggaagcatcacagatggggtgcaaggagaaagacgatggatttcacaagagaaaattaaaaactgggttttcatacataaaagatcccaacccaatcacctacctcacagcattgacagaaatacattccagaattagtaaagacttaaccctgaaaacaaacaacatctaaaactaaaagaagcttctgagttccagccacactcaagtagagaggtcgttgaatcgaatatgggccgggagcggtggctcacgcctgtaatcccagcactttgggaggctgaggtaggcggatcacttgaggtcaggagtttgagaccagcctggccaacgtggtgaaaccccacctctaccaaaaatttaaaaatgagccggtgtgatggcgtgcgcctataattatgctactcgggaggccgaggcaggagaatcgcttgaacccaaaaggcagaggttgcagtgagccaagatcgcaccactgcacttcagcctgggtgacgaagtgagactccatctcaaaaaaaaaaaaaaagaaaaaaagaaaaaataatctaaaactagacaaaattatcaaaactcactgatttagaacttttcagagttctggaaactgaccaaagctgagaactcactgagaagagattcttcttgaaaaatgttgggccttgggccagaatactgggaagtctacagcctttgcacctggggctgcccctggctcctactcctgagtcagcaaatctgagtgatttaccaggtcaaggctggctgcaaaaaccagcagcagcagaggtggatgtgggacagaagggaaaacccaggcctcgtagttaaaagtggtgactcgataaacacttacaaagaaaactgacagccctgatcatttggggctgtgatcccagctggagtgagcactgggccagccagatacttaacaggaagactctgaaaatgagagccacagaagggctcagctctcccaggaagggcctggctcttgaggaaaccactgcaggtgttgggagctccaagagaggccagggtgaagtgaaagcaaagagagaggggctggctgaactcacaacgtgctctgaaaccacatggtgtggtggggagccttttgggttaggagtgtttgagcacaccctcttgcccaaatccctggctgaccactaccatatgcaaacacagaagcaactgctaggaagccagactaaaaaatagaatttaaggccgtgcgtggtggctcacacctgtaatccgagcactttgagaggccgaggtgggcggatcacaaggtcaggagatcgagaccatcctggctaacacggttaaacctcatctccactaaaaawacaaaaaattagccaggcatggtggcacacatctgtaatcccagctacttgggaggctgaggcaggagaattgcttgaactcaggaggtggaggttgcagtgagctgagatggcaccactggcactccagcctaggcaatacagcaagactccatctcaaaaaaaaaaaaaaaagaatttaaaaatctgagcagagatatcagaggctgcaggggtggrtgggcaagttttgcagtttaagtccaaacaacttaactaaaacaaacagaacacaagactcaggaaaacaactcagaatccagacatagatcatctgaaatgtccagtattcaacaaaaaaaattataagacaggtaaacaggaaaccatgatccatatttaggaaaaaaagcagttgatataatctgactctgagtgggcccagatgttgagtttagcaaagacttcaaagcagctactataagtatgttcaaataattaaatgaaaatatgatggcaatgattcaggaaatagagaatcctttttttttttttttttttttgagaccgagtcccactctctcacccaggctggagtgcagtggcatgatctcagctcaatgcacctccacctcccaagttcaagcaattctcaggcctcagtctctggagtagctgggactacaggtgtgagctactacgcccagctaacttttatatttttagtagagatggggtttcaccatgtgcctcacctgaggtcaaacgttcaaaaccagcctgaccaatattgagaaaccccgtctctactaaaaatacaaaaattagccaggcgtggtgtcatgagcctgtactccctgctacttgggaggctaaaacaggagaactgcttgaacccagaaggcagagggttgcagtgagccgagatggcaccactgcactccagcctgggcaacagaggcagactctgtctaaaaaaaaaaagaaaaaaagaaaaaaaaaaatcaaatggaaattccagagttaaaaaggacaatcactgaaaggacatttttagtgaatgtagtggggagggcaggatgaacaggtaaagtacagagaatgaggttgtgaagcttctctgtctgataccacaatagtagatgcctgtcattatacatgtgtcaaagtccatagaatgtacaccaccaagagttagccctaatgtaaactatggaccttgggtgacaatgatgggtctgtgtaggtttatggattgtaataaacgtaccagtctggtgagggagcatgatggtgttgtggggaggggctgttgcatgtgtgggggtctggagtatatgtgaaatctctgtatcctccacccaattttgttgtgaacctaaaactactctaaaaactaaagccatggtcaggagcagtggctcatgcctgtaatccctggactttgggaggccgaggtgggcagatcacctgaagtcaggagttcaagaccagcctggccaacatggtgaaatcctgtctctactaaaactacaaaaattatttagccaggtgtggtggagggtgcctgcagtcccagctactggggaggctgaggcataagaatcgcttgagcctgggaggcggaggttgcagtgagccgagattgcaccattgcacttcagcctgggcgacagagcaagactccatctcaaaaacaaacaaacaaacaaacaaacaaaaagcctattaaaaaaaaattcaaggccgggctcatgcctgtaatcccagcactttgagaggcctaggcgggcggatcacctgaggtcaggggtttaagaccagcctggccaacatggtgaaaccctgtctctactaaaaatacaaaaaaattagctgggcgtggtggcgggcgcctatcatctcagctacttgggagggtgaggcaggagaatcacttgaacctgagaggtggaggttgcagtgagccaagatcgcgccattgcactccagcctgggcgacacagtgagactccgactcaaaaaaaaaaaaaattaattagatgtactcaacggcagatttgagatggcagaagaaaaaaattcattaaaaattatcctggccgggtgcagtggctcaygactgtaatcctagtaytttgggaggctgaggcaggtggttcacctgaggtccggagttcaacaccagccttgccaacatggtgaaacctcgtctctactataaatacaaaaattagctgggcatggtggtggcacactccggtagtcccaactactcaggaggctgaggcaggagaattgcttgaacctcgaaggtggtggaggttgcagtgagccgaaatcgcgccactgcactccagcctcagcaacaaaagcaaaactccgtctcaaaaaattaaaaaataaataaataaataaataaataatccagtttgaggaataaggagaaaaaaggttggaaaaaaaaaaaaaaagctttagagaacgcacaccaacatacatgcagtggtactcccaaaaggagatgagagaggggcaggaaaaaaatttgttgaaatgatgagtaaaaactctccaaatttggtaaaacaaaacaaaacattaatctatgaatctaagaggcttactgaagcccaaatacgatgcacaccaagagatccacacctagatacatcacaaactactaaaggccaaagacaaagagaaaatcttgaaaacatcaagagaaaaaaagataattcttcaagtacaaagggacaatttgacagatgacttctcatcagaaacaatggaacccagaaggtagcatgatgacacttttaaacactgaaaagaatgatcaattaataattctatagccagctaaactatccttcaaaaaatgaagctgaaataaagacattcccaaataaacactgaattggttgctagcaagcctgtcctacaagaaattctagccgggcgcggtggctcacgcctgtaatcccagcactttgggaggccaaggcgggcggatcacgaggtcaggagatcaagaccatcctggctaacatggtgaaaccccatctctcctaaaaatacaaaaaattaggtgggcgtggtggcaggcgcctgtaatcccagctactcgggaggctgaggcaggagaatggcgtgaacccgggaggcggagctcgcagtgagccgagatcgtgccactgcactccagcctgggaaacaagagcgagaccccatctcaaaaaaaaaaaaaaaaaagaaattctaaatgggctgggcgtggtggctcatggtaatcccagcattttgggaggccaggacaggcagatcatgaggtcatgaattcgagaccagcctggccaacatagtgaaaccctgtctctactaaaaataccaaaaaaattggctgggggtggtggcaggtgcctgcagtctcagctacttgggaggctgaggcaggaaaatcactctaaccagggaggcagaggttgcagtgatctgagactgcaccattgcactccagcctgggcaacacagtgagactttgtctcaaaaaaaaaaaaaaaaaattctaaatgaagttcttcagactaaaaggaaatgacactagacagtaactcaaattcacaggaaagaaaaaggggcaaaaaaaagaaaggtaaaatatggatgatacaaaaaaacaagtatactttttttctctttgaatttctttcttttttaaatagagatggagtctcgctatgttgcccaggctggtgttgaactcctggcctcaagtgatcctcctgccttggcctcccaaggctttgggattacaggcatgaaccacagtgtcyagatcttaatttcttttcttttctttttttttttttttttaggcagagtctcgctctgtcatctaggctgtaatgcagtggtgcgatcttgctcactgcaacctccgcttcccaggttcaagcgattctcttgcctcagcctcccgagtagctgggattacagacacccaccaccacacccggctactttttgtatttttagtagagacggggtttcaccatgttggccaggctggtcttaaactcctgacctccggtgatccactcacctcagcctcccaaagtgctgggattagagataaaagccaccattcctagtccctttacttctgagataagatctgcacccaggctggagtgcagtggcacaatctcagctcactgcagccttgacttcccaggctcaagtgatcctcccaccttagctgggatcctcccccaaatagctgggactacaggcgcgtgccaccatgccagactaattttttgtaattttggtggagatgggtttcgtcatgttgcccaggctggtctccaactccctggctcaggcgatctgcccacctcagcccccaaaagtgctggagttaaaggcataagccactgcctccaggcaacttctttcaaaatacttttgaagcaataattataacgctgaagagctgaagttataacatacataaatgtatatatggcaataatacatgaaggagaagaggggatggagctatgtcagaggagaagggaggatggagctatgtcagaggacaagggaggatggaactatgtcagaggagaagggaggatggagctatgtcagaggagaagggaggatggagctatgtcagaggagaagggaggatggagctatgtcagaggagaagggaggatggagctatgtcagaggagaagggaggatggagctrtgtcagaggagaagggaggatggagctatgccagaggagaagggaggatggagctgtgtcataggagaagggaggatggagctgtgtcataggagaagggaggatggagctgtgtcataggagaagggaggatggagctgtgtcataggagaagggaggatggagctatgccagaggagaagggaggatggagctgtgtcagaggagaagggaggatggagctatgacataggagaagggaggatggagctatgtcagaggagaagggaggatggagctgtgtcataggagaagggagkwtggagctrtgtcagaggagaagggaggatggagctgtgtcataggagaagggaggatggagctatgccagaggagaagggaggacgtcataggaggagggaggatggaactatgtcagaggaaaagggaggttgggactgtgctataggaaaatggagggggaactatgtcatagtacaacggaagtagatctatgttatagacacgttgccatacttaggctcagtgcagtcgctcacacctgtaatcccagcactttgggaggccaagatgggcggatcacctgaggtcagcagttcgagaccagcctgaccaacatggtgaaacctcatctctactaaaaatacaaaattagccgggtgtggtgggggtgcctgtagtcccagctactcaggaggctgaggcaggagaatggcgtgaacctgggaggcggaggttgcagtgagccgagatcacaccattgcactccagcctgggtgacagagtgaaactccataaaaaaaaaaatgctgtactttaagtgttaagttagtaataatctgaagtacattgtggtaagttaaagatgyacattgtcatctctagagcaaccactaagaaaataacttaaaacagcatagctaaaaattcagcaacagagctggatatcaccaaaatgatggagttggcagctccaaagatccgtctctccagcaaagcaactattctgctgtcaaaactgtcacartaaacttttttctattcagctgtcaaaactgtcacaataaacttttttctattaaactgtcaaaacctcccaataaacttttctgtaactctggtgtctacgaaccagatgactgctcaatgaagtaagaccctgctaaatttcaggaggacagctgggctatttctgctcagccactactaccagctcacatgtagccatggggaaggcaacctgtatttctgatgtggcttgctggtgtcagaagggatgatacagaccttttctcaaggaatcctgcttatgcatttggatctttctagtgtctccctgaagggcttgcctttgtttcaccccctcgaactctctcagggctggggcagcctccagggtcgtgctgttgatggcattttttttttttttttttccccgagatggagtctcactctgtcgcccaggctggagtgcaatggcacgatctcagctcactgcaacctccgcctcccaggctcaagcaattctcctgcttcagcctcccgagtagctgagattacaggcacccaccacgcccagctaatttttgtatttttactagagacggggcttcaccatgttggccaggctggtctcgaactcctgacctcaagcaattcacccgcctcggcctcccaaagtgctgggataacaggtatgagccaccgcgcctggcctgaaggcatttacaggtagatactacctgaagttgtgggggagggacaacaacagatgggcaaagagctgacagaaaagcctaggaaggaagaggctgggaaaagagctacatgaaggtctaagggctttggaaagctcctgttcatgcttggaaatccagaaggccatgcacacagctggggctagacaggggctcagaaacacctgaggaggccctcaactttcacctctggttcatccttaggctccatgggagcragaagtaaaggctgaggaaaagccgtgaacagcctggcggacactgaaggacttgccccagtacagaggcaacctggaaaggatggaagacactctttatcctttttttttttttttttatttgagacagagtctcgctctgttgcccaggctggagtgcaatggcgcaatctcagctcactgcaacctycgccccctggrttgaagcgattctcctgcctcagtcttcccagtagctgggactacaggcaggtgccaccatgcccggttaatttttgtatttttagtagagacagggtttcaccatactggccaggctgatcttaaactcctgacctcaagtgatccacccgcctccacttcccaaagtcctagcattacaggcgtgagccactgcgcccggcctctttatcctttttgccactagatatttaaagmaatctctttcaaagcacaagctaaccactaacctaaaagaacagaaacaagcacccctgacagaatatartctttatttaaaaaggtcaggaaagtaactaaacaaacgagaaacgacaatccacaacaaacagcaacaatgaaccctgcagagggcggaggatctgattttcaaagtaaccacattatcatcttcaaattgtgcaggtttcaacaaaaaattacaaggcatgcaaagaaacaagaaagtgtggcccattcaccggaaataaagaaattaacaggccgggtgcggtggctcacacctgtaatctcaacaccttgggaggccaaggtgggatgactgcttgagcccaggagttcaagaccagtcagagaaatgtagcaagaccctgtgtctaaaacagtaacaacacaaccagccaggcatggtggcacatgcttgtagttctagctactcaggagactaaggtgggagactcacttaagcctggacggttaaggctgcagtgtgccagggttgtgccactgcactacagcctgggtgagagagggagactttgtctcaaaaaataaaaaataggctgggcgcggtggctcacacctgtaattccagcactttgggaggccgaggcaggaggatcatgaggtcacgagatcgagaccatcctggctaacacggcaaaaccatgtctctactgaaaatacaaaaaattagccaggagtggtggcacgcacctatagtcccagctactcaggaggctgaagcaggagaatcgcttgaacccaggaggcagaggttgcagtgagccaagatcaagccattgcactccagcctaggctatagagwgagactccatctaaaaaaaaaagaaaattaaaaaaaattttttaaaaataaagaaattaatagaaactgttcctgaggaagcctagacatttgaatgactagacaaaaactttcaatcaattaccttaaatacactaaaaaaagaggctgggcacagtggctcacatctgtaatcccagcattttgggaggctgaggcggacagatcacctgaggttagtagtttaagaccagtctggccaatgtggtgaaacccagtttctactaaaaataccaaaaattaggtgggtgtggtggcacatgcctataatcccagctacttgggaggctgaggcaggagaatcacttgaacccaggaggcggaggttgtagtgagccaagattgtgacrttgcctgccagcctgggtgacaagagtgaaaccccgcttcaaaaaaaaaaaaaattaataactaaataaaaagaaatttaaaaataaaggaaaccatggataatgaactaaaggaaaacaaaagaaccatgtctaaccaaatagagaatactagtaaagtgataattactacagaaagaaaccaaatagaaactttggagctaaaaagtacagtaactgtagtgaaaatttcaccagaagtttcaacagcagatttgagaaggaagaagaaagaaacagtgaacttgaggacaggtcagctgaatttatccaaaatgaggagcagaaagaaaaaaagaacaaagaaaaatgcctagagcccaagggacctgtgctacaccatgaagcacatcaatgtatgcataaagttccataagcggcaaacagacagaaagaaacaaaactagtatttcaagatgcaaagaatagtagctgaaactttgcaaatttaatgaaagacatgaatttacacatccaagaagtccaatgaactccaagtagcttataaattgagggatccacactgatacattataatcaaactgctgaaacccaaagatagagaatctcctaaaacagcaagagacaagtgactagtcaatatataaatgttcctcaataagattaacagccaatttctcatcagaaactattggaccagaaggcagtgagatgacatttttttttttttttttgagayggagtctcgcactgttgcccaggctggagtacagtggtgtgatctcagctcactgcaagctccacctcccgggttcacgccattctcctgcttcagcttcccgagtagctgggactacaggcacctgccaccacacctggttaattttttgtatttttagtagagacagggtttcaccatgttagccagggtggtcttgatctcctgacctcgtgatctgcccacctcggcctcccaaagtgctgggattacaggcgtgagccaccgtgcccagccaagatggcatttttaaagtcttgaaagaaggccaggtactgtgactcacacctgtaatctcagcaccttgggaggccgaggagggatgacagcttgagctcaggagttcaagaccagcctgggcttgagtgagaccttctctctattaaaaaaaaaaaattgggggctgggcatggtgtttcacgcctgtaatcccagtgctttgggaggccaaggcgggcagatcacctgaggtcaggaattcgagaccagtctgaccagcacgttaagactaaaatacaaaaattagccaggtgtggtggtgtgtgcctgtaatcccagctactgggaaggctgaggtgggaggatcacttgaacccgggaggcagaggttgcagtgaggcaagattgtgcaccaccattctccagcctgggcgacagagcaagaccctttctcaaaaaaaaaagaaagaaagaaaaacttttttggaaaatttacaaatatgcagaaataaagacactcttgaataacsagtaagtcgaacaaaaaaacaaaagggagattaggatgccttgagatcaatgaaaatggaaatacaacagaacaaaacagccaagtggcagggtgcggtggctcttgcccataatctcagcactttgggaggccgaggcagtaggactccttcaagtcaggagtttgagaccagcctgggcaacaaagtgataccctgtctctgcaaaaacttttttttttcttttcttgagatggagttttgcttttgttacccaggctggagtgcaatggtgtgatcctggctcactgcaacctctgcctcccaggttcaagcgattctcctgcctcagcctcctgagtagctgggattacaggcacctgccaccacgcccagctaatttttgtatttttagtagagatggggtttctccctgtcggccaggctggtctcgaactcctgaccttaggtgatccacccaccttggcctcccaaagtgctgggattacaggtgtgagccactgtgcctggcctctgcaaaaacttataaaagaaattagttaggtgcagtggtgtacacctgtagtcccagctacttgggaggctgaggcaggaggactgattgagtccaggagctcaaggctacagagctatgatcgcatcgctgctctccaaacggcaacagagtgagactgtgtctcaaacaacaaaacaacaacaaaaaacaatcttatggaatgcagtgaaagcagtgtttagagggaaatctgtagctgtaaatgcttacattcaaaaagaaacaccttggccgggaaacgtctactcaggaggctgaggcaggagaatcgcctgggcggcggaggctgcagtgagctgagatcatgccactgcactccagtctgggtgacagagggagactccatctcaacagcaaccaaaaaaaaaaaaaaaaaaaaaaaagaaaagaaaaaagagatctcaaatcaataacttaactgtataccttgaaaaattaggggaaaaaaagagcaaattaaacccaaaccagcagaaaaaaggaaacaaaggttaaaatggaaataaatgaaacagaatgggaaaacaatagagatcagcaacaaaaaagatcaacaaaattgacaaacctttagcgaaaatgaccaagaagaaaagacaggccatgcgtggtggctcatgcctgtaatcctagcactttgggaggccaaggctggtggataacctgaggtcaggatttcaagaccagcctggccgacagggagaaaccccatctctactaaaaatacaaaaactggctggrcatggtggctcatgcctataatcccagcactttgggaggccaaggtgggcggatcacctcaggtagggagtccaagaccagcctggccaacatggtgaaatcccatctctactaaaaatataaaaatcagccaggcrtggtggtgcacgcctatagttccagctactcrggaggctgaggcaggagaattgctggaatctgggagtcggaggttgcaatgagtgagattgcaccactgcactccagcctgggagacagaaacagactccgtctcaaaaacaaaaaaacaaaacaaaactagctgggtgtggtggctcacacctgtaatcccagctactcaggaggctaaggcagaattgcttgaacctgggaggcaggggttgcagtgagccaagatcatgccactgcactccagcctgggtgacacagtgagactccatctcaaaaaaaaaaaaagargaagaaaagagatgactcaaattgctaaaaccaagagagaaagtggagctattactactgatcttacagaaataactagggctataaaaggatactatgaacaattgtatggtaacagattagataacataaacaaaatggacaaattcctagaaacatgcatgcaaactatctaaactgactcaaggctggacgcggtggcttatgtctgtagtcccagcactttgtgaggccgaggcgggtggatcacctgaggtcaggagttcgagaccagcctggccaacatggtgaaatgctgttcctactaaaaatacaaaaattagccaggtatgctggcgtgcgcctgtagtccgagatactggggaggctgaggtgggagaatcacttgaactcgggaggtagaagttgcagtgagccaagatggcaccactgcactccagcctgggcgacagagcgagaccaaactgactcaagaagaaacagaaaatctgaatagacctataacaaataaagaatcagtagtcaaaaaacttccaatgaaagaaaagttcagaaactttcactacagttatacrttttagcttccaaaaagaaaagtcaatttcaataaggaaattgaatcaatagtcaataaacttccaacaaaagaaaagtccatctctctctctctctcwmtmtmtatatatgattgtatatatcacttcactgttgaattctatcaaacatttgaagaagaattaacaccaatccctttttacctcttcccataatataaagaatacttcctaactcattctatgaggccaatattatgctggcatcaaagctatacaaagacatgccaagaaaagaaaactacagaccaatatcccttatcaatacagatgcaaatattctcaacaaaacagcagcaaatcaaatccagcaatgttattacatgataaggccttaaacttttaactgttaaaaagataaggctcgctgcggtggctcaygcctgtaatcccagcacttcgggaggccaaggtgggtgaatcacgaggtcaggagtgcaagaccagcctgtccaacatggcaaaacaccgtctcaactaaaaacacaaaaaattagctgggcatagtggcgggcacctgtagtcccagctactcaggaggctgaggcaggagaattgcttgaacccgggagatggaggttgcagtgagccgagatcgcgccactcactccagcccggcgacagagtgagactctgtctcaaaaaaaaaaaaaaaagaaaaagaaaaaagatagggccaagtggctcatgcctataatcccagcgctttcggaggctgaggcaggaggatcactttagcccaggagtttgagaccagcttgggcaacagagtgaaatctcatctctacaaaaawaataataataaagagataatacgccatgaatatgcgtgctttatctgaggaattcaaggatggttcaacatacgaaaatcaatataccacattaacaaaatgaaaggaaaaaaaccacacatgatcatctaaaggaaaaaagcatttgaaaaatcccacacagctgggtgcagtgcagtgactcacccctgtaatctcagcactttgggaggctgaggcaggattgcttgagccctggagtttaagaccagcctgggcagcaaagcaggaccctacctctacagaaaaattaaaaaattagctgggcatggtggctcatgcctgtagtctcacctactcaggaggatgaagtaggaggatcccctgagcccaggaattcgaggttgcagtgagccatgatcatgccactgccctccagcctgggtgacagaacaagaccctatctttaaaaaaaaaatcaacaccctttcatgataaaaaacactcaacacactatgaatataagagaatttcctcaactcgataaagggaatctacagaaaacctacaagtaacatcatattcaacagtgaaagactaaaagttttccacctaatatcaggaacaaaaaagttttccacctaagatcaggaacaagataaagatgtttgttctagccactttttttttttttttttttaaagacagggttcttgctctgtcgtccaggctggagtggagtggcatgatcttggctcactgcaacctccgccccccaggttcaagcaattctcatgtctcaccctctcaagtagctgggactacaggtgcacatcacctcacccagctaatttttgtatttttagtagagatggggtttcgccgtgttggccaggctggtctcaaactgctgatctcaagtgatctgcccacttccacctcccaaagtgctgggaacacaggtgtgagccaccacccccggcccgctctagtcacttttattcaacatygtacttgaagttctagctaaggcagttaagcaagaaaaagaaataaatgccatgcaaactagaaacaaagactacaattatctctattcacatatatattaattgtatatattgaatatatatgattgtatatatcgaaaatcctaaatagtgcataaaaaatcctattagcactaataaaccaattcagcaatcaatacaggattaacataaaaaaatccactgtatttctttttttttttttttgagatgaagtctcactcttgttccccaagctggagtgcaatggcgcgatctcagctcactgcaacctccgcctcccaggttcaagcaattctcttgcctcagcctcctgagtagatgggattacaggcacctgccaccatgccagactaatttttgtatttttaatagaggctggatttcaccatgttggccaggctggtctcgaactcctgaccacaggtgatccacccgccttggcctcccaaagtgctgggattacaggcgtgagccacggtgcccagcttgtatttctatatactagcaacaaacagcctgaaaatgtaactaaggaaaacaactcgagccgggcacagtggctcacatctgtaatcccagcactttgggaggccgaggcaggcagatcacctgaggtcaagagttcgagaccatcctggctacatggtgaaaccccatctctactaaaaatacaaaaaattagctgggcgtggtggcaggcacctgtattcccagcgactcaggaggctgaggcrgaagaatggtgtgaacccgggaggtggagcttgcagtgagccaagattgggccacttcactccagcctgggcaacagagcaagactccatctcaaaaaaaaaaattagctgggtgtggtggcaggcacctgtgatcccagctacttgggaggctgagcagaagaattgcttgaacccgggaggcagaggttgcagtgagccaagattgtgccaytgcactccagcctgggtgacagagcaagactctgtctcaaaaaaaaaaggaaaagaaaaacaattccttagagaagcatcaaaaataatacttatttaaccaagaatgtgcaagacttgaacagtacaaaatactgttgaaagaaattaaagacgtaaataaatggacagatccttcattcatgaattggaagacttaatactgtttttttcttctgttattgttgttgtttaagatggagtctccctctgttacccaggctggagtgcagtggcatgatctcagctcactgcaacctcctcctcccaggttcaagcgattctcctgcctcaccctctcstgtagctgggattacaggtgtgcaccacctccgactaatttgttttttatttttagtagagacggggtttcaccacgttggccaggctggtcttgaactcctgacctcaagtgatatgcccgcctcagcctcccaaagtactgggattacaggcgtcagccaccacacccagccagaaggcttmatattgtaaagatgacaatgtgccccaaacagatctacacattctatgcaatccatatcaaaattcaaactgtcttttatgcagaattggacaagccgatcctaaaattcrtatgaaattgcaaaggatccagaaacaaaacaaacttgaaaaagaggagcaaatggtgaataactaccacttcctgagtttaaaacttatcacaaagctataataatcagaacagtgtggtactggcacatatacaccaatggaacaggagagagagctcagaaataaacccttacatatattgccaattgattttggacaaaagtgccaagaccattcagtggagaaaaagcagtcttttaaacaaatggtgctgggaaaactggaaatccacatgcaaaagaataaagtggaccctcacctaataacatatacaaaaattaactcaaaatggatcaaagacctaaatttaacagctaaaactacagaactcttagaagaaaacataggtgaaaatcctcataactatggatgaggtggtttcttaaacctgatgacaaaaacataggcaataaagaaacaataaattgcactgcatcaaaatttaaaatgtttgtgcatcaaaggacactatatcaagtgaaaagacaacccaaacaatgggagcaaatatctgcaaactatatacttcataagggatgatatccagaatatataaagaaatcctgggccgggtgtggtggctcatgcctgtaatcccagcactttgggaaaccaaggcgggatcacctgaggtcaagrgttcgagaccagcctggccaacayggtgaaaccctgcctctactaaaaatataaaaattagctgggcaccacgtggtgacaggcgcctgtaatcccagctacttgggaggctgaggcaggagaatcccttgaacccaggaggtggaggtcrtgccattgtactctagcctgggcaacaacagtgaaactccatcttaaaaaaaaaaaaaaggtccaacgcaaatccaagagaacttatcagtcctgaatggtggcaaggtggacgtctgtaagatgctccggaagctttcagatcaggcctgatgccgacatggcaagcagcactgggtggagcaggggacggaacgagggctgggggcaacyggagccctctgagccttgaagccctggaccactcagttcttctactcctgtttcctcctctgtcagatggtgtgactgcagggcctacctacagggctgttgcacrgatgaatgaaagtatatgaaacccttggagcagtgcctggyccagagggagcaccacagggatgtgtcagatctctcatcaaagggatcaggaattcgagacctgggtaatatggtgaaatcccgtctctacaaaaaatacaaaaattagctgggcgtggcagtgcacacttgtagtatcagctattagggaggctgaggtgggaggatggcttgggccagggaggyggagattgcagtgagccgagattgtgccactgcactccagcctgggtgacagagcagcaagacgctgtttcaaaaaaaaaaaaaaaaggaagacattcaaagaactagaactagaactagggatggttacacggtcagcctgaactattggctaaaaaagaaaattacctactagaaggcttggtaaatatttcttctaagagaaaagtaaaaaggaggaaaaataaagctatgcgcttagggaaatagagacattacagtaataattgttcatatttgaatatggaagaggtattaccattaaatgtgttacctattatgacacagaagttactcttttttgtcctcacatcggacttggacttccaaaaagttactttttaagtaatttcctaatcagttagattagagatgcaactatgaagtattcataattggaaaaaaccagtaacttctggaatttgctttaaaatggcccaggaaagaaaaaaatagggcagggagaacagacaaaatgagactgggaaaatattaatmaatgacgacattggatgatggaccgtgggcggtgattatgctaaactctctaatttggggtatgtttgaaaatctccatgaaagtaaaatttaaaagttgaactctagagaataaaactaacaacagggccaggcgcagtggctcacgcctgtgatcccagcactttgggaggccaaggtgggtggatcacgaggtcaggagttcaagaccagcctggccaagatggtgaatctccgactctactaaaaatacaaaaaattagccgagtgtggtggcgggcgcctgtaatgccagctactctggacgctgaggtagagaattacttcaacccgggagacagaggttgcggtaagctgagattgcgccactacactccagcctgggtgaggagagtgaaactctgtctccaaaaaaaaaaggccaggcgcggtggctcacgcttgtcatcccagcactttgggaggccaaggtgggcggatcacgaggtcaggagattgagaccatcctggctaacatggtgaaaccccgtctctactaaaaatacagaaaattagccagacatggtggcgggcgcctgtagtcccagctactcgggaggctgaggcaggagaatggcgtgaacccgggaggcggagcttgcagtgagccgagatcacgccactgcactccagcctgggcaacagaacaagactccgtctcaaaaaaaagataaaaaattatagtaatataaaaattagctgggtgtagtagcgtgagtctgtagcccagctcctaggggggctgaggcaggaggatcggttgagcccaggaggtccaggctgcagtgagccaggactatgccactgcactccagcctggttgacaaagtaagaccctgtctcaaaaaaaattaaaacaaccaccaaaaaaaaactgacgataggctggagacctactctcttccacataagccttgcactgctgctcgggctgcagtacagtggctgcatctccactcactgcaaactcggcctcctgggttcaaccaattctcctgcctcagcctcctgagtagccaggaccacaggtgcgcgccaccacgaccggttcatttttgtgtttttaaggagatggggtttcaccatgttgaccagcgtggtcttgaactcctgacctcaggtgatctgcccgcctcggcttcctaaagtgctgggattacaggcgtgagccaccgcgcctggcctccttccatgcttcttgattcaccccagaaggaagacgtagacgcctgaacacagacacagctgtcaaagcacgcctgccccaggaagctgagacaaaactgcaaagcaaagggagggccgatcctgacccgaccctgtgtgcgtgccccttacgcccctaaggttggcatctgacaacaaagggctttacctgcagttctccttaaagcggcactttccctccaggaagaacgggcacggcttcagagacttgtgagtggggtacaggtaaagcacacggacacccgccgagccatcctccgcctcttccgttcccaccaccatggcgttgtgatactccagagtgccccaggagctgtagtagggcgcgctcacctttgtcccactcagctcttcctcgtcctctccctcttcctcctcctgcccacctgccgcagattctggccccgcctctgctttaggaacggtctctgatccggacccacgggccgctgctggtgcctccaccgcctcagtgatggcctcccggaaagcctggtactcagcatcttcctggcggcccgggcgctcttcgtccagcgcggccaacaasctgctcttcctgacagacaccaggctggcctcggtgagctcgatgagctccttcaggtccccctgcagctggcgcaggtcagcctgctcagacgaatccaggccggcgcccaaggccagctccacctgctgcagctgcgcacggtaggtctgcaaggccgactccaggctctcctcgtccatgctgagagagggaggcgctggaccagggctgcaagaagagaagccagctgagccccgcgtctcgggaccgaccccacagcctgagggcgggcacgggcacgggcacgtcccctttccctcggggagacaccggctcagaggcacagctcccagcgcagaggtcgcagcccgggtacccccgctcaggctccgcgcttcccttccgagccgccgtgggctcgccgctagccgggtcccgcgtcactccggagccccttccccgcggggcgccccgccgcctcaccctccgccgagcccacccgccgcgcccgccgccttccaggccggccgcgcccccccgcccggcgtctcttctgtctggccagggccgcgtccccgcaaaccgcggccacctggtccccggccgggcacctcctccgcgcggtttcccagccgcagccacagagagcccgccggcctcaccggctagagcggcccggcgcccccttttcgccccagcagccgatcggcacttcctcccgagcgccgccgcttccggaagtgcttggcgcgcgggggcagccgggaagcggagcgcggaggccgctgggacgcggttcagctcattccctgaggccggcccgcgtcccgtcaggcgccgcgcggggttagcgcggggtcagcggaggtcagcgggggtcagcagcagcggctccgagggcgcggcggacgcaggtaggccgcaggctgtgcggtgaggcgcgaggcccgaggggcggcccaggactcgaggtgggacgcgggtgtgacaggagccagctttggctgcttgtcggggagcctcagacctggcggcggcggcttggggcggacgtagccgggggccgcgacccasgttcttccttcgcagtcgttccctgccagccgcgcgccgcctccaggtgcactccaggagcagccgcgccgctgctcacccgccctgtagtccgctccccccagggccgtccccgttttaagaaatggggtgatggggcgtccctacccggcgcctgcaggggctcctggggagcgcgccggtggctcgctgctcccgggtggggcgcggggctggcgctcgagggtgccgtggcccaggcggggctgcagcgagtgtgttccccgttccgcgcgcgtgaagcgtgggagcgaagcctcgggggagggcgggagcgcggctgagctcactgtgaacacccggctgggtagtcccgcgagcaggggaggggccggaaccgatgtgtatgcggagaggtcgcagtcattgctgtgagcaggacacagtggcggctgacctgggagaagttacagagggacggggtgggagagggacgaggagtcgggaatggcccccaggctctcgtcctgagcggtcggctggacgtggggcgccactgaccaccgtggagaagcccgggggaggggaggtgctttctggctgcacactgacctatgttggggtgcccagggcaggatgtacacgctgctgtcgggcttgtacaagtacatgtttcagaaggacgagtactgcatcctgatcctgggcctggacaatgctgggaagacggtgagtgcccacgcccttgcgcgcacctttcccacggcctggcggcgcccccttcggttttgtgctgtcagctgcacgttcactacccagacggaagccaaatttcacctgagacggcaggatagtcaccaccagcctcctgaagagcagagtgttgctctgtttctgtttctgtcttttaaagaacagacctgagtaaggatatytggaagccagtatagcccctccttgatgtgtttcgcctctgcctctctcctcagaccttcctggagcagtcgaaaacycgatttaacaagaactacaaggggatgagtctatccaaaatcaccaccaccgtgggcctaaacagtaagggtctcaatagcaggctgtgggtttggggccttgaggatgccgtgatattcacagtccagctggcccgtggccacagccctgtcgggcccctctcaagtctcatttgagtggcaccagcatggtttgccccatcccctgggagagctgggactgggtgtgtcgaggaccaaggtcatgagccttgcctgtttcctcctctccccagtcggcactgtggatgtgggaaaggctcggctcatgttctgggacttaggagggcaggaagagctgcagtctttgtgggacaaggtaagactccctggccaggaccacccccaccccagccctccagtgccacttctttccagagtgccctttgggcccttcctcagcagytttccttacccactctgtccctcgggttttctctctggtcctgtcccaggttcccgagtggctccctgttttgtcccagctgaacccttagctgaagttgccccaaaagtggtggtaggggagtttcccacttgggagttccctgcgatggggccagtggagaattccagggaaagaatcactaaatgccaaggcgatcagatcagagcatgtatyaggggaacctgttgacagagtgcggcatcctcaggtgaccagtgagagaagggcgtgttcactggtcatgcctgaagccgggggggatctgggttcagggctggggctagtttctttcaatgttttgaaacctgaacattatgttaacaacctaaacatcttacaagtgtctgggaatgttcaaaccctggcttgggtttgagcctaagggcaacctcgctggccaagtcagagaggtcagggcagtctgtttctttctcagtcaggacaagacaaagtgtggggacctggggaccctgcactcctccaaagtgagtgcctcctttcggctcagagaccttgctgctgaccaccacaggacacagaaatggcaaagaccagatgtggggacggcaggatggctgcctctcccctgatgaggttccttcagttctagcttaacatttgttcttccatgatcaccagaagactcctcagggtctcacagcggcagtctcctattttgacacaggttttgggcatttctgagatcccagtgtggtgccccttccccacacccccaaggctgcagtttatctccttctcagcctgggccaggcactgagtccagcactgagcagggcagagcctgtggcttcctcgggctccctgccctaggctggcacagtgggtgtggggtgtccccagtgccttggctgccctgatgccatctctagagctgagtgcccaggtcctgatctcttttttgatcctagttcccctttcctaggcgcccccaaagtgtcccctcctgctgtgacttctagccaagaagacatttctcccatggccaagtgatctctgatagatcctgtaggaccactgaagtcagacaggacaagttgagtcagggcctgtgtgtccagtgcgcagcatgcttggggagtgacacagatgatgatgatcttgtcacaggccggtgtctcaggcacagatgctgagacaggtcgaggtacaggatgcacactgggggtcggcaccaggaaggcagggaggacgggagaggagaggtcgactcaggcagcaggatccrcagagctgtggttggcccagcagggagccctggaggagaactggctatgctgtgccatgtggggccaggctggccrggacttcacaccatggcctggtgggtccccagtgtgggctgccctgggcaggtgtgacctggcagtgtggctctttgcagccaaagtgggtcccacagaaaccaaaatgagaccatctgctggtgcagtgttctccaacatgaagcaagaatacagtggggccagagatgcctgcactggccacagctgcagccctatgtggacccacacttccacgttggagaggggttcctccaaggtcctgagggcctctcttaaggcgaaactggaagagggagacttaagggggccactgtagcccatccttgctgctggtcttggggctgcacagcccttccttgagtgccctcccaattcactaccacttctgctggggtgcgacttcctggcagtctgagcccttctccagacaccaccgtggtggggccagtggctccctgggtccccagctgtgggacagctgtgggatggcagccccatctcctgcccaccagggtctcctagacatgaggtgcaagtcatgcccatgaggcagctgtggctcgtcattcagcgtgtctgctgagtatgtgctgctctagtggccgggacccctgaccctgctgagctcagagctgggaggatcagctgcagggacccccctaggtcactgggagggaccggaagggaggcccctgctcccaccctggttcctgtatcctgcatccttgtgcagagccagcaccacagaaaggggcgtcattgcgaattggcctcgtcctggggctggaccctgggttggtgtccacatgtgtggcatgtgccaggacctcagctcctgggttctttgctgtaacactagtctctcaggctggctggcactttgcagttggggagctcccattgctgctggggagaaaaactcagacccacagtccctctgactgctccactggggtcagctggccagccaggagccacgctkggacacctccctcttccccctccttgtggggcaccccacaatgaccactgctgtgacgcctccactggggcgtggggctctgggtcctgcccgcactcagccctgaggtgtcgctcccgtccactgcggccctgctgggctgtgcaccttgtgcctggtaggtgtgatgggtggctctggccacgtggtcccatggtccaggacccggttgcacatgaaccttctgccaccctgctcagaagccccaggagccacgtggagattctctcactgggcttgctgcagcctccacagagccgcccctcctgccacagaggtctccaccttagggtccgcctgctcccttgtgtcagcagcagacagccggcacactgcagggtcccttgaggggttggcggcctctgtgtgggacctgtctgtaggccagagaagttcctgggggtgggggggcctcgctacctgcagaaccctggagggcgcctggccttgggcctcctctccactgtgggaagttcctgggggtgggggggcctggccttgggcctcctcctttccactgtgggaagtgcaggtgcacaggcttctctcctctgtgggaagtgcaggtgcacaagcttgtctggcactgggatggggttgtctggtactccctgctcagacaccctaaggatttcggagagttgggctgtgcctcctggcttctcatgctctcgggtgtgtgtgtcttaacacactgaccaccagcttgtcctacctggtcagcatccagttctaggtctctgggcactcatgcctggacaggagagctggcacagcctggaggcaaagtggcaaatgtgagctgttgtctgctccacgtggacgcggagtttgctgtgtttttttctgattgagatagaggtgcactcatctggtccagggctcagcacttgtacctgaggctgcaggggctgtgccctgtcttgcccaggagtgttgccagcgagcccaggactgaccagcccaggctgcagaggtctgagctcagtgactctggccctgtcctggcagggaaggctcgcttcgtagatggygctggtcagtcttatccgcatggccacactccctccctgtgcgaggtgctggcacagagccccacaggtgcactccctcaacgggccaggctgtggtctaggttcctccagcccccaaaccctatcttttttttgagacagggtctctcattctcacccaggctggagtgcagtggtgtgatcagagctcactacagcctcaacctcccaggctcaagccatcctcccacctcagcctcccgagtagctaggactgcaggcgcacattaccataagcttttgtacagacggagtctcactgtgttgcccaggttggccgtgaagtgggctcaggtgatcctcctgcttctgcctcccaaagtgttgggataataagtgtgagccaccacgcctggcccaatccctgtctttcacctttggccaccatcaggccaaaggttgccggcaggttctcaggagcagcgtctggggacacctccaccagatctccccgcaaccccagaatgcatcccagaagggtcttgcagttgggggctgccctcttgccccttcctcatgtgagcccctcactgtggccatgacacaggcctggctctgctggcccttggcagggtggggactgagccccaactcctggtgcttcctcccagtattatgcggagtgtcacggcgtcatctacgtcattgactccaccgacraggagaggctggctgagtccaagcaggcgtttggtgagtgcggcctggctgctctgggagggatggatggtgagtgggggcaggtccagcttgggcagctctgtgcctggggcaggctcagtgtctggtcagaagtgctcctgcctagtgggtgacggggggggggggggcagagggagtggctgtcacagtgtccacgcctgtgggcccctgggcagtcagaggcaggatgctgggtgtgaggcgctgcctctcctgccctccccagagaaggtggtgaccagcgaggcgctgtgcggtgtccccgtcttggtgctggccaacragcaggatgtggaggtgagccccacccctgcctcccgcagcagcttcccgagtccccagcctcccccacagcaaggggagyaggtgtgcacccagacaccccaggcccagtgactgcccagggggtacagagccattctcaaggcctgccctgcccccagcagcttcccaagcytggttcctctccagacctgctgctgccagccctggaggttctcccacctcagggcaggcgcccagaggcctcttcctgctatgcagggcacctctccccaggagggcggccgtgtctcaggagtgtgtggccaagctgtggggacacccaggtgaaactcagagctcaaagaagtgatgctggggccctggtgggagtcagctctgacccttacctgttcctgctacccttggaggtggcatctgtgccagccccacccccagggcagcccctcaagacccctctgaggtgccactgcccccgggagcactggccacgctgagttctagctgttctcttggagtggctttgcacagaagcagcccggcgtccagagggccrggtgaatcttcacttcctgccttctctggggtggctctgttgcccccagcctgtaaggctggcctcccctacaatctcagccgacaagagggacatctggtacggggcaggggtctcccctcggaggaaaaggggaggggagggctgctttttgaagactgggcaggtggttgtgagcagaagccaccatgactgcagactgccyccatcactgatgcagggctcccacctctccatcatccccggctgtgtgggcccctgggacctgcctccgccactgcccaggaggcctcagtcctcagcgccccacctcggggctcagggtgtcccccagggaggggatggggggtggactccttggagccgtgtggacgtctagtttgtctcaggcactaccagccatgttcagcctcgggctgagcacagggtcctcactgctgtggtctctgtgggagacactgggaccctggtggagctctggctgtttccctggggtgaagggcatacgcccttctgagagtcccgggcccacaggcaggacagggccagacgtgggggctgctcctcacggccttacctcccccagacgtgcctctcaatccctgacatcaagacrgccttcagcgactgcaccagcaagatcggcaggcgmgattgcctgacccaggcctgctcggccctcacagggtgagtgggggctgcacctgygggggctttggggaccgagaccccccgcctcacacccgctgtcttcacagcaaaggggtgcgcgagggcatcgagtggatggtgaagtgtgtcgtgcggaatgtgcaccggccgccgcggcagagggacatcacgtaggcgcagccgcgctgccgtcgggacggctggtcccctggtgctggaggagtggcctcctgttggctcccatgctgctgatctggggggtgggtttgctttgctttggggttcttctatttactttgttttctcgaagacaaactttcctctatgtctggaaaagcgtaggcatccggaggctttggaggggagtctggcagcccggctggcccaggccctgcagcggcagcctttccacagggcgcagcggcggcctttcgaggccctttctggggggtctgagggagacctggttgggaattggggctccagtgctcaggctggcttgggctgcatgaggacagccctgtgggaccctcgggagaccccgtggctgtctccgccccatcgaggaggaggcccgtcagccatggctgccatctggcttctgccctcgtgaccccgtgaccccggaagtggtctggggctgatcttgccttgaggaagacccaggccatgttcccaaaggccagcgggggccctggattgtgatgcagcctcgggacagggctgaggcctgcgggggaagacctataccccacgcctgggcctggcttcacctcaccctaatcccccgggagggagctgactgatgcaaaaagctgagggggcctgctgggagtggctgtttttatgccccagccccgcaagttggggagtgtttgtgggggtccagagccctcccccagccaggagagaacctcccggaggggttctctgtggggccctgtgtcccctgctcgggagtaaggctggtcctggggtcctccctgcacggaccccactgggcctgccgagtgctgtgttcttcctcagtctggctgtgggcaggagcggcctgcccagtgtcacccagggtgagtgcaaaataaagacggcgagtgtggctctgtccatcccttccctcctggagggtggaggctcctggctgttggacacggtgatggtgttactgggctgctcaggggctggtgggcaggtgaggggctccccaggtgggcctggagagtccaggcactcccttcctgcggatgtgggaaggacatggggtcctgggaggagctgctgggaaggggcatgagtcagggtgggggtggcgcagcagctgcggggctgtgactcacaggagtcgggccctggaagtccccgcgtcctctccaggggaccctgtgtgtgttctgcaggttggttcccaggacctgggggggacctccagccccgggaacctggccgtgctggggaggcgagtggctggtgcagcccccyggttgctctgggtgcatcgggaggcttcagagcctgccccagagrgggagaagcttcacttcccggraagcatgggaggcctggaggaggtctttggcaggtcccctctcgggaaatcccctgtgagttgggagtgggaggaattcataagtggggggttagtgtgggccccggcgactagggctggcctgagccccatcctgttcttccagcaatgataccctcccaggccctgaccctcgctgagcttcaggggcccctgccacgtgccacagccactgggggcagaggtggcactccccactgatcctcccagggagggtctgtctgaggtaggggaagccccgggcagcagttctgatggcaggcagcctgagggatctgggcacagcgggcggctcaggtgtccccggctgccctcccagtagctgtgcaactacaaccagttttatgaaaaagctttataaaaataagctttaagaaacctcatttcttctatttaaaaaaaagcctctttcagtgcaagtggggtgccaaggatgtagaataaataagagggggccaggatcagtgcacagggaggaagcgctcacggacgctccgctccagcccgggcatcctggccacgcgcagcgcctgcagcagccgcaccagcagcgccccgtcctgcgcccccaggagctccgtgagccgccgacgcagcttcagctgcaaggccgcgcggcccgcccttggtgtcggaccccagccctccggggcctcgagggcctgcagcagccgctgcagcctcttgatggagatgtcctggaaagccacaaagtcgatgacggcacgctcacactcctcagctcctgcagtggggtggggaggcagcggtccgatcatttcacccacacacactggcgggggctgccaggtaccctgctttctgggccccactcggggggtttgcaggagagagaaatccctgtgcagtgagccgtgctggagagggcagtgcaacgatggggactggagaaggggcaggagccttcggtcagagagctggagcaaaggcctagggggcaggagyggccactcggaccttggctgcaagaggcaagggggcccaggcaagggcttggggctcctgggccatcggaaggggcgagttgggacctgcagatggaccggacctgacttgatgttaagggggtcacttccccctgtgacttctcaacagtggttaacattgggcctcggtttccccatgtcagaggaggcagccaccttcctctcaggcagttaggagagttaccatcaggcctcggtttcyccgtgtcagaggagccagccaccttcccctcgggcagttaggagattgctgcccactttcccagagctcyccaggggaggctgtgccctggctcagatccaaattctcagccacccctgagagggcagacttggtggggatctagtggagggacccctgacccctcaaatccactgtggccccttcccagagccagctggcatgcctcaggctagatgcacgtgcaggggcaggagtgagggcacaagtgggcctggcctgcagtgtgctgccccctcaggcctctggctcacctggtaccctggtgctgagggggaagccagtgcagctggtgcacagsgtgtcatgggaggaagagcctggcacattgagggccaggcccagggccgtgcagttgcggtggggctggcactgctctgagctggarctgctggctgagaaggtgcctggggggcacggctggcactgcgtgttctggctgggggtgcctgcagccaggagggaagaacagggtcaggggaactggtgtcctagctcagggtgcaaggctgggaccagcaacctgacccctgccacacctccggccaccactcctgggggcccctcccctcgcccagctctcacccggggcaatcacgccggcaccaggtggacacgatgcgtgctccaagcagaaaccagcgtgcgcgaagaagccggtgcggcagcggcaggcrcggttgtgggtggcgtggcaagcccgtgcctcctcctcacgctccccgcagaggacgttgcagtagcggcagcgctcyaggtagttccagaactgcgtgtagtggcgcggtggacacgggccacacgtcgtggggctgtctcggcggcacggccgctgcacaaaggtgcctggggggcactgggcrcacaccagccgctcccctgtctctgcgtcccgccaggggtaggtgggtgtttctgccactccgcgtacagccggcaccggcagcagggcaggcagcgccaacaccaggcacagcagcgacaggcctggcccctccagcgccctcatggtccttgctggagcagggagagcgcggctcagcgcggacacaggaccctgctgtgcctgaccgacatgccacctcctttgcccccggtccgcctgcggaggggccgcccaagtccagaagcccatcctgctgctgccctacatatatgggcggggagagggctgggccagcctcgccacgccccataggaacccctccctccccaggcagcccccctcacccacctggtaccatccctccccagagctcagtccaagggtggttctgggaggggcctcaccagccagggagctgccctcctcagcacctggggcagctcccaacccagagaccagcccaggcagcctggtgtgtcggtggatcccctaccaactgcagcttggctgcggctgtgaggatgagggcagggctgagcccaccgtggaggaagtacagtgtcacatggcaggctgggaggggcctctgccaactccctgtccctcaactcccaccaccaagcccaggccacgaagacaccgtcctgggcactgccagcagytttattagagagccctgtcccctgattaaaagtggacacgtgcccacgggggtctcctccttcccggtgaggggctcagctggggtgcccctgtggcaccactcacaggccaggagccagggaagttctggggaagcactttcccagaaacccaccccagaccccaaggtagctcagggcttctcagaggcaggcccagatccggtcccaccgcagggaccaaccatgggccccgcctgcctgaggcctgcagcgggccaagccggctggcatgggctggcctattctgttgggtgggttcttggcccaccagagctggacaggcaggtgatcaagccacgttgggtgtgctgggggcctccgtgggcactcactggggctcyggccagaagacctgcatgacgctctgcttcctggaggcggtgtggcaggctgggcacatcctagaggcctgtgagacaaccggcccactgcacacgtctgccaggcgttgccaccaggacaagggcctgccctttccccctcagcccatcacctggggctacacccagcaggaactgtagtggccaggcaccaacctgaaggtgccgttgccagcaggcttggcagcgctggaagtcacaggcagggcactggaagggcaccacgtcctctgccccacagccctggcacacacagcctgctgagaggggcccgcccggagctcccgtggcctgctgcccagcgatgtctctcccatgaggctcaccccactcagatgctgcaggcccgtggggaggtcctgaggactggctgggacctgcatcctcaccgcccgcccccacagtccctgctggcctctgtctaaggaaggacgagatcttgctctgggtcttcccggtcttctcggaccgtgaggggcctggagacagagacttgastctgaggggggcctggggctttgctgctcactcccagggctgcgtgcggttggggcgctgccaggagcagccaggcaggtgcmctacctggttggggagccctgtgggtaagcacaggaggcacggcaagcctctcctcctggggtcccggtggctccatgccygggtagggccggccggtcaggtctgtgcacgtctgtgagaagcgctgcttgtggtgtggacgcacaaacatgctgaaccctgcggggagcttcaatcagacccggcacagcccccattttgtcccctgccccccaccccaccggctgttccccacgccagggccacttgctgtgcagcagggggaagtcctctggctttgcagtggtcagggcggccaacacagccagcaccttgtcgaggtcgtcgtcttgcttataggctgtcagcgctgccaagagttggctacagcccgcggaccccagggccctgcgggcatcagccaggtaggcgctcacggcgtgctggccctgcttccctgctctgggcactccagacccccactgtggktggctgccagggtctcctggtgtgggagtagcatggctcagagtggcgctggggtggaggactgagagtcccaccgccctgcccgcccttcctccaggaactcctggagagctgctcaggacaactgcggggtgcagaaccgggagcagtccccaccatgagatggctccccacaggggcagccccggccacactcaagagttagcctcgtgaagccactgagggacccaccaagtcgtaggctgcacacggttcaggagtcagctacctgttgggggtggcctgggcgacaggtggggcctgccctggttcaggtgctcttgggggtycagctgctgggctgcagccgtggacacggtcagcttgggatccggcgccgttcttcctgatgaagagatgtagagccacaaagctggtcgrgagcatctggaaagttccctggggtgggggggcagggctggctagggaggccaggcctcacccacctcagaccagggcgggaaaacccaggcaggtacacgcctgggtgctgggggcatcagaggagacaccagcctgctggatgggggctggaacagtggcgggcaggccaaagccccactcaggagctcagagccgtaggctgggtgcaggcatgaggatatcccagtgagtaccaagcccagaagggatctggggtcgtcccaacaggctaggttcccccctgggtgaactaggggaactctgtaggggctgttcattaacacacgaacacagatgcttccgcctctggagacttggactccaccccaaacagaggcagaaacagggaggacaggggtctaggaccctaggaccctggcgtgtgcagttgaccccccaggaccatgcatgggaggcaggggacgtgtggcagttggacagggctgtgcttaggggtcggggctatggcagggacagggctgtgcatggagttgcacagggtctccccaacaagtgatgctgctgctggtggaggtggaggtggtggtggtggtggtggaggtggtggtggtggaggtggaggtggaggtgnnnnnnnnnnnnnnnnnnnnnnnnnnnnnnnnnnnnnnnnnnnnnnnnnnnnnnnnnnnnnnnnnnnnnnnnnnnnnnnnnnnnnnnnnnnnnnnnnnnnnnnnnnnnnnnnnnnnnnnnnnnnnnnnnnnnnnnnnnnnnnnnnnnnnnnnnnnnnnnnnnnnnnnnnnnnnnnnnnnnnnnnnnnnnnnnnnnnnnnnnnnnnnnnnnnnnnnnnnnnnnnnnnnnnnnnnnnnnnnnnnnnnnnnnnnnnnnnnnnnnnnnnnnnnnnnnnnnnnnnnnnnnnnnnnnnnnnnnnnnnnnnnnnnnnnnnnnnnnnnnnnnnnnnnnnnnnnnnnnnnnnnnnnnnnnnnnnnnnnnnnnnnnnnnnnnnnnnnnnnnnnnnnnnnnnnnnnnnnnnnnnnnnnnnnnnnnnnnnnnnnnnnnnnnnnnnnnnnnnnnnnnnnnnnnnnnnnnnnnnnnnnnnnnnnnnnnnnnnnnnnnnnnnnnnnnnnnnnnnnnnnnnnnnnnnnnnnnnnnnnnnnnnnnnnnnnnnnnnnnnnnnnnnnnnnnnnnnnnnnnnnnnnnnnnnnnnnnnnnnnnnnnnnnnnnnnnnnnnnnnnnnnnnnnnnnnnnnnnnnnnnnnnnnnnnnnnnnnnnnnnnnnnnnnnnnnnnnnnnnnnnnnnnnnnnnnnnnnnnnnnnnnnnnnnnnnnnnnnnnnnnnnnnnnnnnnnnnnnnnnnnnnnnnnnnnnnnnnnnnnnnnnnnnnnnnnnnnnnnnnnnnnnnnnnnnnnnnnnnnnnnnnnnnnnnnnnnnnnnnnnnnnnnnnnnnnnnnnnnnnnnnnnnnnnnnnnnnnnnnnnnnnnnnnnnnnnnnnnnnnnnnnnnnnnnnnnnnnnnnnnnnnnnnnnnnnnnnnnnnnnnnnnnnnnnnnnnnnnnnnnnnnnnnnnnnnnnnnnnnnnnnnnnnnnnnnnnnnnnnnnnnnnnnnnnnnnnnnnnnnnnnnnnnnnnnnnnnnnnnnnnnnnnnnnnnnnnnnnnnnnnnnnnnnnnnnnnnnnnnnnnnnnnnnnnnnnnnnnnnnnnnnnnnnnnnnnnnnnnnnnnnnnnnnnnnnnnnnnnnnnnnnnnnnnnnnnnnnnnnnnnnnnnnnnnnnnnnnnnnnnnnnnnnnnnnnnnnnnnnnnnnnnnnnnnnnnnnnnnnnnnnnnnnnnnnnnnnnnnnnnnnnnnnnnnnnnnnnnnnnnnnnnnnnnnnnnnnnnnnnnnnnnnnnnnnnnnnnnnnnnnnnnnnnnnnnnnnnnnnnnnnnnnnnnnnnnnnnnnnnnnnnnnnnnnnnnnnnnnnnnnnnnnnnnnnnnnnnnnnnnnnnnnnnnnnnnnnnnnnnnnnnnnnnnnnnnnnnnnnnnnnnnnnnnnnnnnnnnnnnnnnnnnnnnnnnnnnnnnnnnnnnnnnnnnnnnnnnnnnnnnnnnnnnnnnnnnnnnnnnnnnnnnnnnnnnnnnnnnnnnnnnnnnnnnnnnnnnnnnnnnnnnnnnnnnnnnnnnnnnnnnnnnnnnnnnnnnnnnnnnnnnnnnnnnnnnnnnnnnnnnnnnnnnnnnnnnnnnnnnnnnnnnnnnnnnnnnnnnnnnnnnnnnnnnnnnnnnnnnnnnnnnnnnnnnnnnnnnnnnnnnnnnnnnnnnnnnnnnnnnnnnnnnnnnnnnnnnnnnnnnnnnnnnnnnnnnnnnnnnnnnnnnnnnnnnnnnnnnnnnnnnnnnnnnnnnnnnnnnnnnnnnnnnnnnnnnnnnnnnnnnnnnnnnnnnnnnnnnnnnnnnnnnnnnnnnnnnnnnnnnnnnnnnnnnnnnnnnnnnnnnnnnnnnnnnnnnnnnnnnnnnnnnnnnnnnnnnnnnnnnnnnnnnnnnnnnnnnnnnnnnnnnnnnnnnnnnnnnnnnnnnnnnnnnnnnnnnnnnnnnnnnnnnnnnnnnnnnnnnnnnnnnnnnnnnnnnnnnnnnnnnnnnnnnnnnnnnnnnnnnnnnnnnnnnnnnnnnnnnnnnnnnnnnnnnnnnnnnnnnnnnnnnnnnnnnnnnnnnnnnnnnnnnnnnnnnnnnnnnnnnnnnnnnnnnnnnnnnnnnnnnnnnnnnnnnnnnnnnnnnnnnnnnnnnnnnnnnnnnnnnnnnnnnnnnnnnnnnnnnnnnnnnnnnnnnnnnnnnnnnnnnnnnnnnnnnnnnnnnnnnnnnnnnnnnnnnnnnnnnnnnnnnnnnnnnnnnnnnnnnnnnnnnnnnnnnnnnnnnnnnnnnnnnnnnnnnnnnnnnnnnnnnnnnnnnnnnnnnnnnnnnnnnnnnnnnnnnnnnnnnnnnnnnnnnnnnnnnnnnnnnnnnnnnnnnnnnnnnnnnnnnnnnnnnnnnnnnnnnnnnnnnnnnnnnnnnnnnnnnnnnnnnnnnnnnnnnnnnnnnnnnnnnnnnnnnnnnnnnnnnnnnnnnnnnnnnnnnnnnnnnnnnnnnnnnnnnnnnnnnnnnnnnnnnnnnnnnnnnnnnnnnnnnnnnnnnnnnnnnnnnnnnnnnnnnnnnnnnnnnnnnnnnnnnnnnnnnnnnnnnnnnnnnnnnnnnnnnnnnnnnnnnnnnnnnnnnnnnnnnnnnnnnnnnnnnnnnnnnnnnnnnnnnnnnnnnnnnnnnnnnnnnnnnnnnnnnnnnnnnnnnnnnnnnnnnnnnnnnnnnnnnnnnnnnnnnnnnnnnnnnnnnnnnnnnnnnnnnnnnnnnnnnnnnnnnnnnnnnnnnnnnnnnnnnnnnnnnnnnnnnnnnnnnnnnnnnnnnnnnnnnnnnnnnnnnnnnnnnnnnnnnnnnnnnnnnnnnnnnnnnnnnnnnnnnnnnnnnnnnnnnnnnnnnnnnnnnnnnnnnnnnnnnnnnnnnnnnnnnnnnnnnnnnnnnnnnnnnnnnnnnnnnnnnnnnnnnnnnnnnnnnnnnnnnnnnnnnnnnnnnnnnnnnnnnnnnnnnnnnnnnnnnnnnnnnnnnnnnnnnnnnnnnnnnnnnnnnnnnnnnnnnnnnnnnnnnnnnnnnnnnnnnnnnnnnnnnnnnnnnnnnnnnnnnnnnnnnnnnnnnnnnnnnnnnnnnnnnnnnnnnnnnnnnnnnnnnnnnnnnnnnnnnnnnnnnnnnnnnnnnnnnnnnnnnnnnnnnnnnnnnnnnnnnnnnnnnnnnnnnnnnnnnnnnnnnnnnnnnnnnnnnnnnnnnnnnnnnnnnnnnnnnnnnnnnnnnnnnnnnnnnnnnnnnnnnnnnnnnnnnnnnnnnnnnnnnnnnnnnnnnnnnnnnnnnnnnnnnnnnnnnnnnnnnnnnnnnnnnnnnnnnnnnnnnnnnnnnnnnnnnnnnnnnnnnnnnnnnnnnnnnnnnnnnnnnnnnnnnnnnnnnnnnnnnnnnnnnnnnnnnnnnnnnnnnnnnnnnnnnnnnnnnnnnnnnnnnnnnnnnnnnnnnnnnnnnnnnnnnnnnnnnnnnnnnnnnnnnnnnnnnnnnnnnnnnnnnnnnnnnnnnnnnnnnnnnnnnnnnnnnnnnnnnnnnnnnnnnnnnnnnnnnnnnnnnnnnnnnnnnnnnnnnnnnnnnnnnnnnnnnnnnnnnnnnnnnnnnnnnnnnnnnnnnnnnnnnnnnnnnnnnnnnnnnnnnnnnnnnnnnnnnnnnnnnnnnnnnnnnnnnnnnnnnnnnnnnnnnnnnnnnnnnnnnnnnnnnnnnnnnnnnnnnnnnnnnnnnnnnnnnnnnnnnnnnnnnnnnnnnnnnnnnnnnnnnnnnnnnnnnnnnnnnnnnnnnnnnnnnnnnnnnnnnnnnnnnnnnnnnnnnnnnnnnnnnnnnnnnnnnnnnnnnnnnnnnnnnnnnnnnnnnnnnnnnnnnnnnnnnnnnnnnnnnnnnnnnnnnnnnnnnnnnnnnnnnnnnnnnnnnnnnnnnnnnnnnnnnnnnnnnnnnnnnnnnnnnnnnnnnnnnnnnnnnnnnnnnnnnnnnnnnnnnnnnnnnnnnnnnnnnnnnnnnnnnnnnnnnnnnnnnnnnnnnnnnngtggaggtggtggtggtgctgctggtgctggtggtggaggtggaggcccccatcactcccataggggaacagagaggcggggccaagcagggcccgaggatgcccaccccaagcagcccaggactctggcccacactgccttccacgcaggagtctgagggtcccacctggggccccatttaccagtggggtccaggaccggctgtgcccgctgccttcggggaatgctgtgctcaggccgatagccacagcctcgtcctgtcagctggatacagacctcctcaaactgctgcttatggtggggccgcacaaactggtagaagcctgtagaggaaggggygtctgtccccatctgcccctttttctctagagaacagagaccaccttggacccagatggcccccaccccacacgcrgcggcagcactgccctcagggtgggkggcctctgcaagccagggcaccttggagcaggttgtgcttcttggggtcstcagcaaagagggggccgagacaggcggccagggcggyraagtcatcggaacccttgtagtcctgcagggcctgggtgaaggtggcaaagttggcttggctcaactcctgcttcacggccaccatgaagagcttggccctgtccgtctgtgcaccagccacrggctcctcctgcaggacacaggcccgaggctccatcagggccagcctcatcatctggtccctggggctgcagagccttccttggaacattgagcrttccctgggacagtgactgccgaggtggggctgctgcctgagaaactggctggctggatggacatagggaggggctgcgggaagaaagctgtggggctgggcccgtctgaggtcacacagtgagaggctggcagggaactgagagcagtgaatgggcaaagggtagattggctctgcctcaagccaggggtcctgcatggcccgtctctctcctcctccctcaagccccctgccccacagcggatgcggctgaggctcccaggatggcagcgcacaaggaggggcttccggatgagcagtgcccatctctctacacaccccagaccaacacggaaacgtggaaaccaaggcaggggcggcccaggcactccccacccaggccctcgccagcccaggcccctcagcagccacccacttcctgatggcaccagccctgcctgggcaccacccagttcttcccagaagccaagggacatggacaaaggccgccacacttggggttttccagcaggcagggggcttcctggctccggctataactccgttctttgatccaaggctaggaatgggctgtgtccctcacatgaggcaggtgtgcatccacacttgagggaaatgccagggccaagcccagtgctgcaggccccatgccaaacctgcccaagggtggggcctgattccagctgggactcatgagccccctgcagaagaaaccacacacttgagcccctggccgtcagcatcacagctgccctggacatcagctcctgggggtggattccctggtcccatcgggaccagccgtggctgggggcacccacggctgcgttcccatgcgtgtctatggtggtcggcacaggtgcagggacagctcacgcaccgggtggctgaccagccggatcttcttcctccctcctcgcggttcttctgccggcctcttctcagacaggagggacagggtggagcagctgtgggcctgaggaggacacagctcacaaccacacacagaccccaaccacacactctggggtcccaaagcacctggacgcacagggaagatggtcscaaggagccctgagccaagatggaggtcgggggaggggggcacagcacaccccggtgacagtgccacaacttkgtcctgtccaagtcacaccagcggctcatgaggctcgcaggtggtgacttgtaagagcaggtccagggaagacagtccgaccacagcgaggggctggcaggaaggggacacaggtgcctggtgcctgcacctggagctcactccaggggcctgaagggcagggatgggcaggaagaggggaatggctcccagcaggaagcagggagaaaatttcgggttggcctgaggaattaygggcttctggggcaaaaggccccaaggaagaaggaacctgggttccacccgcagcacattcctggagaaaggccagcctcaagcgcagccagtggcaggggcacccgaccttgagtgcactgagccaagctgacccgccagagaaccaaagtgatgtggggggcacccgcggagggccagggcatgcaccacctgggagccagcagcctgtgggtgaggtggggtggaggacccacagacagccaggcagctgggatcccccgcccgcttgcccgcctgcctgccaggcaggggatttacaggggtgtgtggggaggtgcctgaggccagatgggcgggrtcgggttggcctcagragacagagggtctgtgtccatcccaaggccctggaactgtacctgctcctcgccrgggctccccgcccgctgttcgctgtgctccagggcggccagcagccccctgggcctctgccgggcaggaactggctcctgctcatactccacacacaggctactctcggggtccccggcagctggtgaccctgcargggcacccgagtgcgcagtgaagcccacggggggccccagctggggtccctgcctgtggcaaagcccctcttgggggagagtcccagcacttggggtcctgcctgtgggtgtcctccctgctattggggggagtctcagcctcggggggcatccttgcctggggcgttctctgcctgtaggggagggttgcagcccgtgggggccctgccctaggagggagaggcagcctttggaggtgggaggggaagcgcacaaagccaggtgagtcgcctccgccctgggcgcctggtgctgcccgccccacgccgcccgctccgccacccccacaccgcccacccagcgctgcccgtccgcacctgaggacctctgcttcaggctggggacatgcaggtccagactcttagctttcctggtggagaagaaggggccaggcgacttggcctcgctgacagcatcttctccacgcacactgggtgctgtagcccggggggccggygctggcatctgcagaaccatgggggtgggtggacccatttctggctcctctggggacaacaccctcatcccctccctgggcaggaactcacagttcgctcggcaacacggaagaactgggccacgtctcggatgacatggccaaagttgtcatacaccctgacgtggggacgcacccaggagggcagttgggctcttgcgtcggcaaaggcgaacctggggggtggccatagccctgctgccctgcccacagccgcttcaagggttcagttcaccgaagtgaagaccctcatctgctgcaggggccccaygctgaccccgagtagccggagaggctctggaggagacggggcctcatgtggggaaggagagtccaggggcccagtggggtgtgggcgtgtcccctggcgccgcgcctgccaccggactgcacgcacctgtggtcacagaggaagacagctccgtartcctggcggtgccggatcactcgcccgatggcctggttcacagccctggacgcctgctgcnggtaccactcctgcccagagaggaactgtggggcgaggcggctcggtcacgggggctcccttggccacggggcgggggctcagtcaccagaccgccttaccccagccccaccctgctgtaactcacctggcccccagccccaccctggcccttcatctcatccaggaactgcatcttgaggacaacccgggggtccatgcgtggggggtacgggaggcccgtgacaatcacaccacggccattcgtgtctgagaagtccagcccctcgctggcctaggggacacaccagggagctgcctggggccgtgggggctcctctccctggtgcccacacccagcccagccaccttccccgaggctccgtccccaaccaggggkgggaggaagctccatctgtgggtcaggaccccacttggggtccacagctcccagacgccacctccaactcttgtggccaggaaactcccatcctgcctgcccaggcccagagcaggacasgctcccagcagggccagcagtcgctctcgtgggacccaaggaggggaccgggcagcccccagggcccagagtctgctggggagccataagcacccaccagggaacaggcaaccaggtcagggcagagggccctggagagctcaccttgccccggcagaccgccaggaaggtggcgccggtggacccaggggcggcaacccttgcatagtaagcactgatggtctggaaggaaagttggtgaggctgagcctggagcccccccccagccccttcctcccccatgagggagacccaggtctcatgctccaagatgaaggatcgtcctagccaggaaggccaatcgggttctggaagcttcttcctggcacggatcccaggctgaccccacgcctgctcagtgcttcccagaaaacacggggaaccccagggccagggtggccgactagggctactcagacaggagggccactgttaccacacccacccggtgctgggggctttgtaagataagaggcaacactcagggccaggaaggaaacgcaggagccctgaagaggcagcgggagccgccggagcccatggtcagggccagtggtcagccttggggaagctgtgagaggcaggggaggcacgagggggcagcaggcccagagccccggccaagtgccgacctcggagaagctgcctttgctcctgggctccacaaacagcggcttcagcgcctccatcttcctggccaagtcgcgggcctgtgggaggaagaggcagggacacggcagccctggtcacgccgccgatccgatgagggcaagcaggagctgtgaccactgcctgcttcatgctccagccctgccctcacccaccccgcccagaacacaggggagacgcacccgccagaactccaggctcttctccatgacaggataggaagggaagaagatcaggagcccatagggcaccacgcgggcgatgttgcctggaagtgcaggggccggggtcaaggcaggggcaggatgtctgcagggktccctaccagctcttgggagcaggggtccaggatccaggatgsgcacagctggggcattcagggcactcacccagagccttccccagggaggataagcactcctcggaaaacctagagccggagaggccactgctcaggrcctcaggcctcagtgctcccccacctcccaccccagcagggcccagggacaggccctcaccgtctgtcaaacgcggagctcaactgggctccatcggggcctctggggacgacccccacccagatctggtgcttgtcgatgatgtgtgggttctccaggcagactgggaaagggctgagcgtggccagagggagcagacagtggggaagtgcaccagcacccctttagccctcgaggcccgagacccccagcacccggctcatggggacccccaccacttccaccccgctgatgtcagaggtgtcaccggtgctcaggccctggcaggggtggcccgtacatctgcatctccagagcaaaggaggacaccggggccagcgtgccgctggtaaggatgagggagcggacgccctggcggaccagctcgtgcatgctgtggccgggactgaagcaccagtagctcagcaccttccctgtggggcggggggcggcagagggcacagagtgtgaggacgggactgggggcctgaccacctgcctctctgcccatcaccctctccacccactggcatcaagcaagcgagccgcgggcagccacccaggcccastgtgcagaagtcagaacaaaggaggctgccctgagtgtgagcctgccagcttggggcccctctgggggacagggggtcctgggagtaggaggcagaccccaggcagaggctggggacacctgcagagaggtcagcccactccaaccctaaacttctgcagaaactgtgacatgcggctcagggcaagaagcccaccccgccaagagcacacgggaaggaagcgccggcatcccgacattccacggccgcgtgcagaagacggggtgcgagttcccagctctgcctggaagcaggacacgtgcacaagcctctgagtggcgtcagcagtgaacaagggcgccagctcaaaggaagttcctagaagggcttgaccgactggccacggcggccgtggcctggggaggaggctgagtctggatgccggatgccgggaattcaacacggcacaagcagaacgactctgactgcgattcggagtcagcagggacgaggcacgtttccttcctggggctgagtgtgccctgcaatgggggaacttccccaccccctcctccaggagctcatttcctacaaacgcccagtgcagggagtggctgcttctgagaagtcaagtgacatcagaggtcaatggaacaracagattccaggcccttggaatctgtgcaccggctgcctcaggcacgcactgcctcccgcaaccccaactgcgtgaggggcgccggcctccccccgggatggacgcttcctgctgggagaggccttgctgcaggaccatcaccgagcgggggtcaagccacgccaccctgacgccctcccagcccttcccttccggctcggccaggcagacccaaccacagcaaccgcacaagggctgcttcagccagggccacgtcatgccaccatgggtcggacagcagctgagaaagaatgttccagagagggacgaaccaagcccagaggcaaggccccactggagcacaaggcaggggcagcagctcccgcagctgcagccgtgaagccccaccctggacaccacgcagtgggggtggggccagatacaccccaagaaccacagggctccggacacggagccgagggcacactcacagaccccatccacacagcgtccccggcagcaccgactcgaagacgccacggagcacaggaagccaagaaggcacgtggggcctcggggctgagcgcaccaggggcttcggacaacagggccagccgggcccccttcagatgtgaccctgaggcttggcccggccaggcgctgcgtggaggcagcaggcagagccgtgcctcactgtggaggctctgtgctgacggcctcggcataaacgagcgtgtcccagcagggaggcctggctgggctgtggctctgccaccaccaaccaggtgactctgggcaggtcacggtgccatcaggccatctcctacgtctctcagtaactccaatcttcagagggacagtgaggagaatgctctggattggcctggatatggagaaggtggccaggcccatgggggcaggagatccacggctgggcatgtgcctagcctgtggcatggtggtgccgggcactgcacccrggcgggcggggagcgtgtgggcccaggtctgtacctcgctttctggctgcagtggtgctccaggcatcagaccgctgagccgtcctccggtgaccagcatcaggatggatgtgcacctggaggggacaggaccaggagtgtggaggccccrcccatgtcctgggggcagccccttaccttttaggaccagaagacccccagccccacctgcctcctggaggtggcccccaccttataggactgtaaggcccccagccctgccggggaacaagggctgccctccacctgcctcctggaggtggcmcctaccttataggactgtaaggcccccagccctgctggggaaccagggctgccctcggaggggtccacactgaacacaatctgaaaggcagaggaagtgcagccccgtcaggagcctgaggmcacccgactttctgcagcatcagccgcatacacagaaggtcacaggacacccaggggtcatcggttcaccggcccctgccatcatgcagccccaggccaatggacaggagctggcacctgcctgaccctttctcctccctgcagggacccccggtgagctctgtgttcccccaacataggccatctccatgcactgaaamtgcrgcagcccgaggggcctctcctcccgccaactggcccagccctcctctctgtgcccctgagggccccaaattaatctagaaattcaacatggcctagtgcagtggctcaggcctgtaatcccagcactccgggaggctgagaggagcaaactgcccgaacccaggagttcgagaccagcctggrcaacatggtgcaaccccagggtgttcaccaaaaaaaaaaaaaaaaaaacctagccgggcatggtggcatgtgcctgtggtcccagctacttgggaggttgagctgagaggatcccctgagcccaggaggttgaggctgcagtgagctgtgatggtcccactgcactccagcctgggcaacagagagaccctgactcaaaaaaaaaacaggaattcaacacattctagtcaaaatcacagtaagatttttacaggaagtagacacgctgactccaagatgcactatggaaaaaacgtcagggcaggtttcaaaagaacaagaggccgggcgtggtggctcacacccgtaatcccagcactctgggaggccaaggtgagaggatcacctgaggtcaggagttcgagaccagcctggccaacatggcaaaaccccatttctactaaaaatatcaggctgggcacggtggctcatgcctgtaatcccagcactttgggaggcggatcacgaggtcaggagatcgagaccatcctggctaacacggtgaaacctcgtctctactaaaaatacaaaaaattagccaggcgtggtggcaggtgcctataatcccaggtatttgggaggctgaggcaggagaatggcgtgaacccgggaggcggagcttgcagtgagccgagatcgcgccactgcactccagcctgggcaacaagagcaaaactctgtctcaaaaacaaacaaaaagaaattggttcaggccaacaccaggacttacgacaaaaccacagtgaacaaaaacatgaggaaaagtgtggcaggtgcccagtggagttgggggaagccgagccgctcggtcagmrcacagaaccaccggtgtggcgtgctgggaaaaatcaaggtagagtctgcctttcacacccccacaggtgacgtcagaaggcatggaggcccagacacaaagctccgtcactctacagtgcagtttggagaatacacaagacccggtttagcatcttggtcgggaggcacaagctcagaacaaaaatctgacaacaaggaaacatgtgttcaccaaacctgtcatgaaaatggaaaaaatgaccagcatgagacaaggaaagaatatgtatgtcggcatgggatcctcagaacttagagagagaatatgtatatgggatcctcagaacttagagagagaatatgtatatgggatcctcagaacttasagagagwatatgtatatgggatcctcagaacttacagagaaccctgcaaatcaatgggaaaggaatgatgcctgcactaggagaggagcgcgtgacgaccgttcctggaaaacgagccaaaaacggccagaacaggaacgcaaagcccccaacaggctcagcaatgtggccatgtcagccaagccaccgccgtcagagccccgccgcagacttgagggagttctgctgggaacaccaagaagccggaatcattcacagaaatgcggagaagccgaactagagaacaccggggggcagacaccacggctggaacacagagacttggcaacatgcgtggatttgtgcaggcgtgcgtgcgtgtgtgcgtactctgcatgcatgtgcacgtgcctgggtacgcacagaaggagagagaaatttccttccgttccttccttccttcccagccattttcactgtcaagacagctaaacacagggccttgtgttttaccaaagcatttggcccacggggatggaagtaacagaacaagttcacccccacgctggtggctgccatgagcagggctgagtctgcctcaggaaacagcttccttcgaaaagccttctgctgggcaggcatggaagctcttgcctgtaatcccagcactttgggaggccaaggcgggcagactgcctgagcccaggagtttgagaccagcctgggaaacatggcaagacctcatctctacaaaaaaattttaaaaattagctgagtgcggtggtgcacacctgtgttcacagctcctcgggtggctgaggcaagaggatcacttgggcccaggaggttgaggctgcagtgagctgtgatcaagcccctgcactccagccggggtgacaaagcgagaccctttctcaaaaaaacaccaccacaaatccccctgtgcctcagcccagggcagctccggcctcaggcagagagggatgaggacccagcagtctcacgggggcccaggggcaactggttccccaacacgggccagcactgcccagagtttgcctccagctaagccctgacttccgagcacacggcctgaccctgcctggagttcgcctccagctgagctgtgcatcccacatcctcttcctggggccactggccccactctgcccccagggtcacctgtgactcagggctgcaggcccaacccagcaccagccctatgggcaccgcccacacctgcaggggctcaggagccaacgcgggtgagcactgtgtgcagtccctcatcctccaggcacccgagggctggcagaagctgagtcatccaccagcggctacttagagcagcagccaaaggaaattccaaaccgatggagtgtgcaggattcggttccagagtgtggagtcttctccttaagtgggggcctgggaggccacgttccaggatccggttccagagtgtggagacttctccttaagtgggaggctgggaggccgcgttccaggatccggttccagagtgtggagtcttctccatagctgggggcctgggaggccgcgttccaggattcggttccagagtgtggagtcttctccatagctgggggcctgggaggccgcgttccaggattcggttccagagtgtggagtcttctccatagctgggggcctgggaggccgcgttccaggattcggttccagagtgtggagtcttctccatagctggaagccttggaagccgcattccaggattcagttcgagtgtaggaacctcagaagccacattctaggattcagttccatagtgtggaggagacttctccataagtgggagcctgggaagctgtattccagggagggacaggcccgggccagctcacacctgccctccaggccctgggctgcagggctacctcgcctggccatgtgctggaggtgctttgcagtgacccatcagggacatggaagcaggtccgcctgataggtgcacggcctcctgcttgaagagccaaccacactccatgcgggacagcacagcagcccttggcaggcaggagccacagacagaggggtctgggcctgggatgcccaccgtgcctttggggaggagttgggaggacaaggcagtgctgtccttccagccccagctaccgcacagagaagacacaggctgtggcgtcactggccacagagacggccacagtggagggagggctragcctgggccccaccaccctgtgcccaccccacctggtccctgcccaggtctcgcccccgctcagagctgcgtctgtgaaggagaaggcagtgcctgcttgttccgggatctgcagctccatgcccagcagcatgcacaggccagccatgcatcccagggttcttctgcggcctcccccagctcaagcaccccacaggccagatggacactcatgaagctgtcatagcgctgggcagccctgcctaaccctgccatgatctcgtgtggccagcaggtacagcgtgggcagcacagaggaggcctcacagggctccacacagccacctgtgccttggyttccccagtcagggacttctgagtctgcttctaaaaaagccaccgaggccccggagaggcaacgtgcccagagcacccaaaatggggcgtgccctccacaaaccggacaagcacctctacgccagggaaagcaggtgctgccataggcatggagccagaagcagacctcacatgggacgggcattgcaggacaggacggggccaatgagaagggggccagggtcgcacccccaatcatgggctcccagggacaccccygccgggaacctgcagggtccccatttgtctgtccctggagaagctgttcaggaagccgcgtgtgtccagagctcttcatctgcgtgcagctggggctgctggggctgccagcagtgggtcccccctggcctgagggcccggacagggcaggagcggctccccggcccccactgtcctttgcgtcctccctcaccagcrtcaccctgggcatgtgccaccagacctcgtcctcccccatccctgcaggaggcccagtgtgggtttagggcactggaaaggagccgagagtttgccaatcagaaacaggtggtgtaggggcctttctcccatccccaagtctagaatcagttaactaatacagcaggagaaggcacccgcccggcttccatcagggaaggagatgccacagaggagcaggccccacctggataatgtccgccagcttctgcagtccggccgtgttggtgaacactccagcacctggagggcagcagggcgctgacacccacactgcaggcaggggaggccccgaccccagccccggcccttccagcatgagcccgctcagcccgactgccaagctccatctcctgcccaatggggggcccagggtggagcgcagcatccattcagggcgggcagttcgcctgctcttcccagcagccaggagagaagccaggcagggacagagtctccaagggggtcagtgggacttgaaaagaggctctatggtcgcctaagggttgaagcagcaaaagccaccctccccagcacccgggagcgcagcagaggagagaccccgctgggcccggcgtctcaaaccagagcagcccatggggacaccgcctctgggcaaagcctctggaccccacaactctgagaagcagaactcggggtggtgtggagaagccagaggccccacaagccagctagggccttgggctgctctttctcaaaagcagaataatgggatgaggctgtaggacgaagccgccagctgcagaactgggacaggctctacggcagctggcaagtggcactaacgcctccacgccccgatcagaagatgaggttctgtgggcctgttcctgctgacggccaggtgacggccaggggagcyctgactgccaagatggaggcctgctgcaccccctacgccacatttgcccgcaccaaagaccccgtgccagcactcacgtcctgccaggtgctggatgatctggtccagcgagtccaggatgcagcccttggtctgaaacgtgatctgggcttcagcaaacagctcaaagatgtagctgccgaggagaagaaggcaggctcgagcctggcggggggaccagactgcagctttgggaactgaggagaagrmggcaggctcgggcctgaggggggacgacaytggtcaaagatgtagctgccgagaagaaaacaggctcgagcctggagggggaaatcaggctgcagctttggaactgaaggcaacaactgtggaagtttccttccctcggaaacaaattcagccctccaggggacrccagcattggaggtgagaggcctccgccctcaggagcctccaggtggggagaggaggcctggccagcacgagaacagcaccgaggaaaagaagccgcctcagagcaggggccgccgtcagaggggagggatggggtcactagggggtcgtcaagaggttgtcaggggcttctgggaggcggtggctctgggcagagtccccaaagctttggagagtgacagtgatggggcagcagaagctacaggaggggaccctgagggtgcagggtggccgaggagccaggccagagccttgagcattacgctgaggacagtggctccacctggaagcaactgggattcccccgaccaggtcggcgctcaggcagaacacgctccacctcggcggctgygcgctcaggagagcccccacacaggccccagccctgactcctcatctgcctgcargacagacagcaaaccctgctgccctggctgcggagaagactggagccccacggagcgttcagaacgttccaggcctcccggagtccaaaagaggtggtggctgggacactcatcgtcctaacaagaaggtctcgttctaacaggcacctgtgctcaaatgacggactggaccagggtccagggaaaggcctggaggaggagaaactgcaggaaacccagcggccccgcgtgggagagtgtgctgttccgtgggtgtgtgtgtgctgtctgtgggagtgtgtgtgctgttccgtgggagagtctgctgttccgtgggagtgtgtgccgttccgtgggtgtgtgtgctgttccgtgggagtgtgtgtgctgttccgtgggagagtgtgctgttccgtgggagagtgtgctgttccgtgggagtgtgtgccgttccgtgggtgtgtgtgctgttccgtgggagtgtgtgtgctgttccgtgggtgtgtgtgccgttccgtgggtgtgtgtgctgttccgtgggagtgtgtgtgctgttcgtgggagtgtgtgtgctgttcgtgggagtgtgtgtgctgttccatgggtgtgtgtgccgttccgtggggggctgtgtgctgtcccgtgggagtgtgtgctgctcctctcaacatctcagcaaccagatcatgcaaagcaggygctcctcccaggtctcaaaaagggaaaacaggcctgaaaacaggcctcactcgtgatgtgacagcccaggactgcaccatggcccgtttctagctctaggctgggcctgcagtgaaggggctggctccccgcctctcacctccctggcttggtgacaccrctgtcgtctccaggcagctcaacagcatcgatggccccytccaggcgcagcaggatcactgtgggtcgaggaggtgtcacccacctcctcgcaaggaggaggccccacccagctgcaaggaggcrgggagggcaacacttactcttcagctttgcaatgtcttccagctccatgttcagccctgggcaagagaaaggcagcaaaggcagtctgcatcacgctcgtgccaacaaccccgcccttgagaaccaggattcctggcatggaaaaaaggacaccaacatggraaggaagaggccacacagaatccatgcaggccaaatccaccaacatgggaaggaagaggccacacagaatccgtgcaggccaaatccaccaacaggggaaggaagaggccacacagaatccgtgcaggccaaatccaccaacaggggaaggaagaggccacacagaatccgtgcaggccaaatccaccaacaggggaaggaagaggccacacagaatccgtgcaggccaaatccaccaacaggggaaggaagaggccacacagaatccgtgcaggccaaatccaccaacaggggaaggaagaggccacacagaatccgtgcaggccaaatccaccaacaggcgaaggaagaggctacacaggccaaatccaaactggagacaccaagaggagcaggtgttttatctttatttatctattcatttttgagacagggtgtcactctgtcacccaggcaggggtgcagcagcgccatctctgctcactgcaacctccatgtcccaggttcaagcaattctcgtgtctgtctcccgactagctgggactataggtgtgcgccaccatgcccggctaattttcgcatttttagtagagatggggtttcaccctgttgctcaggctggtcttaaactcctgacctcaggtgatccaccagtcttggtctcccaaagtgctgggattaccgctgagcccttatgcctggccgggtgtttgacctttagaattaacatttgtgaacacacctgtgcgtatggctgtatctccacgaaaacacccagtmacaacgaccaacccagtaaccatgaccaacccgctgccgcayggcgggtcttgaaataccgtcttgcaggaaaagaaagcagggcttcttggagacttggctgattccaggtctggagcaggacatgagtgtgaaaaatcctgactcccagacagcaaagaggccacaaccgccggggtcaggacacaagagcccacagaaaacacctcaaggtgcagcaactgaggtcaggagtgagattcaggagggagcatggggcaggaccaatccccacgttcacacacaaacattcagtgatgacacttgattgactgattgatttttgagacggagtctcgctctgtygccaggctggagtgcaatggtgcgatctcggctcactgcaacctccgcctcctgggttcaagtgattctcctgcctcagcctcccaagtagctgggattacaagcatgcaccaccacacctggctaatttttttgtatttttagtagagacggggtttcaccgtgttggccaggatggtctcaatctctgacctcgtgatccgcctgcctgggcctcccaaagtgctgggatgacaggtgtgagacagcacacccggcccacccccagcatttgtcccacctttcctgtgtgaatgggatcaccacatagctgatatggtgcagggcgtggtcctaagttattcctgctaactgactagatgatggaattagcacactgccatcttgcaagcccccagtgattaacatattcaggtgttcagcagcaacaatgttcacatgggaagaaacgggaaaggagatactgtgagccttctgatagaaaggacgtcccatctggagcccrgcaaacggtggccgcagtctaactggggccctcaagccacctaagttcagagtaaaccggggaactcgtgtggctgcccctcctgtacagattccgactctgcagggtaaacggcctgggctcttcaataaataaagtgtgaggaaaagaatggaccctgccaagcacagtggcacacgcctgtagtcccaggagcttgggaggccgaggcaggaggatcacttgagcccaagaggtggaggcygcaggaggtggaggctgcagtgagccgtgatggcaccaccgctctccagcctgggtgacagagtgagaccccatctccaaaggggtgggggaacagatagggatgaaaactgaagttctggtcctgaatgagatggcagaagcccaccccaccacacgtcccccactagttacaacaaaaagccctgcacatcaagtaactaacaaaactgaagagtggagaaggccccgtggtgatgttcacacaggcctgggggtgggtggatgtttctcccacgttatgtaagcgatgaaatggcagctgccgagatgagggaaggagacctgtcactctccccaccctgcgccaagcgaaggatggaaagaggcggccgtccaccccgttagagaggtggggttgggggactgtggagaggagggaggtggagcgttcaaagtcccaggaaccccttcccccactgcaactccctgcgtggcaatcttgagagccggtggcagtggtgcacacctgtggtcccggcgctttaagacgctgagacgggaagatcccatgagcccaggaggccgaggctacagggaactttgattgtaccaccacattccagcctgggcaacagagtgagaccctgtcacttaaatatatgtatatatatatatatataaagggattctaaagccagaacacctgataacttctgtactaaacaaatgccaactttgcaaactcactctctaccaagcagccatcctggtgagaagggtgaggacggggctccccagggtccagggtccccgtggtgtccgtccacatgtgcgattttaaaggaaaatgggggaagctgatgctgtttacacctggagatgctcacgagcaagtagtgtcacagcagaacctatgaagatattcacacagactcctagtcagctgtttacagaagccatgtagaaaatatggacaaaggccgggcgtggcggctcacgcctgtaatcccagcactttgggaggccgaagcgggtggatcacgtgaggtcaggagttcgagaccagcctggccaacacggagaaaccatctctactaaaaatacaaaattagctgggcgtggtggygcacgcctgtgatcccagctacttgggaggctgaggcaggagaattgcttgaacccaggaggcggaggttgcagtgagccaagatcgcgccattgcactccagcctgggcaacaaaagtgaaactccatctcaaaaaaaaaaaaaagaaagaaaatatagaccaactgacaacatccatgaagggtttccacgttttccacrtatgccgtgactagcgctgtgtggaaatacacctctggacaaacactgggaaggaacctacaggcagagcagctgatgcatgccagatttgtgggtcatttaaagatgcaaaatgcccttacagtgaatatatttagttttccttttttttttttttgagatggcctcactctgccgcccaggctggagtgcagtggagtcatctggggcaccggaagctctgcctcccaggctcaagcacgcctcccacttcggcctccrgaaaagcttggaccacaggagcacaccaccacacctggctaattttttggcaggggcgaggttccgccatgttgcccaggctggtctcaaactcctggcctcaagcgatgctcccaactcagcttcacaaagtagagttttccagttttacacagtagaggccaagttgatactggctgggagaagacataggtctttggaaaataccagaactactgaacaataccagcccttccacaggctacaggaccctgaagaattcacacccaagaagcctctgagagaagcggatgccctgcagtgccagcctgaatagatggtgcccaggccgaccacacacagccacagggcaggctgcccactgcagtagcrygggcctcaggaccaagcagcctggctatgaacgcacctgggctgggggagtccgtgctgaactccgggtggggctcaccctgcagcagcgcaggcctcaggaccaagcagtctggctatgaacgcacctgggctgggggagtccgcgctgaactccgggtggggctcaccctgctgcgctgccttggtctgctcctccagcacctggtctatgacgtccagtcctgaagccaggtcatggggagtcaggtcaaaggatgccgattcttcacacatcttctcctagagcccaagcacaccygaatcaccacagaacaggacaggatcgggggttccagaaagcagaaatggggtgggggtgcagaaggcacaggaggctgacagccaagttcccaaagccttggcctggggtctgtaaaaggccacaagtaggtccaaacatgactgtgtggcccacaccaatatttagaaacgattgtttcaggccgggcgcggtggctcacacctgtaatcccagcactttgggaggccaaggtgggcagatcacttgagctcaggggttcaagaccagcctgggcaacgctgggaaaccccgcctctacaaaaaatacaaaaattagccgggcgtggtggtgtgcacctgtagtcccggctactcgggaggctgaggtgggaggatggcttgagcccaggaggtggaggttgcagtgggccaagatcataccactgaactccagcctggacgacagaaggagaccctgtctcaacaaacaaacaaacaattatttcactggaattgccaattattctttttgattttattttttttgagacggagtcttgctctgtcaccaggctggagtacagtggtgtgatcttggctcattgcaacctctacctcctgggttcgagtgattctcctgcctcagcctcctgagtagctgggactataggcacacgccaccacgcccagctaatttttttgtatttttagtagagacggtgtttcactatgttggccaggatggtcttgatctcttgacctcgtgatccgcccacctcagcctcccaaagtgctgggattataggcatgagctagcgcgcccagtcaacatttttttttttgacacagaatcccgctttgtcacccaggctggaatgcagtggtgtgatcctggctcactgcagcctctgcctccaaggttcaagcgattctcctgcctcagtctcaagccatgtggccggaagggcagagacactgcaggcaagaccacaagcctgctgctgccgagggcagaggagacagccctggcccaggctgaccccgagctggctggagggaaagggtctggtgagcggcctgtgggggccctgcgcctgacgggcaggtccctggsccagctggccagtctccagccccagcagaggcatcggatcagggygggagggggtggcagaagctcctggtgtgctcagtccccagtcctgggcacctagggcttcaggagtttggmsagagcccctccagaaaggtttgcgtggctcttgacaaaaaggccagaagcaataggaggtgtttaggaggccagcggagactcaccacgttgtgagcttcgtcaaagatcacgactgtccccttcaggtcaatgttgtgtgctctgcggctctacaggaggaagagaagggacgcagcgctggagctcacagaggccgggaaagagggaagccaagacatgtgcagcaggcatcgaacatcacaagcgcagatgagmaacagcgcyggcgatgtcgagagcagaggccagacctggatgacctggcaacaccgccccaccctaaccagcagttcgccataccgggagacgctcctccacagcatggaaaggcacgtgccacgctcagcaagacagacggccacgatgccctgggagcccccggccaccgcagtcaggaagccacagaccagaggagccaggaagacccagacccagcagttccctgccccagccccactcagggagatttacaaacccaactcccagccaggcgcggtggctcacgcctgtaatcccagcactttgggaggccgaggcgggcggatcacgaggtcaggagttcaagaccagcctggccaacatggtaaaaccccgtctctactaaaaatacaaaaattagcagggggtggtggtgtgtgcctgtaatcccagctactcagaaggctgaggcaggagaatcgctttcatctgggaggcagaggttaatgtgagccgagattgtgtcactgcactccagcctaggcgacagagtgagacttcatctcaaaaacaaaacaaaacaaaacaaaacccaactcccaggtcccacccacagagtgtcatgggagcaatctggggtggggtccagctttggtacttttaaattttcacacattggccgggcatggtggctcacgcctgcaagcccagcactttcggaggccgaggcaggcggatcacgaggtcaggagatcgagaccagcctggcgaacactgtgaaaccccgtctctactaaaaatacaaaaaaaaaaaaaaaattagccaggcgtggtggcgggcgcctgtagtcccagctactcgggaggctgaggcaggagaatggcgtgaacccaggaggcagagcttgcagtgagtggagatcgcaccactgcactctagcctgggtgacagagcaagaccccgtctcaaaaaaaaaaatttcacacattaagatgttcattttaagtgtactgagttctggcagttatgtgcaccatataaccaccagccccacccctgccttttctattaatagagtgtcacataaatggaataaaacagtaggtccagccgggtgcggtggttcatgcctgcaacctcagcactttgggaggccaaagtgagtggatsacaaggtcaggagtttgggaccagcctggccaacatggcgaactgccgtctctactgaaaatacaaaaattagccgggtgtggtggcgggtgcctgtagtcccagctactyggaaggctgaggcaggagaactgtttgaacccaagaggcggaagctgcagtgagccaagaccacaccactgcactccagcctgcaccacagagcgagactccatttcaaaacaaaaaacaaaaacacaaaaaacagtaggtcctcctcaatgggcctctctgggttagcatgtccgagactcatcggctccctgctgctgtgtgaccacagtccacgcccgtggctgctgttagtgttcgggtaccacggtctgtccattcacctgtggatgggctcacgcgggctgcttcccagttttggcaactgcaaacaaaactctggtaaacctgcacactgaagtcttttcttttttctttttttttttttttgagatggggtctccctatgttgcctaggctggtctcaaactcctgggcttaagcgatcccccagccttggcccctaaagttctgggattacaggcgtgagccactgagcctggccacatatgaatctttgaacacgtcttcccttctcccggctcggctgtttgccacacgtttgtggagtggctacacaacttcacagcgatggatgagatccagctgttccacatcctcatgccacactcagggcttctgaatttcagccatgccagtgggaccacagtgtcggctccccgtggctttaatctgccttctcctatgactggagatgctgggcgactttccatgtgctcaactggtcattccatccaccttggygaaacgtctgtccggatgctctcccagtggttaactggccattccacccatcttggcgaaacgtctgtccggatgctctcccagtggttaactggccattccacccatcttggcgaaacgtctgtccggatgctctcccagtggttaactggccattccacccatcttggcgaaacgtctgtccggatgctctcccagtggttaactggccattccacccatcttggcgaaacgtctgtccggatgctctcccagtggttaactggccattccacccatcttggcgaaacgtctgtccggatgctctcccagtggttaactggccattccacccatcttggcgaaacgtctgtccggatgctctcccagtggttaactggccattccacccatcttggcgaaacgtctgtccggatgctctcccagtggttaactggccattccacccatcttggcgaaacgtctgtccggatgctctcccagtggttaactggccattcyacccatcttggtgaaacgtctgtccagatcccttcccagtggttaagtgggttgtttgcttagttatgggagaattttacatactctggtcaaaggtcctttcaaatcagaggagggctgaaaaaattttttaagtcctttgaaagaagtattttctccctttctttaactgctttttcattttctcaactcttccamagagttgaagctttaaattttggtgaagtctaaattttaatgtttttcttcatggctagtgccttgtgtatccatactaagaaatctctgcctaccccaaagttgcaaagacctcccccatgttcctttctataacttttagtttagcttttacatttaggtttatacagggtaaaacaagagttaagattcactgttttccgaacagatatccagctgttcttagcaccattttttcagaaaaccagaaatcaaccttcatttcctctctcaattaaattggcatgtttgtcaaaaaacaatcaccaagggccaggcatggtggcgcacgcctgtaatcccagctactcgggaggctgatgtgggagaatcgctagaacctaggggcgggggctgcagtgagccgagatggtgccactgcactccaacctgggtgacagagtgagattccaactgaaaaaaaaaacaatgaccacatgcgtgtgggtcagcttgagcttgctgccttctccatggcctgcaggcctgtgcctgagctgggccatctccacctccactcctgcagctttagaggagtcttgaaaccagcgaggtgagtcctccagctctgttcttcttcacggtcatcttgctgttttagatcttctgcgtttccgtgaaagtgttagactcggcttaccagctgtgatataactgtcccagggaggggcctggttgggttagaagctctccagatggttcccaggggcagccagggctcaaagcaccgagtcacccacaaccacggcaaacctcaccagctctctgtggggttctgctacagcttcccaggagtcggccccccagccgcccccactcacctcttcccttgctctgctgcacctgctgaggctcccctcagacccaccagcattccccacctcccgccgacatcgcacttgggcccgcttggctcggtctccgcctcctccctctgctctatttcccttcagtatcrtcagctcacgtgcttactcttttgctgtccacctgtccccaccactagaatcaaagctccatgtgagtgaagccagtcttgctatgcctggaatagcacccagcatgatgagctctcaataaatatacaccccgagaatgagcgaaccaacgacgggatctggaaacgtcaccacgccatcgtcacgtgaacacacaaaccattgacccgtggcgtgtgatcccacctgcactaagtaaaaagtgtggggcacaaaagcagggcacatggggaggagggcagcagggccgggcacacactgggaggaggggagttgagtgtggggccgggcacatgctggcggggggagtgagcgtggggctgggcacacggggcggaagggagtggggctgggcacacactgggaggaggggagtgagtgtcaggccgggcacatgctgtggggggagtgagtgtggggccgggcatgcactgggaagaggggagtgagtgtgaagccgggcacatgctgggagggggagtgagtgtggggccgggcacgcgctgggaagaggggagtcagtgggcttcctgtgttctcggtgcctcccatggcctgacgtgaaggagagaacctgagctgtcaggatcaagagcgggcactggcctatggaccacagcctggaggtctctcctcactcccaccagcctgcccgctcccagactgctcagaaaactgacctgtggcctggggctgctcacaagtgtgtctggccaggttgagcccctgcccagtgacagaggtgagtcctcccacccaggcctgctgatctaaggccctgaagcagcaaaggctcggacagctgttcccaagcccagggacacccctggacatcaggagtcgtcagctacaggactgagcccccaccttggcatccaacaagtaattgtacggcatgaatatgatgtcggcttgctgcttcaggttccgggacaggtagtaagggcacaccctgggaaggagagaggagaagatcctgtgagcaccycatgcaggggacggtgccccgaggccgccatgtcttctgacccggaaggagccctcatcctgcacgtagggcccaggtgggaagctgctgcctgggatggatgggagtccacgtgagtttctgaccaagggatggggagtccatgtgagtttccgaccaagggatggggagtcctcgtgagtttccgaccatgtaaatcgtcgtctctttaaaaactcgatggaaaagtaaaaccaaccctattcctggatagaaacaaacacaacgcagaaccactaagaaaaagcagagctgggccgggcgcggtggctcactcctgtaatcccagcactttgggaggccgaggtgggcggatcacaaggtcagaagatcgagaccatcytggctaacacggtgaaaccccgtctctactaaaaatacagaaaattagccagacgtggtggcgggcacctgtagtcccagctactcgggaggctgaggcaggagaatggcgtgaactcgggaggcggagcttgcagtgagccgagatcgcaccactgcactccagcctgggcgacagagcgagactccgtctcaaaaaaaaaaaaaaaaaaaaaaagagctggccaggcatggggtctcacgcctgtaatcccagcactttgggaggccaaggcaggtggaactctcgagctcaggagactggcctgagcaacagagtgagaccctgtctgtacaaaaaatacaaaaattaaccaggcatggtggtgygtgcctgcagtcccggctacttgggaggctgaggtgggaaaatcgcttgagcctgggaggctgaggctgcagtgagccaagactgtgacactgcactgcagcctgggtagcagagcgagaccctgtttcaaaaaaaagggggagggaggtttccccctcaatataagaagagctttattataacttgaatctctgaagctgtaagaggtagacataggagacatctgctgtcctcaaaagaacaaggccgagctgccagcaccagcatgggaagctatacccacaacgctgagtgaaaacagccaactgcaggacagtctgtgcagacaaaactgcgcgtgcttccgcacagacacaggcctgcagggctccgtccacactccacggtggccaccggggatggctgagggccagggaagagggagacaattttttactctatcttcctcagagctgcttaaactttttcgtactgaatggtggttagtttcataatttaaaaaggaacaaagaaaagtgaagaaatatatccgggcctccacaggtcacaggagagctgggccatggaaggacagtggtcgtggcctcactgaggggtctcacctgtgcttgcttccgctcttgaccaagtcctcaatgtccaggatggggctggccagctcctgctccaggcttttttctgcaggtgtgaggcaggggtaaacacacaccctcagggtccactaagtcccagaccacagggggatgcccaggacagaacggctcctacacggcgggcagggctgggcgtcccccaccaaccgtgaacgcgccacaaagcacccactgagggtctcaggtgcccaagagaggcccccacccgagtgatcctgagggaatcctcctctgcccccagaaggcctgaggttcagggtggaccagacggaggccagcaggatcccgagggttctacgcatcctctccgagacagcccaagacaggacaggagtggcggctacactcagccctcctcagggcagggaagaacagcccctcagcctatygccccaacccacagaggcatctcccacaaacccctgcaggtgcccctgtgattagcaccgtcactcagcttccctgccaaccacaacaggcccagaacttccagctaagggagagccaggttttcctgggctaaacagtggcccactcccctctgcagcatggcagccctggcaaaggacactgcctgtactggcggagaggccccgggcagaaaaggcttcagaagtcagagtctgggggatgtcctgcccctcccttgcctctacagtacaggccccccaaactggaaccacaagaattccttagggagttgcttaaacacagacagaaccagatacctcttctaacaagcaccccagagtcacagggcagccacgtggggcaatggggcctcccccagctcccgactccatcatggctgctttgtgcctgtccccaggaggtgccaggccccccgagggccaggactcagctgcagaggccagaagcgcacacatatgcacacgtgcacatacacacacacacacactcacacacaccagcgatgacccaaccccagatactcccagggatagcagggaaggcaggggaggaaaagcacacccctgggcagcaccatagcaacagaccagccaatcagcaggcactgccgcacagcggcacttgccaaaccttgcctggcggagagctgagggcggggcgaggacaggagctgcgaggggaaggggcacgaggggcggggccgtcccagaggctctgccccaggctgaccccaagcttgctgtccccaaccagagtcctcacaggacgcaggccaggaagggtgccagctctccagctgtctcctcattcgcccaaaatacctgcctcccttcctctcagacccctccaggagctgcagcccactctgaagatgctcaggccggtgcaggtgctgcagacaccccctcacagcctgtccggtggcagacagggtgcgaaggttcacggctaggcaacctcccgccaggtcgggcagtgagagcccaagccaagggggacaggcaggrgctggcctgtgtcttcctggtctgagtccacaggcctggaggaggagacagatgggggccccaatacccagaggcctaacacagacggaagcagcaccaggaggcagtcagaggcctccccaccaggtcccaggcccagcatccccaccaggtaccaggcccagcgtccccaccaggtcccaggcccagcagccaccggggcactgcccttgtccaggaccacggccggccaggcccatgcycagcgttccatgctatcccaaggacccccgctgcatgggactggggacacccagcaggcactcctgtcctggaaatccaggtgaggacctcggaaatgacgcctgcttgagaatttccatcagcacatctgcccaaccccccgtcccagagtcacgtcctgcaggcatcaccgggacgagccggcagctcctgtcagggaacctgggggcacaaaggcagagccccttcttaggaccawcaaaaaggcctggacaaccacacatcaagatgactgagggtccttggtgccaccagaccaaaaaccacagcgaacaagaagcaacacagaggatgtctccagcaacacagcacatgcctccagtaagcgggagcctccctgcaggcccatgttccgcccaccctgtccctccaagggccagggcccagaaacgcctggtagtgggtcatgcgggaccaccyggctcagtctctgccaggggagcgccgccctaaatacaagagcagcttcagggtcctcagtcctggcacactgagcactcagcaaacgtgagtgcagaaagcagcccacaggaccgccgatgccttctgagtgctccggggccacctcacctgaggcttgagccccaactgaggcaggaaacagagggaaccctgatcccacagaagcacagaccgcgccgactgcacagatgccaccctcaggtcacagaaactgtaagggcagccaacgggggtgcaccctgccactgtctctaggaccccgtgatgagccccagaagcccttgacatacccgaggggcagccacgtgggtggagaagcacccccggccctcacaggctgtggccacgtgcagtcacagggcaagctgccccggccggctcctgtcactcacatcccgtctccagaagaggccccaaggcatcccgtgttggacccacaggactcagcctggagtcacactcagggccataattttccgcagcaaggtcagcacaggaaaaagacacacggggcagggtcgcgggaggccagacacggcttccaggacaccctcccaagatggtatgagggccggtcactggagcacctgctgctgggcaagcaacaaagtccccgaagagaaagccggtgttcagcaaaacccctactgtttgcaccagcaggttaggtgcagggagaccctctcatcaggaaatggagggagccttcccaaaatccaaggccccaggcaccagccagaggcagtcttgccggctggctgtctcagaccactgtgtgagctcttccacacagaagtctaacatgggtggccccgagtcagaagacagggcccaggtacatggccgcactggccgccccaccgggcaagcacaaccaggctgtgacaccactgagctccaccctgagaggctgcacacactccaacccgaccctggtcccacccagctgcttgtaccttctacgttgttgtagaaatgacaggagcgacttgccaccttcttacggcacaagtggatctgtgggaggaagggcagagtgcgcagctgaagcacggccaagaaaggaccgaagccagtccccacccccaccaggtcctcccctgcrgtcccccagtgaacttcaaaccctagcccagygggagcgcagcctgggkctctggacacccagcagcactygcctgtcrgacactgagccggagygggagcccaggagcctacctgtagatggttactctcttgtttcttcacctcaggatggatgcacagctgctcccgggagcccagcacacacaccttaggcctggtgggagagagcaccgtgggtcgaggaggagctgtctccaacacccacagcgtggccctgcagcgtgagctgtatggagacacgcaggagcctcggcggtcagaggaagtgagcataactgaaacgtggcccgggcgtaggagggagctagaagacgagcgggggtactggacagagggaggagattcgacagcttccacagcaccctgccactggtccggccacaggaacccgacagaacaccaagactctgctgggctctgacaagcagcagggcctcctcctacttcatgtgcaaagctgcactgggggccagccctgacctactgcacagctgctacaacagcacctgcgaggagctcaggacgcccgcccaaggtcagcacacagatgcaaagctgcttcctcacaagtaatgggcattggaggcagcccrggccgcaccccacccctgggcaccagcgctctgcacacttcgggggagcgtctagaaagaccaccaccctccaccacagcacagcatggggctgtggactcagcaccatgccaagctggttctcttgaggaccccgagacaggtgtaaactcgtctgacccaccggtaggaggtgttccgaagctcrytgatgacctgtgtgagttgcgagtgggtcctggaggcgtaaataatctttgggatgtccgtgtagcaagctgaccagacacaagcaagcacagaagtcacggttctcagacaacgttctcacgtatcaaaggcaggtggcattcggctaactcggccctgcagacagccaagaatctgacaccccagatactggtttatcaaaaatgggtgaagtgggcatctgccgtgccctaattcagcaaaaaagcccaaccctaggtttacacccacgatggcgagaaattatacagcagctaaaaaattctccttgagttctgcttgagagacggcaggagtccccatgggcccaccccaccctcagcgccatcccttgccaaccatccccacaggaggccaggagaggcctgggaactagggtcacctatggggtctccagcagcagcagcagcgttgccccaggatgacaaggcccgatccgggaaaagctctccttgcgccctctcggcaatcttgmgggcagagatgccgtctcggaggtgttctcgccaggccagcgtggtgcacagcaggcacagcgtcttccctgtacccgtagggctctccaggatgccattcaccttctgaayggagttcggagcaagggttacggggaagccaggaagaggcgaggccacacaagctgccctgagacaagcttcggcagccagcgggcagctctttgcagatgcagaggccactgccaggtggcgagagccctgtgggaccgcggagaagtccacaggcaagtcccactcttgccctaaagggcgtgaagcaactcagccgccattagcaaacgatttgcagaacgttacccaaaacacgacactatttttcagcttaaatagtaagatgactaattaggtgtcaagtctcaaaataggaaactgttctgcgtttctggatccaaacatttatgctgtcctatctgacgtcctacatacaagctctcagacgggaacctgagcaggaaactcggggaggggaagggtgtgagccgggtacaagagggcacctcaaggaacccaggagaaggcaacctgcaccactgccacctccctgcacccccgaggttcaaagaccttccaagtgaggctggccaccggctgcccctctaatggaaatgcttcctcctgacccgtgaatatcagctgctcctcagagaggcccccaaggcactcctaagtctgtcaccctcaaggactgtagggaaaagagagatcagactgttactgtgtctatgtagaaagggaagacataacmcactccattttgacctgtaccctgaacaattgctttgccctaagatgctgttaatctgtaactttgccccagccttgagctcacagaaacatgtgttgtatggaatcaaggtttaagggatctagagctgtgcagaacrtgccttgttaacaatatgtttacaggcagtatgcttggtaaaagtcatcgccattctccagtctcgataaaccaggggcacgatgcactgcggaaagccgcagggacctctgccctggaaagccgggtattgcccaaggtttctctccatgtgatagtctgaaatatggcctcgtgggatgggaaagacctgacagtcccccagcccaacacccgtgaagggtctgtgctsaggattagtaaaagaggaaagcctcttgcagtcgagatagaggaaggccactgtctcctgcctgcccctgggaactgaatgtttcggtataaaacccgattgtacatttgttcaattctgagataggagaaaagccgccctgtggcaggaggcgagacatrttggcagcaatgctgctctgttactctttactccaccgagatgtttgggtggagaaaagcataaaactagcctacgtgcacatccaggcatagtaccttcccttgaacttatttgtgacccagattcctttgctcacgttttcttgctgaccttctccccactatcaccttgctgtcctgccgcattcctcttgctgagatagtgaaaatagtaattaatgaatactgaggaaactcagagactggtgccggtgcaggtcctctgtatgctgagcgccggtcccctgggcccacttttctctctatactttgtctctgtgtcttattcattttctcagtctctcgtcccgcctgatgagaaatacccacaggtgtggaggggccggcccccttcaaaggacgatcgtttttacttgtcaatcctctctctgaccccacctggaacaccagccctttttatgacagacgctgcctctggcccggaggggcctggctggaatgggccgggagagggaagcacaccccgtcctggctgaagctccacccacccgcagtcctttcctcggggcctgtgctctacctgctgcagacattccaggaccttggtcatgtactcctgttggcatttgtagggctggaaagggaagtctacggtcacaccattcaggactatcttgggcatatcagcctgttctcagaagggcacagagcgtggctgaggggcaggctattcgggtctgkgcgaaaaaaccactccgaacatcttagggtctcrggcactcctggtaagcgatgcgagcatgtgcactgggacacaacgctgttctcttcgagaatccctatggcacagacctgggaaagacagtaagactctgtttgtagacagcctttgtgggtaccgggctactttcccaggcgtttccatcagtccctcctgcggagagggttggagagcaaccctggtatatcccatctcgaggagctggcggggcgaagatgcgaagtggctgggccttgccttatcctcccgccccacaactccgtccttctctggaaaagacgcycacagtgctgcaagttccgcctgcagtaattccgcgacttccacaagagcgtgagggctgaagaggcaagcggcacccctcccggcctcaccaggcgcaacgtcagagcggagggtctgaacctccggccctgcctctccagccctctgccctcctggctggctggagtccattccccatmcgcccgggtgggcaaccagatgcagccaaagtagcgaaagagcatgccgggatgccaacccgtgcagccctcagcaaatcactcaacttctctaagcctcaatcccgcccgggaactgggactaacagaacagacgcggacacactgaatgtcggcccttccctccagccccggtcaagggctcagccaacgccgcggcgccagcgccacgagcgcaggaaactacaggtcccaaaatgcagcgcggccaatccgccgacccgcggccccgagggcggcttggggcctgccgggagctgtagtttcgaaaaaccgcaacgcgcctacgagccgctcgggtaaaagaaccacttgtagggtcactgcgactcactgctcacttgtctccgcggcgaaccttccagaaccggggtccctcaggaactcaaccgactccagtcgagggccgccacccgtccccagctgtcagccagctcagagttttcgcgggcagaggcgcgcagtcggcgctgagcccactgcacttccgccccccacttccggtccgttgctttgtgctcccggcggaaactgttcccscgcggagggggtccgcctgctcttckgctcctccaggcctacacggcgttttgcgcgttctgtgtccggctccgctggccagtgaacctcacttccatcgcccacaggcagaaatctggggtcccgcccgtctcctcccttgatgtcattcccccaccagggtctgcgttccactaccgcctctctaggccgagccaccaccattgcccggagagctgcacgggcctcctccccagaggcatctttttactgctcgagtgtgagccgaccgctttcctgaaaatttgaaaacggctgcgccttgcccaggacccggctcctgagagccctgaccgccccctctccttcctctcctgcgttccagcttctgctcggctcactgtcccgcagtggtcccggcgggcctccctgagtccccagcacccggcactggctggcagcagggctgactccaagagcgaggcccgcaccgttctgtggggtcagcccagcgtcacggatgtttgtctcaggcggccccagctcccatgccccagaaggccccagaaggccccaggagggagttggcgctgcgtgaccgcgcacggccggcaggcagcacttcttcgtggcttcttcatggctgtgtttaatgtccactgacggcacatgcgaatgccatgcgtgcccacgctcctgggtgtgagatagtgctcggagaagccccagcactcactggcacccagccccatgtgcctgttgtggtgaaggaactgcaggctgcctatctgagactcggcagggagttgaagatgaggagaccagccacacacactcgttgaatgaatgggcaccaagcacaagtttcagtgccccccatacrtgctgatatggttcggctctgtgtctccacccaagtctcacctcgaattgtaatccccacgtgtggagggagggacctggagggaggtggttggatcatgcggtcagtttcctccaggctgttctgacagtgagtgctcaggagacccgatggtttaaaagtggcagtttccccttctctctctctttctcctgccgccatgtacgacctgggaactgggactaacatagacttcaccttctgccatgattcttttttctttgagacagagttttggctttttgcccaggctggagtgcagtggcacaatcttggctcactgcaacctccacctcctgggttcaagtgattctcctgcctcagcctctcaagtagctgggattacaggtgtgcaccactaagcccggctaattttttatatttttagtagagatggagtttgaccgtgttggccaggcaggtcttgaactcctgacctcaggtgatccacccgcctcggcctcccaaagtgctgggattacaggcgtgagccaccgcgcccagccagataagtcctctcattgtccacactttctgggtgagaaagtgaggcacagagcgttgagcagattgcccagagcctgctcaggagccaggagtttaccttttgcagccacacatctcatctcctgagagcagtggccagaaaaggctgtcctgtggactgagctgaagtctgagtcatctgctccttgccagctgctataggagcgtgctggcctggggtggtcaggaactcctgtacccctgccctcttcctctaattgctgacgtacccacagctccagcatacagcaggtgcttgacagatgtctgttgaatgactgagtgtcctgctgagatatagggctccttctaggagccagagttaatttctttctttcttttttttttttgagacagagtcttgctctgtcgcccaggctggaatagagtggtgcgatctcggctccctgcaacctccacctcctgggttcaagcgattctcctgcctcagcctcctgagtagctgggattacaggtgcatgccaccacgcccggctaatttttgtatttttagtagagatggggtttcatcatgttggtcaggctggtcttgaactcctgacctcrtgatctgcccacctcagcctcccaaagtgttaagattacaggtgtgggccaccacgcccagccaagccagagttaatttcaagaatgcagaggtctgataaaagtcacactttatgaaaaacatttttttttttgaggtggagtcttgatattgttgcccaggctggagtgcagtggtgggatctcggctcactgcaacctctgcctcctggattcaagtgattctcctgcttcagcctccaaagtagctgagattacaggcacctgccaccacacctggctaatttttgtatttttagggtagatggggtttcaccatgttggccaggctggtctcaaactcctgacctcaggtgatctgcccacctcggccccccaaagtgttgggattacagttgtgagccactgcacccagtcaaaacatttttttaactagcactaatgtgcatgtgaaaaacatctttgaaatgctcgtgcactttctgcatttgatcttggtgagaagtcaaaatctgctccaagacctggcactatattggggcaaacagtcagtacagctattgtgtgcctgccagcatgctgtcattactcctattgcgtgtgcctgccagtgcactgagagtcagtacacctatggcatgtgcctgctagtgtgctgtcagtacagctgttgtgtatgcctgctagcacgctgacagtcagtatggctgacagtcagtaccccattgcrtgtgcctgcctaggtgctgacagtcagtacccctgttgtgtgttcctgctagtgcacactgtgcacatctactgtgttcctggcactatgccacgggcttccacacacctggtccctgtgctccagatgaggacacagaggctcagagagggcctggccagagtcacaatgagtgtgaggcattgcggtgctctgagcctgactgggtgggtcctaccccacccacatgagaagactctggaggtcccagagagggctacttctcttgatccctagcacctgagctccagcacccggggctggagtctgcctgaaggatgctgaccatccccaactgctactgtggtggccaacagggaggacacagctgctgtggtgggcagctctgtgtgcctctctgcccttcttcctccttcgcagagctggcttcctaggaatggcccaggggccaacacctctgtgtgtatattagtttgatatggcttcatagcaaatcaccacaaaaccaacagcttaaaacaactctcattcattacctcctaattcttagtaacccaaggctgaaaccaagtgggcagttgggctcagttcttgtgtggaggccctggggtcaaacctgcctccaagcccattctcttcttgttggcagaactcacttccttgcagttaaggtcttgttgtcttgctggctgttggctgggagcagttctcagatccttgccacgtggccccctcatctcaacaacagaaaaccttctttggtttgatccctccgatttcttcaaccaggcaaaggaaactgcttttaaagggctcctgtgatgaggtcagggccygcctggtgatcctccagtcttaagggtacctctgggccacacaatgtcacattcctgggcatcacccccaccagactcacagtcccggggatgatgccggcttgcacgtcaggggtcaggactctccaggccaccctaggatgtgactggccttgggtgctcccaccgcactgctagagctgaggcttgcccctggcttttgtgttgctgagccagcctcatggctctgcaagtctcctgaggttttcagggttttgctcctggccctatgacttagttgcttgtagggcaaagcacttttctccctgcctcggtggcttcatccctgcaatggcaaagacgctccgtttgcctaccaggctttccctttgggagttatgaggagagggggaggcaggataggttgccccccactcactaagtgcgcacaaccctggcacccctcctctccatcgtctgggggcatcattgtttcatcttacccctgagaaacaaaggcccagcgaggtcagacgcttgcccttggcctgggccacacagtgagtgaaggtctgagcccaggcgggaaaccacctctttcacggcaaagcctttgttctggcctcactcctccactttcactcttctccgctcagatcctgcccatcccctgggctcacaggagatgccccttggaggcctccaggccagcgcccacccctgtggctgtggcatcctctccgatggcaggcacagacctggaccctgttggcgccagcccagcctacagcggccttggcggcgaagagctctgcggccccaccccatgggtgggacctgctcctccggcattgcccctgccccgcctgccctggggaatgggggctcatctccacccccaccccactctcaggcctcacaaagccaagttggagaagcagctgtcccgctgtgagcggttggagggtggggggtcttgttgcagttcgggtagcccccctcctccgccctctccccctgagagccgcggccccttccgcagccaggcgcttgctcctctctctcttcctccctcccttcctccctccctccttcccccgcccccgcagtctctctctctctctctctccttcccccaaccctccctccctcctccccccgctccttcccccaaccctctctctctctccctctgtctccctccctctctctctcccgccgcgcccgcctcccgcccgccctcgctccctccactcctctcccctcccctccccggcactgcagcaccagccgtctgcagctccggccgccacttgcgcctctccagcctccgcaggcccaaccgccgccagcaccatggccagcaccatttccggtaggctccggggccacgggctttgtggggcggcgggatctgagcagaggcctcgtctggcctcgcctggggcagcggccggcagcggacgccaatttcccttctcctaccctgcgcgttgcaagcctgggcccgacccgcccgaggctggggtctgcggcgccggcggggctggtggggcgctgggctgcgaggcgccgcgccggggagcgctcgggaccgggacgtcgggcgggggcgcctcgcccctgggggagcagcgtgccacgcagggcgcgactgccgcagggtggctcccagacccgggcgtgggctcgcgaccgggtgggcgcgctcgcgatgtgcgggcggggtccctggggcgtccggcgacccgagatctgggtccgccagagccttcgtggggaggcggggagagggtgggaccctctgccaaagccccagccgggaacccggcgctccccgcgccagtgcagcacaggggctggagggggcgctgaaggaggggggcgggccagacacggcggagcccggagtgagggggaccgcgccctccccccacaccgctgcggcctcggggaccaccctttgcgacgcccgcgccacctgctctggccagaaaagccactgccctttgcgccgcggggtctggatgggggaggggcgactgcgatccccaaaccctccggagaccagagggctccgcccctcccgcccctccacctcccgcggggcggacccaccgccttcgaaggtagcgcccaccccggcctcccggcccgtcccgcgcggagctcaggcggaggggcgggcgcaggcccgggcggggggcggattctggacgcaggggagctgccgggcgacctcgggcgcgaggacgctgggcccgcccttcccgaaacgctctgctccgccgcgaggccgcagaacccgcttcgtttttcactcgacgtttgggaggacaggacgaagggccgcacctccttcccatcgccgcccccgttcacgagccgcactccctcccaccttttcttacgcccccgggacaggtcgccgcggtccctctcccgagctgactggttcaactcgggcgccttggcccggggcgcagaactccgcccacccacgcgtgcccgacctgaccccgcccctcaggccccacgggcttggaggctccaggtgacttcagcacctgccaggaggggaccgtgtgtgtcaccggccacacctccccaccctatctgggagtcctgtccatctgcgcttcctccctccgcctcctcctggacacccccggggatactgggggtgggggggctctcagcggaggggactcccctcctgcccctgagggcagcgccgtcctctccagggccgcctcctgcccttcctgacagcctttccctgacggtccctccccatgggctcggttcctggggctgagctgggagggcgagggcatctcggcatctgggcactggctcctcgctcttttgtggcctctgctcacattctccttctgcaacccagagtctgacctcctccagctgtgtggtgttgtccgagctgcctaacctctcaggacctgggtctccttatctgggtagagatgacggtgctggcacctctcctggggcttgttctgaggcctcaatatttcaggaaaggtgcttggccgcttgcctgctaagagatgagtgctcaccgcacgtcaagcagcctgactgtggtagccacatttctgagtttcctgcccagggaaaggcaaatcggctggtggctcctgccatgctgtgctcctggcaccatgagaagcagcctgggtgacagtgacctccatctgcccccggggggagccggcagcagcctccagggccctccaggggtcagaggccactgtggtcccctggcctctcagttctggacagatcccccacctccgcgagctcccaacaggagcctgcagtcaggcccaggctcatgactgggctctcacccggcactctgtgtgatgctgggtggaatgcttgccctctctgagccttcattcctcctctgtagaagtgaggcagatagggtggctcatgcctgtaatcccagcactttgagaggctgaggccggtggataaactgaggtcaagagttcgagactagcctggccaacatggtgaaatcccccctctctgctaaaagtacaaaattagccaggtgtggtgacacactcctgtgatcccagcaatytgggagactgaggcaggataattgcttgacccggggagagggaggttgcagtgagctgagattgtgccattgcactccagcctgggcagcaagagtagaaactctttctaaaaaaaaaaaaaaagaagaaagaagaggaggaagacgaagaagacgaaagagaaggagaaggagagctgataagggcatccacccgggtgggcgggaggggtgggtgtgaggtgtgaccctgggagtgggcaccatccacctgggcggcgggaggggtgggcgtgaggtgtgaccctgggagtgggcaccatccacctggacggcgggaggggtgggcgtgaggtgtgaccctgggagcgggcaccatccacccgggcgggcgggaggggtgggcgtgaggtgtgaccctgggagcgggcaccatccacccgggygggcgtcaggtgtgaccctgggagcgggcaccatccacccgggtgggtgggaggggcgggcgtgaggtgtgaccctgggagtgggcaccatccacctgggcgacgggaggggtgggcgtgaggtgtgaccctgggagtgggcaccatccacctggacggcgggaggggtgggcgtgaggtgtgaccctgggagtgggcaccatccacctggacggcgggaggggtgggcgtgaggtgtgaccctgggagcgggcactactataccctgctgcttgaggccaacctggtgcctttttctgactcctgctcatgaatcatccaaaggccaatccgcatttcctcggtatctaatgtttagtacaaagagaagcagggagacaaaacaagcccagctcactgcgagaattgtttttaactccctgaagtcagtgaargggaaggatggtggggagggggcggtgagaaagaagggagtcaaagagagggaggggccgggcgcgggggctcacgcctgtaatcccagcactgcggggggccrggcgcgggggctcacgcctgtcatcccagcactttgggaggctgaggtgggcagatcaccggaggtcaggagttcaagaccagcctggccaacatggtgaaacctcatctctactaaaaatacagaaaattagctgggcatggtggcatgtgcctgtaattctagctacttgggaggctgaggcaggagaatcacttgaactggggaggcagaggttgcagtgagccgacatcgcgccactgcactccagcctgggtgacagagtgagaccccgtcttaaaaaaaaaaaaaaagtccaggcgcggtggctcacacctgtaatcccagcactttgggaggctgagacgggcggatcacaaggtcaggagatcgagaccatcctggctaacacagtgaaaccccgtctctactaaaaatacaaaaaattagctgggcgtggtggcgggcgcctgtagtcccagytattcgggaggctgaggcaggagaatggcgtgaatccgggaggcggagcttgccgtgagccgagattgtaccactgcactccagcctgggagacagagtgagactccgtctccaaaaaaacaaaaagagagagagagagagggagcaatgccttgaggctctgggaggggcttccctggcaccagctgtgtctgtggagaggtggcctggatgggtctgggcctcggcatcctctctctgtaataagaggcagtagacatgctctttaagcctcaccagctctgaaaatactggtccaatgccctgcctcgcccctgaccagccctgccctgtgcgcagacttccccttgcttgctctctccagagttggccaattcctgacctgctgtcctgccccctccaatctgcccttcctccctgtagccagaccacagggcaggcctcactcccaggctccgtcctgtgggtacctggtcccacttgctccttgagggacagtctcttgggatagaagctcctcatgggccaccagctgggagaagccaagccagggggtctccgtggccatcagatgctgagccgcacctgtgtctgcagctgcagaacccagttcctcacctctcagttggacacgtgtctcctgggcagagccaagacctgtgagaggtctgacctgcgtccccaccgtgccccttctttcctgatgatgcaggtgctcacacctgcccccaaattgctgccagccgtctgcttgctgaggtgaagcaaactggaagagagcctccctggtgtttgtccttcctctgtatgagcctacagatctttttttcggtgaaaatttcaggcttagggcagacaggggctttgagcagctgttaatcacattttctggcctttatggtaaacacattccagtttttgttttttgagacagagtctcgctgtgttgcccaggctggaacgcagtggcacaatctctgctcactacaacttccgccttccaggctcaagtgattctcctgcctcagcctcctgagtagctggggcaacaggcatgtgccaccacacccagctaatttttatatttttagtagagatggggtttcaccatgttgcctaggctggtctcaaactcttgttctcaagcgatcctcctgcctcagcctcccaaagttctgggattacaggcgtgagccactgcgcccggccacattcagagttttggatgtgtgataaggaaggatgagctgaagggtaggggcctggagtctgctgatagggagctggttgctggcagagtcaggcctggaggggccaagtccctaccttcttatcctctcaggacccaggtacgttctgccccagcccaaactccctcttgctctctccctcccccgtcctcctgagcacagggttggccacctcttcagctcctctaaatgtccccaatgtctcctgacctgctgctgtggaacacatggctggcacaccctctaactccctcatcacatcctcttgtttaacattaatttttaataggctaggtactgtggcttacacctataatcctagtgctttgggaggctgaggtgggagggtctcttgaggccgggagttcaagatcagcctggacaagacagcaagacctatcactactctctctctctctgtatatatatatgtatatatatatatatatatacatatatatatacacacacacacatatatacgtatatatattaatatatacacacgtgtatatatacgtatatatattaatatatacacgtgtatatatacgtatatatattaatatatacatatatacgtatatatattatatatacacgtgtatatatacgtatatatattatatatatacacgtgtatatatgtatatatattatatatatacacgtgtatatatatgtatataatatatatacacgtgtatatatattatatatatacacgtgtatatatacgtatatatatattatatatatacatgtatatatatatatgtttgtttgtgtttgtttttgagacagagtctcactctgtcacccaggctggagtgcagtggcgtgatctcagctcactgcaacctctgcctcctgggttcaagcgattctcccgtctcagtctcccgagtagctgggactacacgtgcccgccaccatgcctggctaatttttgttatttttagtagagacagggtttcatcatgttggtcaggctggtctcgaactcctgacctcatgatctgcccgccttggcccctcaaagttctgggattacaggcgtgagccaccatgcccggcctccataccactacaaattttttttttttttttgagacgggagtcttgctcccaggctggagtgcagtagctcgatcttggctcacttcaacctccacctcccgggttcaagtgattctcctgcctcagcctcccaagtagctggaattagaggagcccgccaccacgcctggctgatttttatatttgtagtagagacagggtttcgccatgttggccaggttggtcttgaactcctgacctcaggtgatctgcctgcctcagcctcccaaagtgctgggattacaggcatgagccaccacgcccagctatttttttcttttttttaagctggtgtgtaggccgggcgggcgcggtggctcaagaccagcctgaccaacatagtgaaaccctgtctctactaaaaatacaaaaattagccgggtgtggtggcatgtgcgtgtaatccctgctacttgggaggctgaggcaggagaatcgctagaacccaggaggcggaattgcagtgagcagagataaaaaaaaaaagaaaactggtgtgctggcatgcacctgtagtcccagctgctaagatggcaggatccgtcaagcccagaagttcaaggctgcagtgaaccgcacagctgcaccctacactccagcatgggcaacagagcacagtcctgtttctaaaaaataaagtaggccaggcacagtggctcacacctgtaatcccagcactttgggaggtcgaggcgggcggatcacgaggtcaggagatcgagacyatcctggctaatatagtgaaaccccgtctctactaaaaatacaaaaaattagctgggtgtggtggcggtgcctgtggtcccagctactcgggaggctgaggcaggagaatggtgtgaacccaggaggcggagcttgcggtgagccgagatcgcaccackgcactgcagcctgggcaacagtgcaagactccatctcaaaaagaaaaaaagaaaacttgacaagtcagaccaaagtcccctgtgaggytcccccacctggtccccctccatctccctccctgaagacaatgaccaagacaggtagctttgcctcgcttcccggctcaaagtctcattccttcccccaaaggctctcgcacgggcctgcccaccctgggattcctttctgctcctccttacaccctcttgggctctgtgctgctctgtccagaaaagtgtaggtcaccaggaaatttaagtcaggacagaccattctctgcactgtcaccagaagacccagctcaccatgaaaggcttgattacttctgccttgtctgtcttcctttcctttcctttcttcttttcctccctccctccctccttcctttcttcctctctctctttttctttctgttttgagacggagtctcacactgtcacccaggctggagtgcgatggcgcgacctcggctcactgcaacctccgcctcccaggttcaagcgattctcctgcctcagcctcccaagtagctaggattacaggtgcctgccaccacgcctggctaatttttatatttttagtagagatcgggtttcaccatgttggtcaggctggtctcaaactcctgacctcaggtgttccacctgccttggcctcccaaagtgctgggattacagttaaatgagccactgcacccagccaaaaggattatcgagcactagtgagaaaccgggccagcgtgtctgcttaggaatgaggttcgccctgaatagaccaaaagagctaaattattttcactgtgacagcaggcgccttcctcttcccctgacagggcacagggccacaggagcccggcttgcttctggtttgggttgggcagcagggacactggctggtgggcacttgattgacctgaatgggcaagagggctggctgtggtgctgaacggacagcttccctcccttgctccttggtggcatcagtggcccaagcccagccctagatagacagagagcatgtgcctggagagggcctggtttcatctcaaggtgaccacacaatcattgggaaggaaaaaggagggtctgagggcttcatccaggtttacagcccaagaaagtcctgcccacagagggtttgcatctgtgctggtcccgtcatgagtaaatcttgcctgcttgagctggcgaggagtgggaaggaggaggaggggagagagaagtagcgggacagagggaggtaagagtcagaaagacacacagtgacaaggaatcacagaaagatgcactcagggagaaagacagagtcaggggctacccccagagacacagaaagatacaatgacagtgacagagtcagacacacagaaggtaaacagagacccagacaggcaggggtagccactttgtcagtctgggcaggtacctgagactgagtggtttatagacgacaggaacttatttcccatcgctctggaggccagaaagtccaggatcaaggtgccggcagagtcggtgcctggagaggtctcgcctcctggtacatagacgggtggcgtcttctggctgtgtcctcacatgatggaaggtgagggagttctctgaagccccactctggggccacttaggagggctctatcctcatggcctaattccctccgaatgcctcacctccgcacaccggcaccttggggttacgatttcaacacatgagttttgggtaatggaaacattcagaccacagcaggcaggagaaggatggagaaacaagtcagtgtggaagatgagacagacattaatgccgagagagaggaaaagcggggagaggcagagggcgagagagacagarggcaggggacacaccacggagacagtgccgacgtctggaagcgagagagctggagagacgaaggggccggcggtgtggagacacacaagagagcgtgctgggcagctccgtgtctcacagagacatgatagaggcagccatggggagggaaaacgggggcccaggtgggcaggccccagtggtgcttgctcagcccagccttgtgcccacagcctacaaggagaagatgaaggagctgtcggtgctgtcgctcatctgctcctgcttctacacacagccgcaccccaataccgtctaccagtacgggggtgagtgcctggctgccgcctgcccttccctgcggtgcctgcccacctcaccttttcccccggcctccggcagtctctctgaactcccgtcctggctgcctctggagagggaggttctagggggaaggggcccatcctgggggctgaagcctgggattcctgcgggagcagccaccccctctcgcccagccctggggttggatgtgtgctgggagcatcccgctcagcccacgccatgccctggccgggcctctgaagctctactctggtcttgccctgcagacatggaggtgaagcagctggacaagcgggcctcaggccagagcttcgaggtcatcctcaagtccccttctgacctgtccccagagagccctatgctctcctccccacccaagaagaaggacacctccctggaggagctgcaaaagcggctggaggcagccraggagcggaggaaggcaaggagtcctccatcccccaccccccaggagtttcaacggaggcggcccacggggacagggcctgcaagaagcagggtgctcccggacaggcttggtcagtgccttggcctggagcaggaggggctgtggctccctgggcctctttctgagagataagaatgggatggggagaggccgggtgtgktggctcacgcctgtaatcccagaactttgggaagctgaggcaggcagatcacttgaggttggaagttcaagatcagcctggccaacatggtgaaaccccatctgtactaaaaatacaaaattagccaggtgtggtggtgcacacctgtaatcccacctactagggagtctgaggcaggggaattgcttgaacccaagaagtggaggatgcagtgagccgagactgcgccactgcactcctcagcccgggcgacagggtgagactccatttcaaaaaacaaacaagaacaaaaaaagaaagggatggagaggaggaagggttccgaggcggccacctggaaggagcaggagcctctggtgagggtgggaggcacccttgtcagggccagcaggatgctagggggtggtccccagatgggccctggggacgtcgggtggggcatccctctcccagacagggaagctggaggaagggcctcatgtgtgaagaccctgaggcttgctggagggcggaggggccctgggagaggtgggtgtgggctccaggtcccctccctgcagcctcccctcccaccagcccctctgagactgaaacagagataaaartgtccttttgggggtgccaccctggaggccaacgcattgggcaggggaagcggctccgttcccttcccggtgaggccagagaccagggttcacagggctgactagtagggactggcatgtgggtgcgggtcctgctgccccgctctcctcccaggggtcaccagccggcccctcccccagcatccctggggaccctccgctcctgggcacctaattgggagctgggaacccggtgtgtaacaagcagctactctgctcagtgggcggatgtccgaggaagagacaaagctcagagaccgcccacaagtttagggtttcttgctgctggtccttggaggggcagacgcgcagggcagggtgtgcagtggcggcagggtatggcgggggccctgggcgcagccaggaccgcgggacccgcgcgcgaggcagggacgggggcgggggcggcggatcgcgaccccctggccctgccccgaccacaggccggatggcaggcgagggttcccagggcagcgcccgggggtcccggcgcccaccgaggcctgggcaggtggaggcgccaggtgaggcgagcgggcgctgggcgggaggcggagagcagggaggagtccggccgggcagggcccggggttgccgctcacgcgcgcccgccggccccgcacagacgcaggaggcgcaggtgctgaagcagctggcggagcggcgcgagcacgagcgcgaggtgctgcacaaggcgctggaggagaataacaacttcagccgccaggcggaggagaagctcaactacaagatggagctcagcaaggagatccgcgaggcacacctggccgcactgcgcgagcggctgcgcgagaaggtgcgggggcggggccggggcggagctcggagcgggcaggggccggggcggggccggggcgaagctcggagcgggcaggggccggggcgggggcagggctagcagcagtcagggggcggggcactgggcgggggcggggccagggcggagctcggagcgggcaggggccggggcggggccggggcggagctcggagcgggcaggggccggggcgggggcagggctagcagcagkcagggggcggggcactgggcgggggcggggccagggcggagctcggagcgggcaggggccggggcggggccrgggcggagctcggagcgggcaggggccggggcgggggcagggctagcagcaggcagggggcggggcactgggcgggggcggggctagggcggagctcggaggggcgcagagcggggccggggactccgaggcgctgagctggggtgggggtcgggggctcctcccgtgtttactgggcgtccccagcagcgcacgaggcaggtccagagtctggtcctggcgggacagtaactagccgcagtaatagatggctaaattcattatattgaaagtgccctgaaggaagctcggctccggtacgagctagaagcggggcccagccagctcccaggaaacccgtccttggtccctggccttgctctgcgcctccccggtgctcccgccccctcaactcagtcagggtcctgccgaaggccagcccggatgaggccgggcgggtgccagggcgccacggcctgcgcgcctgggggttcccggagtcgccccaagccacccccgccctcaggccctcccgccccctgtcctgcaggagctgcacgcggccgaggtgcgcaggaacaaggagcagcgagargagatgtcgggctaagggcccgggacgggcggcgcccatcctgcgasrgaacacgttcgggttttggttttgtttcgttcacctctgtctagatgcaacttttgttcctcctcccccaccccagcccccagcttcatgcttctcttccgcactcagccgccctgccctgtcctcgtggtgagtcgctgaccacggcttcccctgcaggagccgccgggcgtkagacgcggtccctcggtgcagacaccaggccgggcgcggctgggtcccccgggggccctgtgagagaggtggyggtgaccgtggtaaacccagggcggtggcgtgggatcrcgggtccttacgctgggctgtctggtcagcacgtgcaggtcagggcaggtcctctgagccggcgcccctggccagcaggcgaggctacagtacctgctgtctttccaggrggaaggggctccccrtgagggaggggcracgggggaggsgggtgatggtgcctgggagcctgcgtgtgcagccggwgcttgttgaactggcaggcgggtgggtgggggctgcagctttccttaatgtggttgcacaggggtcctctgagaccaccyggcstgaggtggacaccctgggccttcctggaagcctgcagttgggggcctgccctgagtctgctggggagtgggcattctctgccagggacccatgagcaggctgcatggtctagaggttgtgggcagcatggacagtcccccactcagaagtgcaagagttccaaagagcctctggcccaggcccctccccaccagggctttgcagatgtccttgaaagacccaccctagagccctttggagtgctggcccctcctgtgycctctgccctggtggaagyggcagccacaagtcctcctcagggagccccaagggggattttgtgggaccgctgcccacagatccaggtgttggaagggcagcgggtaaggttcccaagccagccccaacacccttcccacttggcacccagagggggctgtgggtggaggcctgactccaggcctctcctgcccacaccctctgggctgagttccttctttcccttgracgcccagtgctggccttggaggacggtcagctggaggatggcggtgggggaggctgtctttgtaccactgcagcatcccccacttctccacggaagccccatcccaaagctgctgcctggccccttgctgtaaagtgtgaagggggcggctgagttctcttaggacccagagccagggccctcaacttccatcctgcgggaggccttggccgggcactgccagtgtcttccagagycacacccagggaccacgggaggatcctgacccctgcagggctcaggggtcagcagggacccactgccccatctccctctccccaccaagacagccccagaaggagcagccagctgggatgggaacccaaggctgtccacatctggcttttgtgggactcagaaagggaagcagaactgagggctgggatattcctcatggtggcagcgctcatagcgaaagcctactgtaatatgcacccatctcatccacgtagtaaagtgaacttaaaaattcaatcaaatgaacaattaaataaacacctgtgtgtttaagacatggttgaactgtctgtgtgtgtcctgcacctgtggggtcgggggcagctgcgggctccctgtctgggagtgaagatctgctctgtgtgtatctccagactgaagctggttataaatcttattttatcatcattattatgaattgttctattgacaacggtgattttaagatatgagcatgtaaactacacacaagcccactttcctctctggaatccaaggggtgaggtgtcagggtggggggtggcagggcccgctgctgtgggtggggctggcgggggctcccctgccctccctcagggcggagccctcctcaggggcttcctgttgttcaggactctgtggcccgccgctcaggaggaaagggcagggcctacatatgtatgcatctgaggctggagcctctaggctgtgggacttcctgacatgggggcaggtgctacgagacccctggggctgcaccccactgttctgtggactcaccccactcaccccattcacccctgggcagccggttgttcacggtcacaggtctggacccaggatgggggacagagtaataaaaagtaagaagacattctgggctgggcgtggtggctcaggcctgtaatcccagcactttgggaggccgagggaggtggatcacctgaggtcaggagttcaagaccagcctgaccaacatggtgaaaccctgtctctactaaaaatacaaaattggccgggcgcggtggctcatgcctgtaatcccagctactcgggaggctgaggcaggagaatggcgtgaacccaggaggcggagctttcagtgagctgagatcgcgcctctgcactccagcctgggcgacagagcctcgagactccatctcaaaaaaaaaaaaaaaaaattagctgggtgtggtggctcacacctgtaatcccagctacgtggcaggctgaggcaggagaatcgcttgaacctgggaggcggaggttgtagggagctgagatcgtgccattgcactccagtgaaactctctcaaaaataaaaaataaaaaataaaaaataaagatattctgactgatggacatgcctgtcccaccaaacagccacttggggtgcccaggggccccctgttaggagggagatgtgtttgtagtggatgtctagactttctgtgctgagtccatgtcttagaagggtgtctggtccccacaaccccgagagacccagcttcctcctctcccggggcagccctggtggcattcctgggcttgaaggagctcttgctatcacctctcctccagtccagggagcgtgggcaagtcaggacctcggactcagctggggaagacgtagagacaaaagaaatctgcaagggagaagatggcaggagagagaaaagaaagacattgaaagagtttgcaggctgggcgcagtggctcacgcctgtaatcccagcactttgggaggccgaggcgggcggatcacgaggtcaggagatcgagaccatcctggctaacatggtgaaaccccatctctgctaaaaacacaaaaaattagctgggcgtggtggtgtgtgcctgtagtcccagctacttgggaggctgaggcaggagaatggcatgaacccgggaggtggagcttgcagtgagctgagatcgcatcactgcactccagcctggaagacagtgagactccatctcaaaaaaaaaaaaaaaaaaaagaaagagtttgtaggccaggcgtggtggctcatgcctgtaatcccagcactttgggaggctgaggcgggtggatcacgaggtcaggagatcaagaccatcctggctaacatggtgaaaccccgtctctactaaaaatacaaaaaattagccgggtgtggtggcgggcgcctgtagttccagctactcaggaggctgaggcaggaggatggcgtgaacccgggaggtggagcttgcagtgagccgagatagcgccactgcagtccggcctgggcgaaacagcaagactctgtctcaaaaaaaaaaaaacgaaaaaacagagtttgtatatagcatccctgtatcctgggcatacagacacacacatgccacatacaacattgaaagaatttgtatatggcatccctgtaccctgggcatgcatgggcacgcagacacagacaccacacacaaacacacgtgggccttggcctcccgcaagaccaagctgatcgcaggccgggtgctggcaaggcactgagggcagatggagtttatgacagtcaccatgtggagcctctggcatcaagtgggggcggacattccttcacaaactgatcgcacttttcccatgaagaaaaggaaaggcaggctcctcctgggaggccagacagagctgtttagtgacctattgtgtgtgacaagtcaccccttaattaacaacgaacattatctgtcagttcccataagtcaggagtacaaaacctgggggtttctggctcggagtctctcatgatgttgcagtcaggacgttggacgaggtcctggccatctgaaggctgggcaggaggtggggcatcctcttctgagaatgctccctcccgaggctgcaggcaggaggccttcattccttaccacatggacatccaggggctgcctgagtgtccttgaaacatggctctgggggacccaaagccagcgacctgggtgggggtcgctgggtggggggatattgggaggaacccaatgtcctctgggtgtggggaaccatgtaagttctgctgttagaagtgagtcactgagaagactcatgcttaggagggagttgggttccagcttttgaggtgaggaatgtcaaaggatttgtgaacatattttattttcttattttatttatttatttagagatggagtctcgctctgtcgcccaggctagagagcagcggcgcaatcttggctcactgcaccctctgcttcctgggttcaagcgattctcctgcctcagcctcctgagtagctgggattacaggcacgcaccaccacgcctggctaatttttgtatttttagtagagacagggtttccccatgttggctaggctagtagagacggggtttcatcatgttggccaggctggtctcgaactcctgacctcgtgatccgaccgccttggcctcctaaagtgctgggattacaggtgtgggccaccatgcctggccttattttacttttttgagacggagtttcactcttgttgcccaagctagagtgtagcggtgtgatctcagctcactgcaacctccacctcccaggttataagcgattctcctgcctcagtctcccaagtagctgggattacaggcgtgagccacagtgcccggccttgtgaatgtattttattttattttattttttgagacagagtttcgctcttgttgcccaggctggagtgcaatggcatgatctcgactcactgtaacctccacctcctggattcaagcgattctccagcctcggcctcccgagtagctgggattacaggcatgcaccacctggctaattttgtatttttagtagagatggggtttcaccatgttggtgaggctggtcttgaactcctgacctcaggtgatccacccaccttggcctcccaaactgttgggattacagacgtgagctacagtgcccggccagtctgtgaacgtattttaaaaccacatcagacactctgcctagagtgactgctatgatctgaatgtgtcacctccgaagttcacgtgttggaaacttaaccgcagcgcagcagtgttctgctctattaaaagggctcctgggagtgggctctctctgaccacgtgaggacacggtggtcaaggtgccatcgtggaagcagagaccaggccctgacctgatggccccttgctcttggacttcccagcctccaaaactttgaggaaataaatttctgttctgtattaaattacccagtctgtggcattctgttacagcagcacaaaacgggccaagacagtgactgtatgttttggacacagctggtgcttgcttggtgtctggggcagcagtgggtgccccccaaacaggggtgtccagcaaagcaggtggggatacggcacaagtggaggcctgactcaaccagttgctcccccacagcctgctgtgcactcgtgtcgggcaaaggtgcggccatgcagaagtgagcacaggaaaagctggtgccaaccacaagtgcttctccttttgctgaagaaaaacaattttgatgttctgcagttgctcagtttcctgggactgctgtaagaagtaccacaaatgaagcggcttaaaacaacagaaactcagccgggtgcagtggctcatacttgtgatcccagcactttgggaggccgaggcaggagcattgcttgagcccaggagtttgagaccagtctgggcaacatggtgaaaccccatctctacaaaaaatacaaatattagccaggcgtggtggtgctcgtttgcagtcccagctactctggaggctgaggtgggaggatcgcttaagcccaggagttcaagactgtagtgagccatgattgtgccacccagcctgggagacagagcagggccctgtctcaacaaacaacaaacaataaacttgtatttctagtcaccaaaatgttgtgtgtatagcatagtttattatattcaaaacactttcaaatttttttaatcttcataatgtctactctgggaaaaacaggataaacattgttacactaacctttttttctggttgcaaatgtaagacatggtcattgcatcactgcaaaacacaaggacaagaggccaggtgcagcggctcatacctctaatcccagcaaggcctcccacctttgggaggccgaggtgggcgggtcgcctgaggtcacgagtttgagaccagtctgggcaacatggtgaaaccccatctctactaaaaatacaaaaattatctggacgtggtggcgcacacctgtagtccagcgacttgggacgttgaggcaggagaatcgcttgaacctgggaggcggaggttgcagtgagctgagattgaaccactgcactccagcctgggtgacagagcaagaccccatctcaaaaaaaaaaaaaaaaagttatttgttaatatcaccgtcaagctcatcagaaagtactgggaagcctttcacaatggcaaaattcttttttttttcttggcccgggcacaatggcaaaattgttattcttacttcaaagctcaaattttatcactggtaacaaatgctgtcagttgctttccttaaagtgtatgggttttttttttttgttttttttttttttttttttttttgagacggagtctcgctctgtcgcccaggctggagtgcggtggcgcgatctgggctcactgcaagctccgcctcccgggttcacgccattctcctgcctcagcctcccgagtagctgggactacaggcgcgcgccaccacgcccggctaatttttgtatttttagtagagatggggtttcaccgtgttagccaggatggtctcgatctcctgacctcgtgatccgcccgtctcggcctcccaaagtgctgggatgacaggcgtgagccaccgcgcccggccgggtttttgttttttctttcactcccctgacataaaatatttggtatttttctataccagcaaccaattctccaaacgctaactgggtgtccaatataatacaggtaaattctgacactgccttcctggagtgtgtgtcagatcctacaaattacaagggctcaatcctaaccgactgcccacacttcagaccccgggagccagtccagagccacttatatttatgaccactgggctttctaaatcaggggttctcacaacctgctcttcaggttagatgatttactagaatgtctcacagaactcaagaaaatttgtatgtttgtcagttcattataaacgaacagccaagtggaagagatattcagccatccccgttaaagtggaagtagacctgag

SEQ ID NO: 97201 - DNA, 12486 bp, Homo sapiens
gttgcctgggtcgtccccagccccacctccaagcctgctgttacagctcatcaaagagcactgcagggacagtagcgtcaccacctggaccccacctcccaccaccggacgctacagccagagcccacctcccatgtccccatcctgctccagtttgggctgtgcaaatgggagcttgagtgggtcctgggaggtggagattgtgatccccactgaactacatgggggaccctgccacaaccatgtagtggggcccagagccacctgcccccatcctgctgggcactggatcccgggctgcagcgggagcctgtggtggggccgacactccaaagcactggctaccaccgacctggctggagccacggggccacttttgaaaatatccagattctctcccctgggttccttctggtttgaatgctcttcctgctgcgcctcccaggtggcttccttcccactcagctctcagaacaagagaccatccctgcagagaatgcagtcccttcacttcccttctggttttccatgccctccctgtgcacccccctccacccactgctctttaggtacatcctctcccaaatgcagaggatggcattgggcacctactgagtgatcaatacttgtgactggatgggtgcatgagtgactggatgacaaacacctcccaccccgcaaggattgctgggaaggtggggggaggcgtgaatctgcagtggcttcaggcttccaggaggtagaactttctccaggtgacgatgcccaagtgcagatgtggggaacagacaggtggattcatgcaggtgggtggctggaagtgggagacaggaaaggagccgaagagagggcagggcccgaggcgcaggggcagggaggaggtgggagagtatggctatggcgggggccgttctcagatggcagacaccagcatcattacacagtatgatgagaaagtgcaattctcctgactcagccttgtgagtagctggaattacaggcgtgtgcccctacacccagctgatttttgtatttttagtagagatggggtttcaccatattggcccaggctggtctcgaactcctgacctcaagtgatgtacccgccttagcccccaaagtgctgggagtgggccccccgagcttctcaatttccctgagggaccccaaacttctggggcctggtgcaatctcttcctccccttgttcctctgggcctgggggttgtggcggttgctatggttgcccatcctgggctcttccatcacctgtgctgtaccaccaattccctgcactcaatgtctcctactcaaaacacctggagagggtcgggcgctgtggctcacgcctgcaatcccagcactttggctggccaaggaggatcacttgagctcaggagttcaagaccagcctcaacaaagtgagacaaacccccccccccacccatctctacaaaaaatacaaaaactagcctggtgtgatggtggacacctgtagccccagctactcaggaggctgaggtgggagaattgcttgagcccaggaggatgaggctgcagtgagctgagattgtgccactgcattccagcgtgggtgacagagtgagacctctcaaacaaacaaacaaacaaaaaacaaaaaaaacaaaaaacagccctggaggcactaaaccctgactgatacacctcctctctccagaaaggatttttttttttaggtggtttatggagctgctcttggggagcctggagactatctaagaggctgatagggtggcccagataaacacaccagggtgacctgcgggacagagatctgagcagggccagcacctccaccaacccatccaggttgcaacagtgcacagtcacatccccaggaaggggtggccagatccccccgtgctcactgtttgccaatgcttttctctataataagcctttactttcagttctcattatgaaaataatcgatgttccttgcagaaaagcaagcagaagagaataaatattgctctcaactggaactccctgaaacaacctcttggaatattgttgccccgcattgcactgacacaggagcgtgctgggcagcccacgtgattcccttcacaccacttccctggcatggatgtgattccacaatattttaaacattaaagccaatggggatgatgatcactgagtctggctcacaggatggtgggaggtccccaggttggggtgtgccaaaggctctgcccagtgcctggcacagcaaatgcccaggtggctgctgctttccactgagacttgaggctcctgagagttggtggcaaagggctcacccagagctgaagactccagcccattcctgtgcgagggctccaggcaccttggaagcaccgtgggccggggagccaggccaggctggttgtggatccccatgagtccttgtcactgtgtggcccagctggaaagcatggtcaataatgtctgggaattgtgaaaattgtgtgaagtgtctgcacacagtaggtgctcagtaaaggtttgttgagtgcgtaaatgaacaagtgacccgcattcaccgttgcccgtgagttctgactgtgtcctgggccctgggcccctacagcctctaactttgcctcttcaaggagccagggtgggtccagccttcaagactgccagggagggggtgggaggcagggccagggcctcagggccaaggcctggggcagccacttcctcaggagggcaaggagaggggcaggaggacattcacatgctctgagcgcctactgagaaccaggtgccctgtcggtgccttcaggtcggctctcgtttcaccctcgcagtagccatgtgaggcaggcagagtcagcccccattttacagctggggaaactgaggcccagtgaggggacgtttcttttcaaggtcactcgtgggcagatgaggcagtgagatgctcttgggcaggtctgaggccctgtgagccaggctcaggggcgtgtttctgagaagtgagggaatgaatgaatgaattatgaatggatgaatgattccacctgatgccatgctcatgccctgcccacactcctgtcctagagtctggaaggtagctctcagacccttccagagggggccgggcacttggaatggtcacagttccgggcccacgtgcatggaataacttgtttcagcctcacaatcacttacgtcccattttacagatgggaaggcagaggcacggggggttaagacactaacctaggtcacacaggtaagtgacaggaccaggatttgagcccagacctcacacttaacgccctccatgccaggtgctgagatccatgcctgccgaaccctctcattcacccacagatgcccccgggactgtagtcagccccattctcacatgggaacactgaggcccaaagaggcgaagcgtcagcccagcaaggaggaggcagggcaggcggggccgcagctgtctggcccggagccctgagcaacccctccacccactccccctggctggcctgggccttggcagacctcaccccagagctggctccaaaagtgagtcctcctggtgccctacccagagggctccccatttaccctgggctcctcaacaaagatgggactcccaggccctactgagcctctggagctttgaggagtagtgaggggcacccaacccagagtggggagggcccagccctcctgggaggtgtgtggcctcccttggggggagcctcactcccagggaaggctaggagttctgtcccgggaggacaggcctcttcgggggcctcctcccaggttgctcctgcattcatgacaagttcggcccctgtgagttgggggaaattcttcaacagctccctggccagggaggggaccctcaggatcctgaaacacccctcccacctgccagtacccgccaagatgggtccctgatttgctgtgtggccttagaccagtggctgccctctctgggcctcactcccagctgagacctacaggctcagcccctgcccagccctgcctggcacccgctcaatctggctgagctccagagaatggcagggctgggctgtcacatgctgagccacgtgactggcagtggctgggggctccatcccacacagaggacaggggctctgcagtccttcacccccaccctaactatctaatcacgggccaccggtgtgggcatggtccagaagacctcaccgccctcccaggtaggcagggagctggcgggtggggggggccatgatgagcacctcccaggtgccacgttggcccagaggccccggggccaggagctacggaggcccagggcaccagggagatggtagcagcggcaggcccaggaaggggcatagaggaggctcttcctccacacctgtcaccctgtcccctgcctgtccacacccacagcagcttgcacatcatccccacagcacgctggctctgacaggtgtatccggggcgggctgggggcaggcagggacaggcttaggcacagctgcctgtgccgaacttgaggaagatcgggactacaggaaccaccaaggcgacacgtggcatcatgaccacggtcctaagcagagaggcaggcactcctcctgggaggcagaggggacatccgaaacgggtgcagccccagctctggagcaagaagctctgccacacacacgccccatgttcacatcccaccccctctctgcccccacttcctcgtttgtaaaatgttagatctgcagaaagacaggctctatgaatggggcggcccatggggtggtgtggaggaacacggaagcacagggcgctgggagaggagcaggcatgaggtatggtccctaagatggtatttctagactccagccacctttgggtctgacctctttgttttgcagaaggggaaactgagtcttgggtagggtgtagcaagacaagccacagacaaaacacctcagacactggattaaagaaggaagaggtttattcagctgggagcatcagcagacttgcgtcaagagccgagctccctgaaaaagacattcttggcctttttaaaggcttacaactttaaggggtccacgtgaaagggtcgtgataaatcgagcaagctcggggaacgtgaccgggggctgcatgcgtcagctaacagaacagaaagttttgcagtgctttctcatacaatgtctggaatttacagataacacaagtagtttaggtcaggggttgatattattatcacttttttttaactaccagggccaggtggtggcgccaaggtcttctggctatttctcttacttctgtttttttctaactttttgccttctctctttcctcctgtcttgtaaaccaggcaaggtggtaggaggagggcagcaggagtagtagtggtcttattccttaggggaggcattgagggaaggctgggagtggggggtcgagacttccttgctattctgggccataacattccacataatattataatagaatataattaatacaataatagttccccaccccacaccgggattcccagggcccactgccccactcctcctcctcaggctggccctcagctcagtgctcagccctgctgcacagcctctcctcctcctcctcaggctgcccctcagctcggagctcagccctgctgtgtggctctagcctggcgccctctgggcgttgacttcttctctgtggtctgggaggagatgtcgaggcccccgagggaggcggtggtgaaatcttggcttgcagcctccagcccgcccagagccagagtcaggcacgaggctagggcaactccgccccacccctcccccggggactggccctgcgttggacatttcttaacagcagggccaccaggcagagcgggacagccaggaggaagggcagcttggcagagcctcaggtagagtatcccggggaggctggggctgtagtgggccagcagtcgggccagagtccagctcagcaactccgggttacaggcagcccaggcgggcctagccaccggcagctgcactcagaggccactgtgtcctggctgagctcatctgcctgcctgctgggggagaaagcggaaggaggagaggcagatctggggagtggcagcgaggtcccgggcacccccctggccagcaggcacccttccgttgtccgagctgggttgccaccgcctccttttcctgggattcccggacaccctccaagggaaccaagggaacagctctgggtccagctgccccaggaaggactgtgcgccccttccccacaggggtcaagtatcccttccagcaacagccgtttcctgggcaccagcctgcatgcccagtgctgatgcagggatgtggccatgaatgactctgggaaagratcattcttagcaatggactttgtcagggtccaagaaaggagtggccagccagccccgccccgcctgcaggaggcacttctcatcccgggaactgtgccccatcagggagccgaggctgttcagcctctttgtgacccggggctgggttggcccgagccacaaatgaggggatacgctggtccctggctccccaagggaggggctgctgagctttgggaggcctcatgaaaatccagcttaaggccatcaaaagacaaaatgacaacacatttagttatagatcaaattggcttctattcatgattcgtgaatccggacagcctccattctacaaaatggagtgagagctcccaccaggcagtggcagagcagggggttcataaggcagaaaggaggaaacagaaaaataggaaacaccaaaccgcctaataccggatcgctgcagactgcttttttctaagcggactgcttttttctaaggggtaaggcagaggggacctgatgatgccggctcaggtggactggaatctcctgcttcccggagaaactggtctgtggttttgggctctgtctgcttccttaaagcttcggtttgatgatgtggcatttggcatgagtgcctccattttggtttggtctggtctgttggggcctagtacaggagctcagttcaaaatcacagcctctcatcatgtttgtttaatgaagctacactgcaggagatcagaatcggagaccctgcggtattgggcctgtgggtcccctgaagttggcctagtgatccccgccttctggctgccctgatgggggtcccccaggccctctacccaccatgttcagtccctctgtcaccacatccctgtcctcagttgggtctcagggtgatgtccttgtctccccaacacccaccttggatcaaggccccttcaggcccctgccccaggggtctcctccctgagccctcctctggtacatccgtcctccatggatactgagcacttcccggggtcccagtgcttgaattctcccgacagtggtatgggtgccacaggcagtgcccaattttacagatgggaaacgtgaatacaaagaggtcaagcaacctgcccaaggtctccccactcacacatgtggttgctgcagtttaaacccaggtcattgggcccccagaccatgccatgctgggaggatgctcttagaaggcccatggtgtagatgaggaaactgaggcaggaagaatgagagaacgggcagagcctccgtttccctggaatccaacccacttgataggccagggtgtgaacgagcagggagtccctgcccagggacggtccctgctgtgaggttgggggcagcggctcggccagccattcactccctgtgatatgtcagccccgttcctccccactctgttcccggagcctgtgggcacccacagcgagcacccaggctggcatagtgcccagcacatgggcacctgagtattgtttttagaggcccgtggccttgagaggaagtggctggtcctgccctggcccccaggccagaggaaacagccgctatcttcatcaccaaatgatgtggcaactcccccccaccccagaagctgcaggtctgggccaaatgcacctcaacctgtgatggggggccacgccccagagacccttgggcccatcagcccctggacctcagtggctcagccgcaggaggcaagaggcagtctcagaccccacaacctaagcagtgtggggagtggcagcaatagtgaggagggaggccgaggaaatggaatccaaacagcaagagacctcccctcaccggtcacccctcccacagctggcctaccggagtccacccagccttgggtctgccgtccaggccccagcccagtgtcccttcccccaaggacttggctgcccatccccaggggactgtgagggaggtgggagctgaggtggatagccttctgctcttctggatttgggttttccaatgtgaggagctgggtggtatcaggcaagctctggccctctctgagcctcagcctccatctccttcagtggggtgaatagtggtccctcagtgggcggccgtggtggtgaaatgagcgagggcaggcatggggatcacactccttacaacctcacactgtgggatgagtgccgcgggggtgggcttgggggaccccagcccagtgcctgattcaggagttccctattctgtgtgtccacaatggctgcccagcaccctcgggagataacaggcccaggatccccccaatctcaggcagaaggcggccttggcttctccgcttgccagggtcctgccctgggcactccctgggggcctcagtccagagtgagtgacccgtaggggcaatgccagggctggttgccctgtgggagagatgtgtcctgtggccctggtgagttggtttcagcgttgctaggagggttgctggaatgttccctgcagaactccatcccccacagagctcccggcccacagtccaccattcacgttacgtgccttgcatttttgtggtttctgcagagattcttacaaagggtgagagaggcacaggcgtggtttgcctttgaccactggcagaagtctgaaggtgagagtagaatggagaaggacccaggagagtgcggagttgagggagataaatatttgcaggctacttagcaaaacacccagagctgacctttgtcgagtactttctgtgggcacaacagcaaatgttttatgcagcgtgatgtcatttaatcctcacaatgacaccaggtgccattagcatccccatttcacagatgaggaaaccgaggcagagaaggtgagtgatttgcccaaggtcccacaaccagtaagaggcagagcccggagacaggcctgatggtggctcgagaggctcgttcttggctcctgggtctcagtcctgctcccgtgacgagccatcccctatggggaccatggtgcctgtcctgtgtgcgggccactgcccagcttctcccaatcagagcaggaagatggtgggttcagcctggccccacaatcactccagctgagggctggcctggggctcctgaccaggctctcagtagcacactggtccagcagggccatcctgcagaccggagcaggtcccgccctcaaggtggccacttaacaatcacccacagccttgcgctcaccgatgctgggccctgggctcagaaccgactgtgtggtctcatcattagctggcaggtgccatcattacaccggtaacatgagaggcttcaagcactaggtctcaaataagtaggcacagaggggcctgcctcccagtctaatgagggggaaataagggagatgtggacagggttgggaggtgggtagagtgtaaccagacatttatcacatggcacaactcagaacgctggggagcagagtcaaggggccactgtgacagtggatgagggcataatctgggtgggctgcctggaggaagcatcagccaagctgagatctggaggaaagggactcggagagggaaggaggaaagggtcaccacgggtccttggcaccaggccgaggaacgagtgcgtcagagtgctcctccgatgaacttcaagtaaacaggcagggctcgggggaatgtctaggcccctaccctgcctgccagctctggctggcaccagcacggaggcaggaacgccctctcccccgccctgatcctctcccccacagctgtttctgcctcccagcaccacagccccggcagggtgggcagcagggcctccaggaggcccgaggtgttctccccctcttcctgaggaagctgaggcacagggagaagaggctattgcccactggcctggcctccctgggcagtgcccccaggctggggacagaggaagacggagaattctgtgtctggagtgctccaaggtggtggccatggtggcagtgagtcaccccctctactcatcaagctcctgcttacaccattcagactggcaggggtgaggctgccccgcctccaggaggggcatcagggcagggcagaggccatggcttggggttaatttctgtgcggcaggaagaagcatggcgctctgcctgcctgctcaccctcgggggctgtggtggagcagctgtccccaagcccacacccagtcctgcagccgcctccaggtccatggcagaggggagtggtgcgagggtcttcatgtgtgtctgggagtgctcactgttgggtgaaaggggttgcaggcagcctcagtccctgtggggtcatctgagtgggtccctgtgtgtgtataaggtagaggtgtctgcaagcccctgtgggtgcaggcaggtcaggggtgcccagaccctggggcggctgggtggtgcccatgaaggaggggcagccctggccacccagttcatgccaccccatctggcaggatggacccccttggggacacgctgcggcgactgcgggaggccttccacgcggggcgcacgcggccagctgagttccgggctgcgcagctccaaggcctgggccgcttcctgcaagaaaacaagcagcttctgcacgacgcactggcccaggacctgcacaaggtgggctggggttgggggtatgagagggtgcactggggcaggggggcatggagggcagctgggacagcaggggatgaagacacctgcgccctccatgaagcggggctaaaagcagctcctcccctaggccagagccacccttgcacattcatccagtcacttatttctgtattcatgcagcaactatttgctgagcacctactatgtgccaggtactgttctaggctctggggatatagcagagaataaaacacagttcccatgcctacgaagatgaccttctatcggagacaataaaacagcaaataaataattgcacagcaaggccgggcatggtggctcacacctgtagtcccagcactttgggaggccgaggtgggcggatcgcttgaggccaggagttcaagaccatcctggccaacatggcgaaaccccgtctctactaacaatacaaaaattagctggatgtggtggtgggcacctgtaatcccagctactcaggaggctgaggcatgagaatcgcttgaacctgggaggtggaggttgcagtgagccaaggtcacaccactgcactccagcttgggcaacacagtgagactccatctcaaaaataataataaagataataattacacagcatattgggttgaaatatgtgccctggagacacacccagggtgaaggggagagagggggccaggatcagggtgctgttgtatatgtgggggtcagggaaggtttctctgagaagggggctttagagcagagacgtgaagatggaggggaggctccccatggatgctggggagatggcagcgggcacagcacgtgcaaaggccctgaggcaggaggtgctgggtgtttctgcttgaggagcagcaaggaggccagcatagctgtcgggggtgggagaggaagaaacagcaaagatgaggtctggggtatgggccacactatgtagggcctcggaggccgtgaggccttggccttctctctgggtacagcaggcatcatggcctctgtctagaccctgaaggcttggggcctcagcccctcccaatcccagtggcagccaaggcagaaccccaagaaacacacttcccccaacccctcacccatcagggcccatgcacctgcctgcccctgcctcaggacacctgcccctgcctcaggacaccacctgcccctgcctcagcacatctgccccaggggctgcccccggctcctattctctggacaaaatatctcctccctttgccttgaaggctgtagtgttcagaccttcccccagcccattgggctccctggggactgactcccccgccaccactgagcttctgccaccggccgcctgccggccttcatgagacttgacctgacgtctgtctggtcccttttctcccttcggctctgattccacctcctgccttcccatcccagctgcaggagcggggccctacaaaggcagcagtagcccagaac

SEQ ID NO: 97202 - DNA, 25891 bp, Homo sapiens
  misc_feature (1)...(25891): n = A,T,C or G
taatgttacttcaatcataagtgatgttggtaataaaacaataattaatattaagattaataactaatattaaaagtgacattaatattaataattaattttaatcatgcataatcatatctcaaaaataatcattaatgattaataacgttatactgttaattaatattaccattgataattattaataagactgatgtttaataattcagaatattattactgctaataccgcagggggtgtacacctacttgtgataatgttcctaatatccagggatggagagcatgatattagttttcatatcacagtaggtgtacactcaccctgtgacaccgatcctaatacccagcttgtagagtatgacatgactgccaacatagcaatcaatgtacagccacccggtgatattgctcctaatattcacggaagaagcgtatgatattactcccaatatcgcagggagtgtacacctcttctgtgatattgttcctagtatcccgagggggagagggtgataataattccagcaacgcaggctgtgttcacccagcctgtgaaattgttattaatatcctgaaagggagaggatgatattactccccataatagagcaggaggtgtacacccaccctgtgatattcttcctaatattcagaggccgagaggttgatattactcccaatatcgcaggaagtatacacccctgtgtgagatggtccttcataatattccaaggcggagggggtgatatgactacatatatggcagaaagtgaacaccccccagggatattgttcccatgatcctggagggaagaggatgatattactttcaatatcacagaaggtggacacgcccccactgatattgtttctaattgcaacgtgggacaggaggatatgacacgcgatatccgagggagtggaaacacccctgtgatactcttcttaatattcatggaggaagaggatgatattactcccaatacagaaaggtgtacaccctctgtacactgagggtatacacccatctgtgaaacagttcataatctccagagggggagatggtgttgctcaaaataaggtaaacaggctgtgagtccaccgcggatcctaaaacccagggggggaagaggggctagctcttactccccgcatcgcagggggtgcctcacccccctgtgatgggggtcctaagagccagggggggagaggggctgttccctacgttggggcactgaggtccctgttttcttgtaagctgccattggggaccactctcggcttccaggggcccccttgtaggtggcaccatggccacttgccctactccaagcctgcagaagagcgcctctctgccatgtccctttcttttaaaagacttgcctgactggttcaggtccattaggtagcgtcccatttgattagctcaaaagtactgtagcccatcacattcactcacaggagggcattagcggggtgtggacaccagggagtgagaatctctcaggccagtttagcattcagttggttagccaggttcagtggctcacgcctgtaatcccagcactttgggaggccaaggcgggcagatcacctgaggccaggagttcgagaccagcctggccaacatggtgaaacccagtctctactaaaaatacaaaaattagccaggcgtggtggtaggcgcctgtaatctcagctacttggaagcctgaggcaggagaatcgcttgaacctgggaggtggaggttgcagtgagccgagattgtgcctttgcactccagcctaggcgatacagcgagtctcaaaaataaataaatgcgaaggctgctgagcacagtggctcatgctttataatcctggcactttgggaggccgaggcaggaagactgcttgaggccaggagtttcagcctagcatggacaacacagtgccactctatctctaagtaaaataaaataaaataaaataaaataaaataaaataaaataaaataaaataaaataaaataaaataaaataaaatagtaaaataagaattcagttggttaaaagaaactcactaggtccagcccacaatcaagggatggaaattacacaaagttgtgaagagtcaagggtgggagatcgctggcagcccttatagatgctgcctatctcacatacctgttggacagcttctctctcctagctgggggtatttggagcgggtgtcgaatcctgctcttttttatgtctgttgccttttctcgcggtgatgtgtttcctgtgtgttctgtaattttggatcgtgagctgagcttcagaggggctttagtggtcccagggtaccactaagccaaggcaacttttatttttgagacagagtttccctcttgttgcccaggctggagtgcagtggcgcagtctcagctcactgcaacctctgcctcccaggttcaagctattctcctgcctcagcctccagagtagctgggattacaggcacacgaggcttggctaattttttgtatttttagtggagacggggtttcaccatgttggccaggctggtctcgaactcctgacctcaggtgattcacctgcctcagcctcctgaagtgctgggattacaggcgtgagccaccactcccggcccaaagcaactttttagtgttaatttctcaactctggcattcctagaccacacaggtggcatgactttattgtaggagttccacatttacataagagaggcctgaaaacgcaacgatctcatgggaaacttgttcaccacctaaagctcaaaatttctcacctctctctgttcccctgggtggaaatgtttctgtccctttctctaaaggtgttgcatttctgtggccccaacttcatcatgcttgactgtaaccctgaccccctgccttgtaagggataccaacgctcaacccagccctgccctcaggcagttgcagcaccagctcctctgtccccaccttggttctcactctcctcttcacttctggccttaggggacttaacttattttctgaagaactcagctatatatttattttattttatttatatattttttgagatggagtttcactcttttgcccaggctagagtgtaatggcgtgatcttggctcactgcaacttctgccttccgggtttaagcgattctcctgcttcagcctcctaagtagctgagattacaagcgcctgccaccactcctggctgatttttgtatttttagtagagatggggtttcaccattggccaggctggtcttgaactcctggcctcaggtgatccgcctgcctcagcctcccaaagtgctggaattacaggcgtgagccaccacgcccggcctcagctctatagttaaaaggacatttgtttcttacccagcatttctaggtgttttgaagagggagacttctcaggttatctaacctgctactgagaacttaaagatagggaaaatcttggactggagattcttggaatcacataattgaaaaatcccagctgggcgtgatggctcacgtctataatcccagcactttgggatgccgaggcaggtggatcacctgaggtcaggagtttgagaccaggttggccaacatggtgaaacttcgtctctactaaaaatacaaaaaaaaaattgcctggcttggtggtgggcgcctgtaatccccgctactcgggaagctgaggtaggagaatcgctggaacccaggagatggaggttgcagtgagctgagatcatgccattgcactccagcctgggcaacaagagtgaaactccgttgcaaaaaaaaaaaaaaaaagaaaagaaaagaaaagagaaagaaaaagaaaaatccccacagtgcagatcgacaaaatcacagagttgctttgggagcgagggtggcaatcagacacggaggccatgacacaacctgcttatccactcaggggtccagaacctccacccagtcaccttatccgggggtgatggagacaggggaggtgccacctacgccagtgtcatctcttacaatgagctcttctcctgctcgaaaagagccagcctgctgagcttgctgccagggcccgtcgcactgcctgcgctgtgttgcccgtcgcacagcctgtgatatgtgtttcccatcatgtgtgcatgtgtgttgtcatgtagtgtctgtcacaggtgttacccgtcacgtgtgtttgcatgttgcatgtgtgtggcctatcaggtgtaaatatgtgttgtctggcacatgtcagcatctgggcattctccgtgtgccaggagcagccaggtggcctgtgaagccttctcatgggaaatgcccagataggaagagcacagccaggagccaagcccctgagtggccactccatgtgcctggatcaccttcaagtctgctcaacatcacagcctctgttccttggcaccatggacattggaattgactcggaactgggaagagctgtaggcccactatccaggcacctgctccccgtttgcccagcatcccaggggcccacacccttccaaatatcaccttgccctccattcagaggtgaatcatctgagcgtcaggttgcccaactccgactggttttgctggagcctgcctagaggatgtcgccagccacctccagagaacactcagtctacagatgccgagggggaactggaagcacacagtgctggccttcacccaggttatggtggcacctcgggaccgcttctgagtctgcttgtcactgaaggtcggcgtgaggcaggcagcgttccctcccagatttagaaaatgtcaagtctcccgccgcacccttttgtgtttcttacagggcctggtgcgcttgctgccgccacactaagggctccaacatgttccctcacacactcaacagagaaggaacctgtggctcagatggcagactccctgtccaaggccacagagtctggccccagggaccactagaggcttcaagaaccaaactcacatgagggcagagaggagagatggggccagtttagggctgggagaatccatagagcgatgctgaggcaggcatggagcctggaggtacggacgagggtcttgccaaagtcaggggtaaagaggctgtggggagtgaggaatggtgtgggccagccccgggcctgctggggtgcagctgggggctccatggccctcccacggcccccannnnnnnnnnnnnnnnnnnnnnnnnnnnnnnnnnnnnnnnnnnnnnnnnnnnnnnnnnnnnnnnnnnnnnnnnnnnnnnnnnnnnnnnnnnnnnnnnnnnnnnnnnnnnnnnnnnnnnnnnnnnnnnnnnnnnnnnnnnnnnnnnnnnnnnnnnnnnnnnnnnnnnnnnnnnnnnnnnnnnnnnnnnnnnnnnnnnnnnnnnnnnnnnnnnnnnnnnnnnnnnnnnnnnnnnnnnnnnnnnnnnnnnnnnnnnnnnnnnnnnnnnncctgtttctcgtgggcatcgcagctgaggctgtagccgggaaagggtagtcaccgagcgtacctggcctccaaccaccacttccaaggcccctactgggcacagggtgaccccaccgtggctcggaagtggaccctgtccgacgcgggggtggtcgctggagggcggaggatgcctacacaggcctctggagggtgtgtctcgggagtctgtctcgccctctagacccatgggggaccagcaacgccgtcacaccctcctctgtctctgccagccgctccgccgctcccttctcctggctggggctggcaaaggcaggcaggtatgggggggcggggcctcaggagggaggaagggctggtgggcggggcctacggacacctcgccccgcccccagtagggcgcggcactccccacaccacgcggtccccctaggtcagggcctgtcaccactgcgcccagaggccgggccagccgtgcgtgcatcccagggcatccgtgcatccgtcccccgcggcctgggactccccagtcaggacagtacaaaatctctttattgctcattttctgtaaaaaatcgtggctctcggcggaccctggggataggaggtgcaaagtgcgctcacacgcggcccgggtccgcggccgagagctgtggggatctggmgcgggccgggtcgcaagaagaccctgaccgtgctccggcgctggggcgcgtgctaagggcccgcgkggtttcagctgtattttcgaacccctgtgcttggccgaggrgttcccaaggctccactccgccttggagggggctgcggaagcccggaggtgaccygggctctgggaggggcgtccccaaygtgggggargggagacaggggccttygaakacagcgcgggactcggagggggtscccccgacctmagacgtggtaaactgaggccggcgaggagsgaggctgagtccggggaccaggcggcccctcactgctcctccggyccgtckccccyctgcgcctgttcgtacgggcagggccggcggccgagtccagcgggctcggggccaggcctgggcmcygcgggcggcgcctcctcctccgcgccgtccccatgctcgycctccgcgtcgctctcgtccgagttgtcctcctccaagtagcggtmaccgcgcaccttgtgctggggccgcgggatgcggggctggcgcggggccaygccccgscgcagcttctgctccatccgcaggtaggagaccgcggccgccaccagcgtcaccagcagcaccgccagcttagcctgggcgtaaggagagggatgccagggacccgcggccgcctcgcyycgcaccttccccgcctatgcccctcgctgagataggcccttccctcctccgggagcctcccgggccacgcggccctcaacttctccagcccctccacccatgcttcctggaccgcctcctgcaggcgaggctcacatccagcactgtcccttacagtcgccacgcccctggcgacctcagtgtcccacactgtaaggggacaatgcaaatccctttgcctcatagggtgcatgcgccagtgttgataaagtgctggccacaggccctgccttcccagggctcacaacactgtgtccctgacacacccgtgggctgtagtgatgcttttcatggggttttgactataacccgcagtcaggaatgatttcacaccatagcccagtacatacacacatatctgtatgcatacttcctgctcttttcttttttccagacacggtcgctccgtttccccacmgcgccccctccctcccttcccccamccactgctggagygcagtgscaygctcacttcagcctcaatcttccaggctcaagccatcctcccacytcagtctcccaagtagctggaactacaggcacacgccactacgcccagctattttttaaattttttgtagagacagggtctcctatgttgcccaggctggtcttgaactcctggcctcaagcaatcctcctgcctcagcctcccaaagtgttgggattacaggcgtgagccaccatgcccagcccactcactgcttttcttttttttttttccttttttttttttttggaagacagagtctcgctctgtcctccaggctgaagtgcggkggcgcgatcttggctcactgcaacctccatctcccaggttcaagccattcttgtgcctcarcctccagagtagctgggatcacagggacgtgccaccatgcccagctaatttttgtgtttttagtagagacagagtttcacagcctgttacccaggctggtctcgaactccaratctcagaacccccacctcagcgtctcaaaatgctgggattacaggcgtgagccactactgccagcccactccctgctatttttagttctatttttatttttattttgagacggagtttcgctcttgttgcttaggctggatggagtgccaacgccccgtctcggctaactgcaacctccgcctcccagttcaagtgattctcctgcctcagcctcctgagtagctgtgattacaggcacctgccaccacgcccggctaatttttgtatttttagtagagacgaggtttcaccatgtcggtcaggctggtctcaaactccctacctcaggcaatccactcgcctcggcctcccaaagtgctgggattacaggcgtgagccaccgcgcccggcctttakttctatttttaaaaaatgtttagcaactgggacttgctagaccgagccaccattttttgtgagcagagcatgaggagcctgctccccttcaggccatgaagagagacagacccaacatctggagaacaaggtaccaaacagcccacaggatggctgtgatgcacccacaaatcccctcagagatgggcaaactgagactggctggasgtgggccagtaagtggggtgctgagttgggggccacccagtgggctgcaggaatggggccttggcccagagactggcttgggaaggggtggcatttaggaagctgtgaagccagggcaggggctaaggaagtacctgtcattgggcatggggcccccaaccctgcccagtctcaccttcatgtgcaggctcgagcccaggtacacggtgaagatggccacagcctgccaccagtggtagatggtgaagatgaagtcctgtctctccttgtcttcgtacaagattcccaggagtgctgcaggcaggcagtacagggcaggcaggggagaggtgtcacctggggcctggggctaccgagctaccatctacgaactttactaagccctgtatgggtcccagccccggaccagagagcgcctagaaagtgctgtgaggcggtcctggcctgccccctggtggagaccctggtcaccacactgctcacacgctaagcagaagtaggagcaggtgcctcgggctgtgtggmtgcaggtgttcccgctccgcaccacatgcgtgrcctcaaaagaagaaagctctgtgcttagtcatgtcctgtccccaacccaggtgtgcagtgccaagcttgcaggcgctgtttctcctcctcagccaggactagagagatcgaactgtttgcagctgccaactctgcaaatcaaacctgaagctaagcatggagaggggggmttcctttccagtgagtcctcccagggtgggcaacaagagtaatggattgggagtcagaagatgcacgctcgttctcagggctgtaatgttggctctgtgggtgatttgggtacttaactccccagagctgcttttcccaatggtgagatgagcttatgcctattgtgtgctgtgttctgaagttctaaagtgagaaagtgggcatggcacctgccaaatcataggggccactattaacaccttcaccaggcactcaggatatgaacactcctgttttggggccctgcagggtgactttacccccacagtgctgctatgaagagacaaggaccccccggggttcaccggaggagatgggatatggagctgggcagaggggatgccaggaccagacagggcacaacatgggttcaagatacccaggytggwctctgcccagaattggctatccttgrgcaaaacggccaagagactgtggtgcagtatgaggctccagcccctgctacagacagagacacmgagccagcctcygccctgccagcagcaggcatgacctcggcyactccacacccccaaggatgacgttcaaaactgttcacagcttcggcccatcagaacagacactgacatggatgcccggcaggactgcccatgtgtgctagctgtgtttcactgcgtgtgcccatctgtggtcagggagcatcctggagctgaacatgggcccacccgctgccttctgcaaacagggccctgttccccagcagcccagacctggggcctggactctggtactgagcagactgggttggggctgcaggcctgctcctctctatacaaaggcccatgtctgtatctatgccatggrtgtacaacaggccacttgctcctaccacatgctccgtgaagcagagaccaaaayatctgctccaagtgtcatgaaaactatgccagggtaagccctgtcccctggtatgaaaagggagaatccctgatgtgtttttcacactgtccctaaggggtgtccacagagccccacacctgccccatgtagccacgagacttcacactgaccctccagtgttgatggggccctgtgcccgctctggggtattaacagaatgtccatggcatggaacccccatacctgtctccagggtgtccacaccctacccatcygtccccagtgtgtccataagacttcccttccacccccggagtgtccacaggaagccccacctgcctctgccatgtccacaggaccctatgtgaccatgggaccccatatctgtccctgggatgtctatgtctcgccaaccacccacagatagccataaagccccctgccccgcccccccccccccmgtgcccacagctatactcactgctgagtccagtcttgttcagggcactgcccacaccccaaagggcagctgccacatagaggatccagctgtgttgcaggacccgaggcacaggggcccagaaaaagaggatgaaggtgagcagcaggtgcacccctgctccrgccaccaggggcaccgggcgtggcagccacaggcccagcaggcccaggagtgaggcggctgaggcgcccaggctgtaagccacgaggaggtaagccagccgctccagccccaccgagcacacgccatagccctgcggggggacaaggggtgagtgttgaagtctggaacagcccagaccacagtctcagccctccccgcatcgcggggggtgcctcacccccctgcgatgggggtcctaagagccaggggggaagagggtctggctcttactccccgcatcgtggggggtgcctcacccccctgcgatgggggtcctaagagtcggggggraaagaggggttggctcttactccccgcatcgcgggggggtgccttacccccctgcgatgggggtcctaagagccagggtggggagaggggccccccgcgatacggggagtaagagccaggtggggagaagggctggctcttactccccacaagaggtgttccttaggccacaccctgccctccctggactgcctgacctcgctccaaggctcaggggaaggttctgagggcaggtgtgaaaatgcttggaatgtccctagacaccgtgggctgtaccccacaaggaactaaacactctgtgggtgctatcccatttcgattcagagaagttaaaataacttgcccaaggtaaaggggggacgggggtaagagagggaagagaaagcaggagggggatatttgggatatacatgtacacacttacatatgtaattaaaaattattctttgtttacttgaattcaaatttacctggctatcttgtcttttgtcgggcaatcctttgcaggctgtacttaccaaggcgataccagtgcaggcaaagagcacctcgaagccgctgtagataaagaaaggcacgaggtggcgcaggcggtagtcacgcacgtgcttgaagggcagctggaagatgttgccccagcccacgctgcgcagatcgatctcctccgtgggccggtaagcggctccgcacaaacccagcacctgcgaacccattacttgaaggggcggccagccaggcccaggcctggcctccaggcttcagccccgcccttcagatgcaccacgtgcctgggccttgccccagctcggccccgcctcccaaaccagggccccgcccctgagacactcccacagacccaggtcttgccttatcccagctcaaggccccgcctctcagcacaaagccacgccaccacactccgaaagacggtggtcttgcctcccagcccaaggccccatcccctctctctcacatacacacacttcacaactcacattcagacaaatccatagacttcaaccttccttctcagccccgcgccagacctcagccccgccttccaggctagtccccgcccctcggacacacccacagacttcggccccgcstcccagcactaggccccgccctgacacagccacggactgggccttgcctcccagctccatcgccaggctgcagccatgccaacgccttagttctgccgtccagtatcacttccagtttgagccacaccttccagccctcacccttggtcctgtccccaaccccctcacaggtctcagtcagtcttctaagatcttgtctccagctcgaaactgtggaccaagcctgttccctccttcccctggcctctggatgcccacgcctgcctcggaccacaggcctcagcsccgcctccgagcctcatgcccgctctgcagcactcggccctagctccccaactcagatcgcgctcccaggcctacggcctgccccgaggccacaacccgacccaggccaygccatccgatccagaccctttctcgcagactcggtccccagaaccacactctgcttcactgactgtcctgcccccatcccgggccgcaccagcagcatggccaggaaggccactgccatgagcacgctctccaccacaatgaggtttccgctccgcgggagcgtccgcagaaccgtcttgttgaagccgctgaggatcccgtggctgttggtgcctgggaagggtgggggtgagggcaccgtgagcagagagtagggcacacagtcaatccagccaccagggtggagccacgcaggccgcggaggagcggtggagggcgggagagtgagagcaagggcagagttccttcagagagcagtttggaggtttggaccactggggctgggtttggaccactggggctgggtgttccccgggaaaggggcatctttcccctgcttcccaccctattkccccaaggctcagtggacctcacatttccatgcacaccccctgcactgattgagctctgactgtttgcctggccccaagaaagatcccactggcagcctcagcccagatggtgccttctccaggcagtcttcccygcccacccactctcctggctgggtcagatgtcctaactacttactcctacagggccctgtgtcttgcccaccagagccgtggggcactgggctgccagccctgaatcctgtgagtgagggcccagtgtctgctggggaagtaagcaggctttgtggactcctccccaacccccaacaaggactaaccgcagctctgcacattgtacagcgtgtggttcaggtcatacaggtagtggttcaggaaataaatcatgggcagctgggcgcaggcgaagctcagctgcagaaacaagggcagttgggaccagactcaggcacagagccaggcaagggacacaggcatggtctggggaggggtccaggcacagccttgggggaacaggggccttcccagttctgggagtagtgtggttacagggccgcccaatgaggaagacctcctcctggccagcattgtggaaaagggcagatgagatctctatctctatggatgagcaagctggggtgggctcaagaaaggaagatgggcagcctgggcaacatagtaagatcctatctctacaaaaaataaaaaattagctgggtgtggtagcacacgcatatgatgccagctactcagaaggctgaggtaggaggatcacttgagcccagcagttcaaggttgcagtgagctgtgactgcactactgcactccagcctgggcaacagtgcaagaccctgcccccaacccccaccaaaaaaaaaagaaagaaagaaaaagaaatgaaggtggggcagatacagtggtgtgcgcatgtagtcccagctacttgggaggccaaggtgggaggatcactggagcccaggagttcaaagccatctgggcaacatagtgagaccaggcctcttaaaaataacaataataaaagaaagaaagtgggactagagggttgagactgtggatgggctccaatgcgtgggtctgcccctgccacccaacaatggcccacgtggcactcacatggaagaagctgtagaagatggcttggaagaccaggagatagggcgcgtgggagccccgcggaggccgctgcttcatcccctgcccatcctgctccttgtagtgggagtactcatggtacttctgcgccatcctggaccacaaaggagagaaggctctccccagcccgacctgtgccactcctgtgtgtcctgcacccagagctaggagcagaccagccccggtgtggggaaactgaggcccagagggcggaaggggcttcctgtggtcccccagccaaagttggcaataaagtggaggcttggccaggtctccagcctcctgccctgctgcccaccaggctcacctggtgatgtagttgcccatggaagcccaaagaggcacgatggccatgcccagggccacagccgagggcacaagcgtgtagtagcgctcccagtagttggtggagacaaagagggcgtagatgcccacagcgaggaacatcatccacttcgttccaaaaaacctgcggacagtgggagagatgctggcaccacaggcctgctggaccactgtggcctgaagccaaacggggccacaaccgcaggtcccagctcacagggctttgtgaggtagagagagtcgagggcactgagatggaatatcagatacacagacttgctgagtggcctcaggcaagctactgtgcctcagttttcccagctgtaatatgggcacggagcccaaaccacaggcctctcatcaccactgtgaggatggagagtgacccatgggtgtaaccagccctcatgcgtgttctgggctctctgattctcccattcccccttctcctcccaagctcatgcactgtgtctgtagggcccaggggcttgactcaggctgggasaagagaaaggaagaggccccactgctgggagcagcagagccagagtcccggcacccctgcctccagtccattgcttttatgaaccatggtggtcagtcaggaagtttccacctctctgggtctgggaaaaggtcacacagtgacaatagaaggggcttggtgagtgacaggatgagggctcaaccacccatggaggctgatcaggccaaaaaccactactggtatcttcaagttttctgtatttatgctccttaagtaaaaatgccagtaaaaatgtgcattcactgctggtgaggatgtggtttgaaagtggcacatataggccaggcacagtggctcacatctgtaattccagcactttaggaggtggaggtgggcagatcacctgaggtcagaagtttgagaccagcctggccaacatggtgaaaccccacctctactaaaaatacaaaaattagccgggtgtggtggtgcacacctgtaatcccatctacttgggaggctgaggcaggagaatcgcttgaacccaggaggtggaggttgccgtgagctgagatcgcgtcaccgcactccagcctgggcaacagcaagattgctcaaaaaaaaagtggcacatatagccagtggtcacacacactggcataaccctttgggaaagcagcctggtagttttggcagggggtgaacatgtggatttgagtccctctactggggttcaagccttcagtctgccagttactgcctgtgggacctgggcaagttgtttaacaccatggtttcttcatgtctaagactggagcagcttcctcaaattattgggaatgaaattgcgcttataaagtgcccagcacggccgggcgtggtggctcgtgcctgtaatcccagcactttaggaggtggaggtgggcagatcacctgaggtcagaagtttgagaccagcctggccaacatggtgaaaccccrtctttactaaaaatacaaaaaattagctgagcgtggtggcgggcgcctgtaatcccagctactcaggaggctgaggcaggaaaatcgcttgaacctgggaggcagaggttggagtgagccgagattgtgccattgcactccagcctggtgatagagtgagactccatttcaaaaaaaaagtaaaaataaaaataaataaataaaatagagtgtcgggcagacaggagacaagagttcactgctattagtagaagtgataggtttcaaaagccataaagccttttgtatggcttggacctagtaaagacattgttgaaaatgtatcctaggaaaaataattgtttaaaaaattgggggagtgctggatgtggtggctcacacctgtaatcccaacactttgtggggctggggcgggtgaatttgagactggcctgagcaacatagcaactccccatcgctacaaatactttaaaaatcagccagatgtgatggcgtgcgcctgtaggcccagctactcgggaggctgaggtgggaggattgcttgagcccagtgtgtgggggttgaggaggcagtgagctgtgttcgtgccactgcactctaacctgggtgacagagtgagactctgtctcaaataataataataataaaataaataaacacataatttaaaaaaaaaaaacaaggaaacagatgtaagcacagaaggaactgcagtgtccaattccaagccactgttcagtgccaccgtatctgcagaagatgctaccattgcaaagtcgtaactgtgaaggctgtagagtaggctaagatatgctcagtgaaaagaaggaagcaagctctgggcactgtggctcatgcctgtaatcccagcactttgggaggccaaggcaggagaatcacttgaggtcaggagtttaagaccagcctggtcaacatagtgaaaccccatctctactaaaagtacaaaaattaaccgggtggcaggcgcctgtaatcccagctactcagggtgctgaagtaggagaatcgcttgagcctgggaggcagaggttgcagtgagccgagatcacaccactgcactgcagtctaggtgacagagcaagtatctgtctcaaaaaaaaaaaagtaagcaagcaaaagcaaacatagcccgcttgcatacacacacacacacacacacacacacacacacacacacacgggcacgtccacacacgtgctctggggacaaggatgtgaatgtaatccatgcatgctggtgggacagcatgggtagccgatttcctggagggcttagatggggtttcttttttatgatttcagttattctaatcctgcctgtgcaacgggagatgttttaaattttcaaatttttgtttaaatggagttttctcttgttgttttgtttgtttgtttgttttaaagatgagggagctcaaattcacctaatttgtccactggtctccaggtcccatcagggagggcactgtggaccggtgatggggaggctgaaccacatacctccagggctcagatctgggggagagctctggggcacctgcccagccatgcctgtctgtgagaaacaccccctcagcaccagtcacagcgactgggccaggcatgggtgcctggactttgctgaccgatcagaaacccctaactctacagccccaaccctgaaggccacagtggctctgggaggcctccaaggaggccacgaggagggtgccacgtgaggcccaggcaagctgggagggagctcagcccgtgtgaatctgttgctggaaaccaaatgtgccctgaggcaaagttcctgtttccttccccaaatccgagtttcacccccttcactctcaggcttccgggtagaaaaaaacctctcccttgttycctcgccccacaaacaccccggcagatggacacctcctggcccgccggcctctgtacccctccgaaatgggagtaccgcagcatcccacaggagcagccgcgcccacctgatgagcacaggtgtgtagagcagggcggcgatgggagtcacgttgatgcccatcagcattttgctgtcgatgtcgggcagccccatgttgccatacttcacctcgcggtaggtctcgtcgtagtgcaggatcagctgcatctgcaggaggcctggggacaggacagagagcggcgtgcagggagcagcctagctttgggcgccaccgagcagaagacggcatgcaggcctcgcagggagctccaatcaccgaaggcattcccgctgacagcgcccctcaggacagcggggttcccgggctgcgccacgccttctgccagcccgcggccacttggccagctaagcccagacccccacccgccttgctccgccggcctccaattctgacggtggcaggtctgtccgggagcccggacccccgtcccccacccacaccgaggctctggctgggacccggggacgctgcgctacttgaccccccaaccccacccccgccgcggggggccgtggctgcagctgcgagggcagcggaggggaagtgagagcgggcgggaggcggcggcccgcggtttctgtttcccgggccgggctgggagcgggcggggcggccccgggtccccgagcggcacctacccaggtagacgccgtaggtgagcatgcccccggcgctggcagccagcacgttcttgagcacgcccaggcgcttgcggcggtagtagcggcgctcctcctcctcctcgttgtagttggggtacgcgcccaccagctcgtccagctgcgagccacgcacgccgctcgcacccgcgatcgcgccccgaacccgtgtcccccggtgcccgccgccccccggcccgccccgcccccgccggggggaccctggcccacaggggacgcccgcgcctcgcactccgggtccccgctcaccggggcctcgggcccgtccgggaccccgagcaggtcctcgtcgccctgcggccccgcagcccccgccatcgggtagagcggcggctccgcctccatggcccgaactactgcggactcgcggcggtcgccccggagtccctgcgaccgcccggccacttcctcccggcggccgggacctgcccccgccccgccctgtcccgccctgcgggccgcctcctccaggacacgtgtgtgtgtatgtgtgtgtgcgcgcgcgcgcgcgcgtgtgtgcaggggcctgcctgtgtgtgccctctggggtgtgagttcgaatccccactcagccacctcctggccctgtgactttaggaattaactccatttctttgtgcctcggtttcctccgtttcctcgacggtaaaacagaaatacatggcactacccccggggccatggcggaactattgagttaatgcaaagccttggaaaagtgccagggttgcctggctcccttaagctcccctcagggttgcctgggtcgtccccagccccacctccaagcctgctgttacagctcatcaaagagcactgcagggacagtagcgtcaccacctggaccccacctcccaccaccggacgctacagccagagcccacctcccatgtccccatcctgctccagtttgggctgtgcaaatgggagcttgagtgggtcctgggaggtggagattgtgatccccactgaactacatgggggaccctgccacaaccatgtagtggggcccagagcyacctgcccccatcctgctgggcactggatcccgggctgcagcgggagcctgtggtggggccgacactccaaagcactggctaccaccgacctggctggagccacggggccacttttgaaaatatccagattctctcccctgggttccttctggtttgaatgctcttcctgctgcgcctcccaggtggcttccttcccactcmgctctcagaacaagagaccatccctgcagagaatgcagtcccttcacttcccttctggttttccatgccctccctgtgcacccccctccacccactgctctttaggtacatcctctcccaaatgcagaggatggcattgggcacctactgagtgatcaatacttgtgactggatgggtgcatgagtgactggatgacaaacacctcccaccccgcaaggattgctgggaaggtggggggaggcgtgaatctgcagtggcttcaggcttccaggaggtagaactttctccaggtgacgatgcccaagtgcagatgtggggaacagacaggtggattcatgcaggtgggtggctggaagtgggagacaggaaaggagccgaagagagggcagggcccgaggcgcaggggcagggaggaggtgggagagtatggctatggcgggggccgttctcagatggcagacaccagcatcattacacagtatgatgagaaagtgcaattctcctgactcagccttgtgagtagctggaattacaggcgtgtgcccctacacccagctgatttttgtatttttagtagagatggggtttcaccatattggcccaggctggtctcgaactcctgacctcaagtgatgtacccgccttagcccccaaagtgctgggagtgggccccccgagcttctcaatttccctgagggaccccaaacttctggggcctggtgcaatctcttcctccccttgttcctctgggcctgggggttgtggcggttgctatggttgcccatcctgggctcttccatcacctgtgctgtaccaccaattccctgcactcaatgtctcctactcaaaacacctggagagggtcgggcgctgtggctcacgcctgcaatcccagcactttggctggccaaggaggatcacttgagctcaggagttcaagaccagcctcaacaaagtgagacaaacccccccccccacccatctctacaaaaaatacaaaaactagcctggtgtgatggtggacacctgtagccccagctactcaggaggctgaggtgggagaattgcttgagcccaggaggatgaggctgcagtgagctgagattgtgccactgcattccagcgtgggtgacagagtgagacctctcaaacaaacaaacaaacaaaaaacaaaaaaaacaaaaaacagccctggaggcactaaaccctgactgatacacctcctctctccagaaaggatttttttttttaggtggtttatggagctgctcttggggagcctggagactatctaagaggctgatagggtggcccagataaacacaccagggtgacctgcgggacagagatctgagcagggccagcacctccaccaacccatccaggttgcaacagtgcacagtcacatccccaggaaggggtggccagatccccccgtgctcactgtttgccaatgcttttctctataataagcctttactttcagttctcattatgaaaataatcgatgttccttgcagaaaagcaagcagaagagaataaatattgctctcaactggaactccctgaaacaacctcttggaatattgttgccccgcattgcactgacacaggagcgtgctgggcagcccacgtgattcccttcacaccacttccctggcatggatgtgattccacaatattttaaacattaaagccaatggggatgatgatcactgagtctggctcacaggatggtgggaggtccccaggttggggtgtgccaaaggctctgcccagtgcctggcacagcaaatgcccaggtggctgctgctttccactgagacttgaggctcctgagagttggtggcaaagggctcacccagagctgaagactccagcccattcctgtgcgagggctccaggcaccttggaagcaccgtgggccggggagccaggccaggctggttgtggatccccatgagtccttgtcactgtgtggcccagctggaaagcatggtcaataatgtctgggaattgtgaaaattgtgtgaagtgtctgcacacagtaggtgctcagtaaaggtttgttgagtgcgtaaatgaacaagtgacccgcattcaccgttgcccgtgagttctgactgtgtcctgggccctgggcccctacagcctctaactttgcctcttcaaggagccagggtgggtccagccttcaagactgccagggagggggtgggaggcagggccagggcctcagggccaaggcctggggcagccacttcctcaggagggcaaggagaggggcaggaggacattcacatgctctgagcgcctactgagaaccaggtgccctgtcggtgccttcaggtcggctctcgtttcaccctcgcagtagccatgtgaggcaggcagagtcagcccccattttacagctggggaaactgaggcccagtgaggggacgtttcttttcaaggtcactcgtgggcagatgaggcagtgagatgctcttgggcaggtctgaggccctgtgagccaggctcaggggcgtgtttctgagaagtgagggaatgaatgaatgaattatgaatggatgaatgattccacctgatgccatgctcatgccctgcccacactcctgtcctagagtctggaaggtagctctcagacccttccagagggggccgggcacttggaatggtcacagttccgggcccacgtgcatggaataacttgtttcagcctcacaatcacttacgtcccattttacagatgggaaggcagaggcacggggggttaagacactaacctaggtcacacaggtaagtgacaggaccaggatttgagcccagacctcacacttaacgccctccatgccaggtgctgagatccatgcctgccgaaccctctcattcacccacagatgcccccgggactgtagtcagccccattctcacatgggaacactgaggcccaaagaggcgaagcgtcagcccagcaaggaggaggcagggcaggcggggccgcagctgtctggcccggagccctgagcaacccctccacccactccccctggctggcctgggccttggcagacctcaccccagagctggctccaaaagtgagtcctcctggtgccctacccagagggctccccatttaccctgggctcctcaacaaagatgggactcccaggccctactgagcctctggagctttgaggagtagtgaggggcacccaacccagagtggggagggcccagccctcctgggaggtgtgtggcctcccttggggggagcctcactcccagggaaggctaggagttctgtcccgggaggacaggcctcttcgggggcctcctcccaggttgctcctgcattcatgacaagttcggcccctgtgagttgggggaaattcttcaacagctccctggccagggaggggaccctcaggatcctgaaacacccctcccacctgccagtacccgccaagatgggtccctgatttgctgtgtggccttagaccagtggctgccctctctgggcctcactcccagctgagacctacaggctcagcccctgcccagccctgcctggcacccgctcaatctggctgagctccagagaatggcagggctgggctgtcacatgctgagccacgtgactggcagtggctgggggctccatcccacacagaggacaggggctctgcagtccttcacccccaccctaactatctaatcacgggccaccggtgtgggcatggtccagaagacctcaccgccctcccaggtaggcagggagctggcgggtggggggggccatgatgagcacctcccaggtgccacgttggcccagaggccccggggccaggagctacggaggcccagggcaccagggagatggtagcagcggcaggcccaggaaggggcatagaggaggctcttcctccacacctgtcaccctgtcccctgcctgtccacacccacagcagcttgcacatcatccccacagcacgctggctctgacaggtgtatccggggcgggctgggggcaggcagggacaggcttaggcacagctgcctgtgccgaacttgaggaagatcgggactacaggaaccaccaaggcgacacgtggcatcatgaccacggtcctaagcagagaggcaggcactcctcctgggaggcagaggggacatccgaaacgggtgcagccccagctctggagcaagaagctctgccacacacacgccccatgttcacatcccaccccctctctgcccccacttcctcgtttgtaaaatgttagatctgcagaaagacaggctctatgaatggggcggcccatggggtggtgtggaggaacacggaagcacagggcgctgggagaggagcaggcatgaggtatggtccctaagatggtatttctagactccagccacctttgggtctgacctctttgttttgcagaaggggaaactgagtcttgggtagggtgtagcaagacaagccacagacaaaacacctcagacactggattaaagaaggaagaggtttattcagctgggagcatcagcagacttgcgtcaagagccgagctccctgaaaaagacattcttggcctttttaaaggcttacaactttaaggggtccacgtgaaagggtcgtgataaatcgagcaagctcggggaacgtgaccgggggctgcatgcgtcagctaacagaacagaaagttttgcagtgctttctcatacaatgtctggaatttacagataacacaagtagtttaggtcaggggttgatattattatcacttttttttaactaccagggccaggtggtggcgccaaggtcttctggctatttctcttacttctgtttttttctaactttttgccttctctctttcctcctgtcttgtaaaccaggcaaggtggtaggaggagggcagcaggagtagtagtggtcttattccttaggggaggcattgagggaaggctgggagtggggggtcgagacttccttgctattctgggccataacattccacataatattataatagaatataattaatacaataatagttccccaccccacaccgggattcccagggcccactgccccactcctcctcctcaggctggccctcagctcagtgctcagccctgctgcacagcctctcctcctcctcctcaggctgcccctcagctcggagctcagccctgctgtgtggctctagcctggcgccctctgggcgttgacttcttctctgtggtctgggaggagatgtcgaggcccccgagggaggcggtggtgaaatcttggcttgcagcctccagcccgcccagagccagagtcaggcacgaggctagggcaactccgccccacccctcccccggggactggccctgcgttggacatttcttaacagcagggccaccaggcagagcgggacagccaggaggaagggcagcttggcagagcctcaggtagagtatcccggggaggctggggctgtagtgggccagcagtcgggccagagtccagctcagcaactccgggttacaggcagcccaggcgggcctagccaccggcagctgcactcagaggccactgtgtcctggctgagctcatctgcctgcctgctgggggagaaagcggaaggaggagaggcagatctggggagtggcagcgaggtcccgggcacccccctggccagcaggcacccttccgttgtccgagctgggttgccaccgcctccttttcctgggattcccggacaccctccaagggaaccaagggaacagctctgggtccagctgccccaggaaggactgtgcgccccttccccacaggggtcaagtatcccttccagcaacagccgtttcctgggcaccagcctgcatgcccagtgctgatgcagggatgtggccatgaatgactctgggaaagaatcattcttagcaatggactttgtcagggtccaagaaaggagtggccagccagccccgccccgcctgcaggaggcacttctcatcccgggaactgtgccccatcagggagccgaggctgttcagcctct

SEQ ID NO: 97203 - DNA, 12713 bp, Homo sapiens
agagcaagactccgtctcagaaaaaaaaaaaatagctggacttctgaaatgatgttcattcactaccagaggagaaagagaaggaaaactcaacatgcatttatatttaaatctaaaacctttttaaaccaagttaatttggctagttatccatggctttggacggtagaggttgagggagttcaagtgaaaacgagaattccacatccccacttcagtgattgatgtagatttactatgaccttcctcaggcagtacctttaccaccaaatcgggaaacactacctaccgtagaaagaaagcccagtgagatagggctggtcctgctggaaaactgaactctttgtaatcaaaacccaaggcattatctttaccaagctcttttcccctttaacccctttaacttccaaggctgaattacggtgacgtagtcaattgggttcaaagtctaggacactccatatctggcaaggaatgaaacagtaagtccaagggcccagaggcgatgatggacttgggtggaggtgggtggcccaggaggtgggggtgggtgctgggcgagatgctcgaaccaccgttttccacatctttccacctaatccaggggagctggaggaggccgggcccccggccccggcagagcgaagtgggtgagagggtggcaagctcagcactcaacgctccccgcgccggaccgggcctcagcctccagcacacctcgctggccccggggcaccgagagggcagagccgggaccaccccaggatcccagcccccagcccgccgccgccagcccgcccccrctccccgctgcgcacctgcggtcccccaggagcggagacgaggcggccctttcctcactgtccccctgcaggacccgtcgcagcctccgctttgcaaaatctgtcctctccgcccagcaggagcagtccgtggcaccgcaatcaggggtggcgccaccccgccccgggcctcagcgaagacctccgcccggccaacatggctggcgccgcctctgccacgtcaagaggaggggacggggcgtgagggcaggaagggggcaggaaggggcgggcgcagagttaccagggcaggccaccggacccctgagcttgcttaataaccggaggatttgagaaaggcgcgcggcgggcgaaggtaccgagaggggaggagggaggagaggtagcggggaccgagccagaggggcggaagaacccggaagacccaggcagccggacggccgaggggcgtgggaccgggcagagcgggaccgggagagagcgcctttcccagctccctaaagccacagcgtatcccactccctgcaggtcgcagaaagagtggagaactggtgccactcggacaccttagctcaccgagagaaatggagacggcctccaggacatcttaggaccctggttgattccgagaatcacaaatcacatctctgaaaaaagtgaaaagttcattctttcacttagtgcaacaaatgtttactgaaacttactatgtgccagacacaattgagatgctggtaatatgatgcaggcaaagtaggcccagatccctggcccgaaagaattcacgtactatttatgtattttagtcagcctgtcttttcctcctacattgcctctgccacctcaactctgtctccccccacccccaaaacacacacacagtacaatatttggctgattcatcttgatatgttcaatgtttttctttccaagaaaaaagttgaacaaaatgagaaagcaacagattggtaagacattagagcttggtggtctcagacaaccccttccttcagtgaggggaatgaaattaagtgcccatggaattaattgcatatatgacaacgcctaaaagcctgcaaagtttagccatatcaacattttatggaatggaaaaaaagatcaagtccctgtccttgaaagctcatattcatgagaaataagacagcagcaccaggctgggcgcggtggctcacgcctgtaatcccaacactttgggaggcggaggcaggcggatcacaaggtaaggagttcgagaccagcctggccaacatagtgaaacaccgtctctactaaaaatacaaaaattagccgggtgtggtggcacgctcctgtagtcccagctactcgggaggatgaggcagaagaattgcttgaacccgggaggcggaggttgcagtgagccgagaccacgccattgcactccagcctgggtgacagagtgagactgtctcaaaaaaaaaagcaccaaacatatttccctttctataatgtgtgtactaaagttgttttggaaggtggaagaggatgtttgcttgtcaaattgtaatacaatcctgaagagggcaatgggaatcgaaagccaaaaattagtgtaggcttccaaataaagtaggttcaaggtgctaccttaatgaagattcttaacagcacacagcagaggtgttgttataaaggtggaataagtacacccaccaaaagcgacaagatctaagaatgagtaggataaaaagatcttagtccatttaggctgctaacacaaatgccctcaactgggtagctcataaacaacagaaatttatttctgactgtcctggaggctgagaagtccaggatcaagatgccagcagatttggtgtccggtgaggacctgctttctgattcatagatggtgccttctttgttctcacatggcagaaggggctggctagctctctggggtctcttttacaagggtactaatcccattcatgagaggccagccctcatgacctgttcacctcccaaaggccctacctccctataccatcaccttagcagttaagatttcaacctatgagtttggtaggacacaaatattcagaccatagcaacattgatgagaagatccacagaaatcctggaatccagcgaggaataaatcaaagcatagtacctttggtagattcattcatttcatggttcccagaaaggcatctttaccatccagctcaatgaagtcttttcaaaaactcatcattcctggccaggcacagtggctcacgccggtaatcccagcactttgggaggccgaggtgggcagatcacgaggtcaggagatcaagaccatcctggctaacatggtgaaaccctgtctctactaaaaatacaaaaaattagccagacatagttgcgggcgcctgtagagccagctactcgggaggctgaggcaggagaatggcgtgaacccaggaggtggagcctgcagtgagcagagatcgccccactgcactccagcctgggcgacagaccgagattccatctcaaaaaaaaaacaaaaaaaaattcatcattcctttgttttcagttgatcaaaggttttaattccctattacaatgaaatagatgttaggatgcataacaaactcagttgcatctgtctttatgtgctttaagatgaatgactttaagtccaggcgcagcggttcacacctgtaatcccagcactttgggaggctgaggcaggtggatcacaaggttaggagttcaagaccagcctggccaagatgttgacaccccatttctactaaaaatacaaaaattagccaggcgcagtggcaggcgcctgtaatcccagctactcaggaggctgaggcaggagaatcacttgaatccaggaggcaaaggttgcagtgagccgagatcacgccactgcactccagcctgggcaaccgagcgagactccgtttcaaaaaaaaaaaaaaatgatgaatggctttaatccttggatatactatcaggatcaggatctactggacccaactttagcctttcagggttgtttttttgtttttgggctctactcttaaggattgatatttcatgattttttgttccttcgtagaagtcttccaaacaacaaagagaaaatttattttctaaaaaaatagatgtggtgactcacacctgtaatcctagcagtttgggaagctgaagggggaggatcccttgagcccaggagttcaagaccaccctggaaaatatggtgaaaccccatctgtaccaaaaatatagaaaaattagcagagcgtggtagtgtgtgactttaatcccagctactcaggaggctgaggtgggagagtaacctcaacccagggaggtcaaggcagcagtgagccgtgatggtgccattacatgactgtgccactgcctgggcgatagagtgagattctgtctcaaaaataaaatacataaaattaaaaaatagaataaaactcattctatttacaattcccatatagatccattggacccttatacatctaggacacatagtgggatttactaatttttttttttgtatgttgaaacgttctgctacttcatcatccatagaattatttcatccttactgatcaattattccaagctatgctttaaaaaagatgaaagtcaggctggcgcagtggctcacgcctataattccagggatgtcaccgtgttggccaggctagtcttgaattcctggcctcaagtgatccgaccacctcagcctcccaaagtgctgggattacaagcgtgagccaccgcacctggccctttttttctttttttttttttagacggagtcttgctctgtcccccaggctggagtgcagtggcacgatctcggctcgctgcaagctccgcctcccgggttcacgccattctcctgcctcagcctcccgagtagctgggactacaggcgcccgccaccacgcttggctaatttttttgtatttttagtacaggcggggtttcaccgagttagccaggatggtctccatctcctgacctcgtgatccgccctcctcggcctcccaaagtgctgggattgcaggcgtgggctttttttgcttttttaaatagggatggggtcttgctatgctgcctaggttggaattgaactcctggactcaagggatcctcccaccttggcctttcaaagtgttgggattataggtatgaactaccacacctataattttttccagtatgctggttacgaggtttcaacctgaggaagagtagaaagggaatggaattttttttaactcctgtgaaaggaaggtcagaacatctaagagattgtaaaaaatataaaatctcatataagctcccttcaaaagaaagtcttttaaaagcaaatactcctaagttcactatttcctcaaactggcatttcttaaaatgccagagactaaaaagagagggaaagattatgtggtcgaataaagacatgtatagccaagaacatttcttaaagatatttgaccttgcaacttttttcccagggattatcttgagtcaagtattctaaacaccctatgaaagactttgccttccaccattaaatattagttaatacgtaacagccagtaatcttcctacttcagaacccacaggtatttctaaactgaggttccagtactacagtcagtgaagtataatgtcaatttcttggaactgtagatgttaaccaccagatggagctttcacctctacttttcctttttaggtttactctgttttctagtattgatgaagcacttgtagtttttttctaacatggattctcttccatttgttcagatagtgacaggttaaggcactggccaactatttttggagtagtcacttgaaaaagcaatattcagattcttataattttgaattttcagcaccagtagtgtgttaaagttatattcacggaataacatctgtctgatcctctattctgcactcataatgactacaattgtattaaatataataaggctaattaataagtcacatggaaattacagaatagtaaactcaagcctttgtgatcatttagtctaatccccatacatgacaaatgaatgtgaggacaagagaagtggcacacttaacaacaccctaggccagggtgctgatgctcatttaaaacctacaacactggctttgcagacaccactgccggagccctgtactatcaaccatggtgaaccccaccgtgttcttcaacatcgtggttgacggcgagcccttgggccgtgtctccttcaagcagtttgcagaaaagtttccaaagacagcagaaaactcatgctctgaccactggagagaaaggattggattataagtgttcccttctttcacagaattattccagggtttatgtgtcagggtggtgacttcacatgccataatggcactggtggcaagtccatctacggggagaaatttaataatgagaacttcatcctaaagcatacaggtcctggcatcttgtccatggcaaatgctggacccatcacaaacagttcccagtttttcatctgcactgccaagactgagtggttggatggcaggccatgtggtctttggcaagttgaaagaaggcatgaatattgtggaggccatggagtgctttgggtccagtggcaagaccaagaccaccattgctgactgtggataactctaataagtttgacttgtgtttttatcttaaccaccagaccattctgtctgtagctcaatagagcacgccttcaccccattttttcgcagtatcctataatctttgtgctctcactgcagtttcctttgggttccatgttttccttgtttccgtccatgcctagctggattgcagagttaagtttataattatgaaataaaaactaaataacaaaaaaaacctacaacactgagttttcatttcatgcctgtcttttcctctttaaatgctgacaagactagattttctaactcttgttcaaatagcaattgtttattttatattttatatatatttttgagacagggtctcactgtgtcacctagcctggagtacagtggcaggatcacagcttattgcagcctcgacctcctgggctcaggtgatctttccacctaagcctcctgggcagctgggacttacaggtgtgtgccaggatgcccagctaatttttgtattttttgtatagatggggtttaaccaggctggtctcaaattcctgggctcaagtgatcctcctacctcgatctcccaaagtgctgggattacagccatgacccaccacgctcggcccaaatagcaatcttctctattccacagagtgccccaacagtgatatactccaatatctcttcattctgtcactctgaccaatcccagaatttaagagttaattttataaaactaaacaaatgaggggcctggcccagtggcttacatctgtaatcccagcactttgggaggccgaggcaggcggatcatgaggtcaggagatcgagaccatcctggctaacacagtgaaaccccgtctctactaaaaatacaaaaattagccgggcatggtgacatgcgcctgtaatcccagctactccggaggctgaggaaggagaacggcgtgaacccggaggcggagcttgcagtgagccgagatcgcgtcactgcactccagcctgggcaaaagaacgagactcgtctcaaaaaaaaacctaaacaaatgaaatttgttgatttgcccttaaaccatttacagtggcccaaagaaaacatgaatatctactggcatatttatttttctttttatcttttatttatttgatttgtaaagaacatgagtaatttaaaagccatataacaaaggagggaaatcccactctaaaacggaacagatttgcatttttacttcaaaagaggagtaaagtttttgtttcatgttccataattaaactagaccttgtcttgattttctgacatcaagtcagcattctctcttagtggctctggacctcagagccagaggatagcattctcagacaacggagacaaggagactactcatgcctagatggcaatgtactaagactaggaagcaaactggatctctccgcatttagtcttcattgcctctctctaatttatggccagtggatcataaagactcacaggaaccttccctgggacttgtctttttttgttgtttttttttgttgttactaatctttactcagctgtatcttgtgcagcatagagatttagagcaatggcttggcgcccaggatagaatctcaattccattacttccttgttgtatgatctgggcatgttgcacagtttcttcacctgcaaatgaagataacaatagtaactaccacttaaatggccatgtattgtgaagattaaacgagataatccatgtaaaagatttagccctgagaaagagaaaaacagcgccggagggctggaatgtggcgaaaccctgtgtctcctaaaaatacaaaaattagccaggtgtggtggcctcagaaggctgaggcacaagactcgctcaaacacaggagaggcggaggttgctgtgagcaaagatcgcaactacactgcagcctgggcaacagggcgacagagcaagattctgtctcaaaaaaaaaaaatcccacctagaatgccttttaaaatgtcagtttcttagccccacaccccatcaacagaaacagaagctctggaagaaatagctgtaaaatacaggattccatattttaaataatttcttccagtttttttttttttttggagactgagtctcactccatcgcccaggctggagtacagtggtgctatctcggctcactgcaacctctgcctcctgggttcaagcaattctcccacctcagcctcccaagtagctgggattacaggtgcacgccaccatgcccagctaattttttgtatttttagtagagacaggggtctcaccatgatggccacgctgatctcaaactcctgatttcaagtgatccacctgccttggcctcccaaagtgctgggattacaggtgtgagccaccacgtccagccggatgactcttatacacactaacatttgagaataactgagccacttaaagggatagaaaacacagagacatgggaggctgaagcagctagatcatctgaggtcaggagtttaagaccagcctggccaacatggcaaaacccgtctctactaaaaataaaaaaattagccgggcatggtggtgggtgcctataatcccagctcctcaggaggctgaggcaggagaatcacttgaacccgggaggcacaggtggcagtgagcagtaccactgcactccagcctgggtgacagagcgagactccgtctcaaaaaaaaaaaaaaaaaaaggaaaataataaaagaaaagaaaacacagagacagagataaactgtagttggctgtgtaaggttgacttaacagatgcctccatcatcaataaacagccacatcatcaataaacacacaacagaatgttctgttctcacaatcgtcatgtaactcctacagctaaccaatcgtgtgagaaatactgaaacaagaatttttccatcataaactaaaaaccggcgataaatctctaaaaacagggcaccagaagtagttcagtaccttaggaatatttcttcctgggaatagatgaaatgttattgtagtttcagaagttcacctttccaaayagcgttttttcagaataacttcatcaaccaaatataacttatctcatgtgttccatatttcactgaagcattaaaaaatacttagtgcaatttctgaaaacttcactcaaaaaatcattactaattcttttaaataaaattagatttgaagtagcacgaagctatattattacctcttcttttggaaaataatttattattatttcccaggacaacctttgttccattctcctattgtctcctttcttccttaatccatgcatagttctgacacatacttatgcacaaactccaatgttagccattgttccattggtagttgattggcaaggtaaccttttctccagaaaaaaattgaaagaaaatgctaataatttacagtaaaaaataaaaattaaaaaaaatgtatttgtggcctggcccagtggctcacacctgtaatcccagcactttggtaggccaaggtgagtggatcacttgagcccgggaggtcaaggctgggtaatattttattttattttattttattttatttttttgagatggagttttgctcttgttgcccaggctggagtgcaatggcacaatctgggctccctgccacctccgcctcctggattcaagcgattctcctgcctcaggctcccaagtagctgggattacaggcgcccaccaccatgcccaggtagtattttgtatttttaccaaagacggggtttcaccatgttggccaggctggtctcgaactcctgacctcaagtgatgtgcccagctcggcctcccaaagtggtgggattacaggcatgagccactgcgcctggccaagattctttacggatgcaaaatttcctccacaaagaacagctttgcagggccatttcaaaatacggcaaagaaacatgttttggggtcaaatatttttattttcttctttgtctcgtaatgtcatttcgaagtgaggttgaaaagtaaatcgtgatatatagggttaaataaaacccatctgatgagaatttatgatttgtagggcatgactccccagaccccttagataggaatttgggcaaaataaaaaaatcaggccgggcgcggtggctcatgcctgtaatcccagcactttgggaggccgaggcgggtggatcacgaggtcaggagatcgacatcatcctggctaacaaggtgaaaccccgtctctactaaaaatacaataaattagccgggcgtggtggcgagtgcctgtagtcccggcggctactcgggagcctgaggcaggagaatggcgtgaacccgggaggcggagcttgcagtgagccgagattgcgccactgcactccagcctgggcgacagagcgagactccgtctcaaaaaaaaaaaaaaaaaaaattcagtttagtcctcacgtcactacttactttttcaaatttgtccttgattatcaccaaaatgttggacgacaggagtatttctccctattctaagtctgtttttcccaaaaccagtgaaaatttgttaaccaaataactgtagtttgcagccaggtgatatctttccaagtgtcccaattgtttagttacagttcctaagcattaagtacttaaataagctaaggactatcctcactttatcttcaatttagacttacatcctggtttgaaatcaattccttgcaaactaaaggcagtgccataaataaaaatttttaaccttctaaaataaacatcagtgttagaaaataagtcaattgtattcactcaattgtatttgtttagaaataatcagatattatacttgtttcttgcacattcttgccttgtttcctcacctatgaaatggagataataatactatctacctaacaagattgacctaacatttttgttaatttctgggtgttagcattagtttcatttttttcactatttgtatttaaacgaagagatttttctttaaaacaaaaattaaaaagtgctggctattctaggagtaatattcattccaaataaacatacagtgatctttgaagtggtcaagcactagaaatttctgtagaaaattaatttttcattcatttggcatcgcataaatctaggttggaattggttcttcctctttggaaggtcagtccctgccctaagagagcggtatattaccacccacttcacaagactgttctaagaatcaaatgagaaaatgtgtttatgaagagtttaagaatttagagctccatgaatgataattacagtaatattgttcattaattcaaaaaacatttttaaggatccctcactactagggatgcataaaagttgctaaccctcggcctttacccagcgttagaagacaaaacagagggtaaaagtcccagaaacgcgttcgaaccaattcagctaggaattaaattctcagatcctttattacaccaccggagccttaaccttgaggcaagcagcaatttgttcatgcgcagttaacgctccctaaactgccacttgctcagctccgcgcctaaggtgtctattagtacgcctgcgctgtgacctagaatgggcgcatgcgccgagcggaactggctggtttgaaaaccatggcgtgggtaccagcggagtccgcagtggaagagttgatgcctcggctattgccggtagagccttgcgacttgacggaaggtttcgatccctcggtacccccgaggacgcctcaggaatacctgaggcgggtccagtgagtgattcggccctgggcgggtgggctggtcttctgccctgcccctgggtacagccctcggtgctctattcccgttccagtctgttgcgagttcaggtctattcaggattctggattacatcctaacgtgggcgagtttctgttgaacgtgattgcacgtatcaagatgtgtgctcttagatttgttttcaatccagataatttcagaaatacattgtttagtacctcaattggaagtctgaatttttttctgatttcacaatgaactgtggaagtggatcgcttgttttactacacctgagcaaagcacaacagaaatttaatttatcgcgtttattacttatttgtaggatcgaagcagctcaatgtccagatgttgtggtagctcaaattgacccaaagaagttgaaaaggaagcaaagtgtgaatatttctgtgagt

SEQ ID NO: 97204 - DNA, 35427 bp, Homo sapiens
ctcaagggatctgcctgcttcagcctcatgagtagctggacatgcatttccatcttgctctgtgttagctgggggaggccagctcctgaaagcccttgcccttcccaaaatgctgggggacgtcctgacccccccatttgtccttcctgtgtctctctggctatctgtctgtgtcttcacctctctgggtccccaccttccacagcccctctccggtgacccccaaactgcagctgtattctcctgcagaggagttcggcggtctctttgtgggtcgtttttatctcatgccctcaggcctccctcacgtgcccctggccctaattaaggtattttcctaaacaagcccagttgcgtctcttaaaatgaattctggtgccagctggtaaaattaatttttttctcatcctctacaatgcaagaatgaatgacacacggtcgcttgtccacaggaggccggcgtcctgcggaaggacaagcgtgtagaccagtaattacgttccagtgtggaaagtgtcccacatgagtgcggcggagcgaggtagccctgaaataaggggcatccccacggtgcagctactagacatggctaaggttgatttcacactcaccctcgctggaccgtgttggatagtgtcagccaaaatatatgtctccctagaacctcagaatgtgaccttccttggaagtagagtctccacagacataattagttaagatgagattgtggcagggctcagtggctcacttctgtaatcccagcactttgggaggttgaggcgggcggatcacctgaggtcaggagtttgagaccagcctggccaacatggcgaaacctcgtctctactaaaaatacaaaaaaattagccgggcgtggtgccgcgtgcctgtagtgccagctactcaggaggctgaggcaggagaatctcttgaacctgggaggcgaaggttgcagtgagccgagatctcactacttcactccagcctgggcgagtgaagtagtgaagaggctgtctcaaaaaaaaaaaaaaaaaaaagataaggttgtattggagaagggtgtgctctaatctaatgagatgtccttataagaggaagaggcatggaccacacactttgggaggtcgaaggtggaggatcgcttgaggtcagaagctcgagaccagcctgggcaacagagcaagactgtgtctctacagaaaatttctttttcttttctttttttttttttttgagacagagtctcagtctgttgcccaggctggagtgcagtggcgtgatcttggctcaccgcaacctctgcctcccaggttcacgccattctcctgcctcagcctccccagtagctgggactaccagcgcctgccaccatgcctggctaatttttttgtatttttagtagaaacgggggtttcaccatgttagtcaggctggtctcaaactcctgacctcaggtgatccaccgcctcagcctcccaaagtgctgggattacagatgtgagccactgtgcccagccacttttcttttttcttttttttttttttgagttgaggtctcattctgctgcccaggctggagtgtagtggcaccatctcggctcgctgcaatctctgcctcctggattcaaacaattctcctgcctcagcctcccaagcagctaggattacaggcacctgccaccacgcctggctaatttttgtatttttagtagagacgaggtttcaccatgttggccaggctggtcttgaactcctgacctcgtgatccgcccaccttggcctcccaaagtgctggaattacaggcgtgagccaccgcacccggctggccttttttttttttttttttttgtagcaacagggtctccctgtatagcccatgcctgagtgcagtggagcgatatcggctcactgcagcctcgaccttctgggctcaagtcatcctggtctccccaagacaatcctgacttccgtggagcccctgggtctccagaaacaccagtgacagccctctctcttgtgttctgaatttcctatgtaaaaacctggcttgtgtgaagggggctggtaattggacatctgtaaagctccttggcagtggggccccgtcaaagctggcagtcgtagctccgtgttaacaaggtcaaggtctggtcaaggtttccagtgtggtccccttatggcctaattagggacttgaatgggttggaacactgattgagtttcagttcagaggctattttgatgttacagttcaatcactttagaaaatatagattcagttctggttcaggctggaacactaggtgtgtgtctgtgtgttttaatctttgatttagttcatggttcagtatcaaacttaatacatttttcacccatcatcagattaacaaagatgagagaaataatcacgcccggccctcgtgcagggtgttagatgggccgtggtaatgcggggctgccgccaatgtgaattggtacctttctgaaaagcaacttgacgtcatctgtcaaacgccttgaggatgtccagaccctcagacccagcaatttccgcctccagggatttatcataaggatataatcagaggtgcaccaagatttacataggagagttgctttctgcggccttatttaaatcatggaaaaatcaggaatcgctgaaatgtctcacaatagcggtctggttaataaaaatacgatagcgaccgttgtcttacaacgccttgagtagcagagggaattgtgtatgatacatttcccgcagaaggggaaacgttttaattaaagccataactgacgtggagccggaagaagcctgtgaaaggacgttcttgcatcgacctgccaggcctttgtgctgccttagaagcagccgctttattgcaactgtgaatctctatggtttaggagagaaattcattctttaaacaaaatttgagtgagcgctcggtgacacggactgggcttacaatggtgaagaaaacaggactcagggaactcacagacgaatggagaagacatttaataaaataagacctaacatttcaccactggcacaagtactttaaaagcattaatttatttaataccagagccagaggccaggcacggtggctcacgcctgtcatcctagcgtttttgggaggtcgaggtgggtggattatgaggtcaggagttcgagaccagcctggccaacatggtgaaaccgtctctactaaaaatacaaaaagtaggcgggtgtggtggcgtgtgcctgtaatcccagctactggggaggctgaggcaggagaatggcttgaacctgggaggtataggttgcagcgagccgagattgcaccagtgcactccagcctgggcaacaagagcaagactctgtctctaaaacaaattaaaaaaatatacctcatttgagctcataggagctttgaactcctgggctcaaggaatcctcccatcttggcctcccaaagtgttgggattacaggcgtgagctgttgccacgctgtgttttgttttgttttgtttttgagacagggtcttgctttgtcatgtggagtgcagtggtgcaatcacggttcactgcagcctcgacctcccagactcacgcaatcctcctgcctcagcctcctgggtagctgggactacaggtgtgcatcaccatgcctggctaattcttttttgtttttgtacaggcagggtctcactatgttgcccaggcctgtctccaactcctgggctcatgtgatcctcccatctcagcctcccaaagcacctcccaaagcacaggcgggagccaccgcactgggccccactcctcctgaggcagaggcttggatctggcacagcaccccttctgctgtattccctgggctgaagcaggtcacacgccagcccaggattttttcttttttctttttgagacagagtcagtcttgctctgtcacccacattggagtacactgacgcgatctcagctcactgcaacctccgcctcctgggttcaagagattttcttgcctcagcctcccaaatagctgggattacaggtgcacactaccacgctcagccaatttttgtatttttagtagcgatgggggtttctctatattggccaggctggtctcgaactcctgacctcaggcgatatgtctgccttgacctcccaaagtgctgggattacaggcctgagccaccgccagctcagatttaacgtgagaggatatcagagacatagttcttgccaaccacccacagaccaccacccccattttatagacaaactgagacggctgagcaaggtggatcctacctgtgatcccagcactttggggagccgaggtgggaggatcacttgagcccaaaaggtcgaaaccagcctggccagcatagcaagaccctctctctacaaaaaataaaaatcttagccagccatggtggtgcgcactgtggtcccagctactccggaggctaaggtggaaggatcatttgagcctgggaggttgaggctgcagtgagctatgactgggccgctgcactccagcctgggccacagagccaaacttcgactcaaaaatgtaaataaaaataaaaaacaagtgaaaggtgaacattctcaacttgataaaggaaaaaaaatcagtcgctgaggttgctgggatcgaccgaagacacaaaccttctattcccgcaaatgtgagaaggaaaaagaagttagagccggctttgctgtcgccccttccccttgaagagtcggggccagtgcgtgacgaatgctgctgtaagtcttttaattttttccttttttgagacgaagtcccactctgttgcccaggctggagtgcagtggcgcgatctccccttactgcaagttccgcctcccgggttcaagcgattctcctgcctcagcctcctgaatagttgggattacaggcatcgccaccacgcccggctaatttttctatttgtagtaaagacggggtttcaccatgttggcaatgctggtctcgatctcctgacctcatgtgatctgcccgcctcggcctcctgctgggattacaggagtgagcctgtatcttttttatagagatggggtctcgccatgttgcccaggctggtctccaatccttgggcttaaaggatctgccaattcggcctcctttgcttttaaagaactgtgggggctggcgaggtggctcaggcctgtaatcccaatactttgggaggccgaggcaggccgatcacctgaggtcaggagcttgagagcagcctgatcaacatttagtattctctactaaaaatacaaaaattagccgggtggggtggcgcgcacctgtaatcccagcaggaggaggctgcagtgagctgagctcgcgccactgcactccagcctgggtgacagagcgagactccgtctgaaaaaaaatcaaaaaccgctcagggaaaggcctgacactgatggagcgaccgctccggggctcccgccacccgcggctgtttccggtgccccccggggtcttgggaccctcccaaggtgggtcctgctctagttcagaagcttatgacgcctttgcggggatgcctggctttgggatcggttgggatctgctggaattgggtccgtggcgcgcagctcccgggctgggaggtgccgtaggacctggaagatctcgaaagttctggaaggttctctcagggatcgccgcgggcgggggagcctgttttcccaccgagacccgcgagggcggtgtccggggtctgactgcaggacaaagggccgggagcgcgggagggcggcgcccgggagcggccacacatgccccgccaaccggtctcctcaggcagcactcccgggaaaaaggggtagacgcgcggcggaaggggcggggccggcgcgcggccgtggacgccggagagggcgaggccggcgctccttgggagcgcgcgcgtcccattgggcagcgggcggaagggggcggagcttggcgccgccgcgaggcaagccccgcccccggccccgcggggagcggcggcggcggcggcggcggcggtggcggaggcggtgagcgcgggcggcgcggacggcagcggttggcgggcgggtcctccgctgttgcggccgctgcggcctccttgcccgggcttggggcgccgcgctggggaaagccgggggcccggtgagcccgcgggatgcgtcccctcggttccgccgggcggggctgaggcgaggaggccgggcctggggggagggggggccccggcctagagactcctccgggagcgcccggtccctaccgccgtgggtcccccactctgcccggacccccttttccgcccctggcgccgtgggcccctcactttgcctggactccttttcccgtccctgccgcccggaccccatctcttgcttggacccgctcccccatccttgctgcctggacccctatctccttccctggatccccctcacgtctgccgtgaaccccatctcttgcctggacccccatctgcttccctggattccccacccccaaccgtgaaatcccccatccctgccacctggaccctccgctccacctcctccgtgagccctcgttcttgctccctgagcccccccgcttctgctgtgacccccttctctgttgcctgaatcccccgttcctgcaagccgcaacccttcctccgccatgaaatcttgtccctgctgcctggacccctacttctgctgctgctgtgatcccctctcttgctggaaacgccacccctacctctgctgggaacctcctcttccctgctgcggggacgcccccctccgttgttgctaaattccacccccacccccaaacctccttttcatttctgtcaacagccaagccagtccttcccattgatgctgtgaacggtctgcagctgtccccgttctttcagggacatggcagccaaaagagcagtcgtttttccgctcttatttttgtgtgtgtgctgtggtcaactgttaactccccaaattggggagggttgtgagctttgattgtgtaaaatgcctctcctgccgaggtcggaggcaggtcttccgcacggagatgatttattcaggagccttttaaaactgatctagatagaacctttgggagggactgtgctgtattttatttatgaaaaaatgcaggcgcctccctggataccgagccccgtcgtttctgtttgtcagtctgctttttggcattgagcatctcaatgcaagattgtggaattaaaccatctacttgaggctaagtcgagctaacctttgcccctgagggctgtgtctgcgttaacatcgccagcaaacagttgtataaaccaccgtgcaaatttcgttccaggacacattggcgtgagacctgggagtacgttgtgccaaatcattgccacttgccacatgagtgtaaatgatggcggatgccaagtatgtcctctgccgatgggaaaagcgattatggcctgcgaaggtgacagccattattctgtaacttcaggacttagaaatgactttcgggtgacaagtaaaatcttgatcaggagatacctaggatttgcttcagtgaaataattgagccagaacacggttggcactgattctcgttccccatttaatggggttttggtctagtgcttccaaggttacacttccagaaatgtcttttttttttcacactaaaaaaaaaaaaaagaatcagctgtaaaaaggcatgtaaggctgtaactcaaggaaagatctggcaagcagccctgtgatagtaaattatggtcgtgttcagggaatgctttccagcaattcagtagacagtgctcagctgcaatgcaaaagcccaggtccttgtctttgtctgccactggcctctcatgcctcagtttccccatctgtgaaacaatggggattggaccaaatatctgaaatcccatggttataggccttcaggattacctgctgcatttgtgctaaagtttgccactgtttctcactgtcagctgttgtaatamcaaggattttcttttgttttaaatgtaggttttggcccgaaccgcracttcaacaaaaaataagagaagaaaggaatattttctagctgtgcaaatcctctcyctagaggaaaagttaagtgttgtgttgttttaatactgttttttcccgtgtagatttctgatacttcaatcccctactcccccaaaacagttgaagcccagcccactcttaatgggcttattcaccatttgtgtaattcattaatgctcataataacctcatgagaaagcaactagtttgattttatgtcagtttggaagctgaagatccaaacgaggcattctgtgagatctatggagagattggtacaaacactgaatacatgtaaattatactcagggtagaccctatttgtggttaaaatagggatatttccttttttttttttttttttgactgtttcttaatcagtgccatgccaggaaaatagggatgtttccttcccagagatctgtgtgtcttttttcagaaacrtctgtgacaggcccatcaattttgaaatatttggtttttgagcctgtcactctaaaccagcgtttaacgttcaaaaggcaaataactgatgaccaggcggcacattgttctgctccgtgagtgtctggcactgggaaaggtgtagattgtctagaatgacagcaattccgacgccccagtcagtcctgcgtgattgtggcgagggcgcgtctggcaccgggaaggtgtagatcatctagaatgacggcgattccgacgccccggtcagtcctgcgtgattggcgagggtgcatctgtcgtgagaattcccagttctgaagagagcaaggagactgatcccgcgtagtccaaggcattggctcccctgttgctcttccttgtggagctccccctgccccactccctcctgcctgcatcttcagagctgcctctgaagctcgcttggtccctagctcacactttccctgcggctgggaaggtaattgaatactcgagtttaaaaggaaagcacatccttttaaaccaaaacacacctgctgggctgtaaacagcttttagtgacattaccatctactctgaaaatctaacaaaggagtgatttgtgcagttgaaagtaggatttgcttcataaaagtcacaatttgaattcatttttgcttttaaatccagccaaccttttctgtcttaaaaggaaaaaaaaaaaaaaaccattcaccagggttcttgctgcctgtaacctcaggcagatgaattcctagttggctgtracttttggtttaagtggaaggttgaggaggaaaatgaaaataattcttttgttatctaaaggaaaacatgtttgaaaatgtcttggcggcgttggctggtggtgtgtaacgtcgattttgtctctgcagaattaaggtgaaaagcactgaagttgagatcctagagaagtctcaaattgaagccattgcttcctcgttaggtaagagcgtatttttaagtggccactaggttttcataaaataagaggtcatttgggagaatgtgaaggctcagctttctgggtaaaaattcaccctgttcaccatgtttttcttcatacaagggaacgcgaatcccctgagctgaaggagaaggaaaaatggatccgctttcttaaacctttccagaatttgcccctagaaccactcctattcttgacgcccagaatggtcagtggtgagcatcaaggtcatctcgtacccycgtggcctccagtacacaagacgaggaaggactttgctgccataaggggggaggtcctcctttttcctttcctcttcctatagtaagatttgctgtggtactgtcgctgcctggccagtctggtctcagcccaaggtttgagaagcagttggttgtgtgtttaaaattccagagcagagcccaagggagagaacgggtggcctggcactggggttggtggcacccattgtttgaggcactgtcatggggggcacgaggcaggtcggaagtggagctctcggcttcccatccatccgggtgcgctttctcccaggccttcagtttagcacccacctcctttgcacactgtgggtgagaaaagctttgcctgagtccagccggggactggtcatgcacatacatgacaagtgaggagcactggtgactgcctgccccctagccacagttgtgcaaacccaaacctgccagccttccttctcaaagtggaactgtttatcccatttgcaaataattgtttctcttgtgaaaagatggaccggaattccttccaatgaygtttataaaatcaggtctattttcctgtgtcttccgaaaaacagctcttgtttaaagcaggatccatctctgcataacttaggccgggctgaccatcatcttggatggcgtcgtccttgttggcgcagattgtgttggggggctggttgtttgtgggcgcctttaatattcaaaggggagaatactgttctgattgaggcattatgcccgctgagttgtgatattacatccatcatcttgttcaaataaatagcgccgtatctatatgtcggaatgaataaataaaagtgctgcagcagggaggttgggctggaaaccagaggcccacgatgctctttgctggctttgaaatgcccttgcaaagaagtattgaaaatttaccagcccacaatgagtcttttaaatctccttttccttgctaccaccaacccctgcaccaaccaagaatacgttgccagcagagttctttatttagttggcattggtttttattgaccctgattgaatttgaaattgtaaggctgagagaggatttgcaaaacatttgaatacattttgctcacggtattgttttgtaacttggaggaatttatctttttagccaatcaggttaaggtcaataaatttggtttttaaaaaaatgaagcctcgaatcccggaatgaatagctgtcgttctgtagcctcgtctcctttttgggaaaatgtaggtgagaaatgttagtcctccccttcagtgatttaggtatgaaactagccgtcagaatgagacaagcgagcttctaaagcgatgccgtgaccrcagtgcctgtgcagtgaacgtaaccggcattgtgtatgttyggtccttgcagcctcacagaatgaggttcctgcggcacccctggaagaactggcctacagacggtcgcttcgcgtggctctggacgttctgagcgagggctcgatttggagtcaagaaagctctgcagggacaggtagagctgaccggtctctgcgagggaagcccatggagcatgtctcctcgccctgtgattygaactcctcatctcttccccgcggagacgtgttgggcagttccagacctcacaggaggaggccatgtgtgcaacaaagcytgtcaagttcgttcacttgtgaaaaggaccccgagtgcaaagtggaccacaagaaggggctcaggaaaagtgaaaacccaagaggcccgttggtcctcccagctggaggtggtgcccaagatgagagtgggtccagaatccaccacaaaaattggactcttgcaagtaagaggggargaaactcagcgcagaaggctagcttgtgcctgaatggatcttccctttcagaggacgacacggagagagacatggggagcaaaggaggcagctgggcagccccgtccttgccctccggggtcagggaggacgatccctgtgccaacgctgagggacacgaccccggtctgccgttgggcagcctcactgcgcccccagcccctgagccctcggcctgctcagagcctggagaatgccctgcgaaaaagaggccgcgcctggatggcagccaaaggccgcctgccgtgcagctggagcccatggcagcaggggcygcaccatcccccgggccggggccagggcccagagagtctgtgaccccgcgcagcaccgccaggctgggcccgcctccctcccacgcctctgcggatgcaaccagatgtcttccttgcccggattcccagaagctggagaaaggtaaaagtttctcgtggaggaggagagcgcagagggtggagtcctgctcctccgcagccagactgggagccaggcacgtgggtgtttttgaccagattttaatgagatcgttgccaaaatagacttagagcagagacttcctcattcctttttgtctgtctccccactgggctataattgcttcaacttctaaatatttgtcttcttatttttgtttagaagggaagggagttgagtgagtggggagcccgtagaggggcggcgggccacgattgtctgcggcgcggctgggagcattgtggctgtgctgaggccgcagctgcggctgcaccccgaggattaactcttttaacggaagcagtaacgcattcctattaaattgggcagcaatctcaaaagtgattcactcactcaaaagactgactttttaaagaattcctgtgcagatatatttttgtgtggttgcaggcaagcactgtgacttttttccttttaacactgtagcatcctttattttttaaatgctagttcagaaatcttaattaccacatgatcaaatgtctggaaatctacttgctacaaacttaccgcgcagatatttcagtctgtactctgaacttctttcctgaggtcatcatctccttagcacgttggaagcggcagggaactgaggttgccacgctctgaagacaaagtgaccgcacccctaccctgttccatagtcagctcccgtcccggccccctccctgcgtatccgcaccyctgtcctgttccatagtcagctcccgtcctggccccctccctgcgtatccgcacccctaccctgttctatagtcagctcctgtcctggcccccyccctgcatatccactgattgcttcagatgtgaagggacagccaggccgggacaaaagggattcccacccagggtgcgcgcagcttctgtggccgaggtggctgctgcttacggcccgccttcccttcaccgcaggcctctctccctccctccttscctccttccctccttccctcttgcgtttttctttaaaatgtagtttattagaagcgcactctgtttgaatttggcagtgtggagttgtgtatagcatggaaccttttctttatgcatcgatggtcatgtgtcatgaaatgttttcttgggatgagtcatcaagacaatgcaatgaccatgaaagtctaatatcacattattggcagagtgccagtcttccgaagagtccatggggtctaattccatgcgttctatcctggaggaagacgaggaagacgaggagccaccaagagtccttttataccacggtaagaaatgatcagggggcgccggcagtcctaacggtgcgctcagaggcagcggcggcggggctccgagaccgggccccacattctccatgaaaggtctcctgcgagttcatttctctcccactgaaccgagacctggaagggaccttcagaagtgtcacgttttcagtcctctatcttaagaataacctacacaaagggacgagagactcctgggaagagacggcccagccctccctgttagagcattactcctgtcactkacctcaagcccttgtcctcctgtcccctcgcggggagtgagggatggcccagtgagccgaggggctgcgtcgccattgctcgggtgtggccacgtactgtctcgcggcttccgttggtgatggcgtttggggggctgtccagggaggcagggccttcagcccaagagtgaactgctcccgcgcccctcctgtaagtagctgcttgcactagaggaaaacctgcctttaggtgcccctgagcatctacgtggaagggactagaaatgagagacccaaagatctgagccagccgcgaacagaaagtcggcttcgcaaaccaagtcacaagaaccagccccacttgagactcgcccgtgaaccattcctcttaaccaagtcttgtttttcttttctttaaccttctagtttcagaataattatagattcacaggatgttgcaaaaatagtaaagggaggtgagggggcttctcacccgggcttccccactggcagcatccgtaaggcgcaggatgtccccggccaggaagctggtgcgtgtgcagcctcgggagcgccattccacgcacacttgcgtgccggtggccttgttatgtcgttctttttttgtctacactgtttgagtgcttttccatcattgaaagggcttcattacagtctcacattttcccttttttttgcctaatgctaatggtcagactttttaacagttttccacatgctcttctgatccttttcctctggggtgagcagtcaccactcaccaaaccctgccccacccattgggcacctgtctggatggtcccaggaccgcaggtgctgtggggcacccattggggacttccaggaaatcatttctgcaggatccgttcgcacacacgaagagcacagtgccctcgggaagggccctttccgaccacgctgccccactggggttgggtcaccgggacatacagaggctggtgctgcctggcttctcctgcctgcggtgggagctgggttttgctcccgtttggttttgttttctacctgtcaggctgggcgtctttctgagggttccctgaccggcctctgaattgattgtttgtccacgtgggcctggaagtttctcttaaagactaaatgcccctcactggggaaacgacgctgtgccatgttcacagcagacactcaccccagtgggcctccctttttctctggtcacgttggttacttcataggcctttaggttttgatctgtgtttatggaccacggcacttccttccttccacagtgcggtcagacacaggctttgtgtgtctaacgacagactgtttccagtagtttttctaatactttagttttaaaattttaaataattcacttgttttttggcattgaaaatatttcattcataaatagtttctagttatgatttaaataattttcccatttttgactgtagtttcccagaatcctctttagaatctcagtccttgtgtttgggtcttctccgcgtgccattacctcacctctgttttgtgccacacactctttaaaagtgtcttcccgcggggtttagagttaggaaagtcgygcacacataggacagagccccagccgcccctcgtggcacccctcccatcccaagggtgcgtttgtcgcagctgggaacccagtgcagcaccccactcagctgctggtttcactgtctcrtcattggtggttagactcaagtagtgtggggtatgtgaatctgcctttcagattctcctgatcttttaagcgaatgacacaaagtcaggttttaacaatatcgtgctaactgtgttttctcaggctgttacacctggtgcttgatatggatttgacttgtctattcttttttttttgtttttcttttttctttaattctagaaccacrttcgtttgaagtaggaatgctagtctggcataaacataaaaaataccccttctggccagcagtggtaagaacagcttcctccgtcttctcagatgtagttacttaaatttcatgaatttttattccatccatctttagttcttgataatttgatcaggataaatgttttcattgttttgtttttcctgggaaaagttggtgggtttttagaaaagacttcaggagatgcctgtacctaaattaaggcacaatggtgttaagttgataggccacattttcaccaagcaggcttagaaagacctactcgaaaaaaatatttgcggccgggtgcagtggttcaygcctgtaatcccagcactttgggaggcygaagtgggtggatcacctgaggtcgggagttcgagaccagcctggccaacatggtgaaaccctgactctactaaaaatacaaaaaattagccgggcgtggtggcgtgcgcctgtaatcccagctactcgggaggctgaggcaggagaatggcgtgaacccgaraggtagaggttgcagtgagccaagactgtgccattgtactccagcctgggtgacagagygagactccgtctccgggggaaagaaaaaggaaaaaaaagaattgtgatttgctcattttaaatattgtgcatttcaccccatgagagctcattaatttggattttgtggtggggttggttgcatgtgtacaaacaggaattcgaaatcctgtccaagttcccggtgtgggtgatgagttcaagccggggcagattctctgcttctgtctctgcaggcctggaagttgcaggtcattggtttgggtgctgtcctggccttcgcctctccttcatatcttacccctttttccctttatcctcctaagacacaaacgccaaaaggcrttggccctgcagtaatccagagacgcctttgttgctctaatgactgacctcactcgagtcacccaggctccttgcatgtgactgattgtggttcygggaaaccggggattgaatctgtgtggtgttcgctggggaggttcaacacgtttatggcctagctgggctccttgtgtcgcctrctggccggcggwgatggaggccgggcttctggaccctccgccctcccttggcactggtttcctctcccgcaccttggtagtctttcccttgttttcatcagtttctggggtccctgctgggttaacaggtcactgatgtgacaggttcctggggcataagagcaggcagcctccctgagagcgcagggcggaagggccatcggaggcgctggtygccastgctcctcactgccttctcacggtggccccgggaggccaggactggggaggctgtggggaggtggcagcgccctgtagtccctgcccctccccgtgtggcctgggcttgttcccgagcctttctgcacttcctccactcacccagagcattaggaggacaaacctgccctgctgagccgctggagaatctcaggacgcttatttaaagaggcagctggcagcggtagctgtggttctttttattcaaaaacccaaacaaaactggctgattccgctcagatgggaaaacgttcaagtgatgcgtgtggcagagcatggggccgtttctcagcgcctccttgcgggagacttcgctggggtcacccccwgagctggggtcagcgcctgttagatgtatcatgtgatgtcacaaaaaaatatttaaaatccacgatctcttttgttttgacgttttattttcttggatttgtgaacaggtcaaaagcgtcaggcagagagataagaaagcaagtgtgctatacatcgaaggacacatgaacccgaaaatgaaagggtaacccgctgttcttggtttctgtgaatgggcctgaggggscaggccggccgctctcagagtcagagcgggcrtggggatggagggacagaggggagrccccggcaggagtccaggcccgggcagggctagtgaggtctcactggaggtgtgcccttcttgtgrcctctcactccctgggatgggtgagycagacagaggctgggtgtgaagggtctggtcaaacaccccagttttcacaacttgatttgctggctttgaaaggcagcccaaccagacactcactggggccctgtttcccacaaaccagcaaaatgtccacgcaggtgtgcagacagcatccctgcgtccacctgagtttgcccctgggttacctggtcgttccttagtcatgggatgaaagcacacgtggatggatcagccggctgaaagcagcctttagaaccatcgcattgcatatccccaagtcgaacgcgcagaaccggtgtcatctggtacttctgtgctgcccccgaggggtgggaggtgkggagtggagacccaggccccgaggtcggcctgtcctggyggggcccagtcagtgttgctgaagtcactgkacccaccatggtgcrttgggagcttcttggcagcyggggaaayggtcaccttccataaataagctggggctggtggggcctccagcggcctccactgatcttaatcagagacaggraaaggtttttagcttattagaggaagttcattcatgttaacttttccctctctctgcttcaagtttcacagtgtctcttaaaagtttaaagcactttgattgtaaagagaaacagacgcttctggtaggtrgatgatgttttgtgcttgctttaaatggtttactttgtgattagtaaatatgtyctctgtgtgtagctcttgaaatccatggctgcggtgtacgcgtgtgaatgattgtgggaagtagcagagccaggctgcgctctggccgttagagttagatcgtgggctcagtcactgcgctgaattctcacaactgtcctgggaagttgcggccccatttccccgctttacgggtaaggaagctggggctccggcgaggasagtttacccagggccaccaggcaaggctacagcagagagcctctgcgcaaggccaccgccttccctggccgactgtctcagtccaccccatgtcacggtggcctcggtagccagccccttgcggccgggggcgtccctagctcagcgtcgggagccctgtgggcgctcaagtgctgcagtgagcctggccgataccacgtggcagacgtcttgctgcagagtggcttcctgctccctggatctgcagccagctttcatcatgtgctgtcgatgaactgcaagggatttgtctaactcagaaatgtctatttcccctctggaaatactcattttgttgtggcgacttccagcaccaacacgtcaactcagtgcagttatttttactcctctggaaaaaaagaaaaagtggttgtgtcttttccactctcagggatctgagttactttcttttgttttttttgagacggagtctcactctgttgcccaggctggagtgcagcggtgcgatctcagctcactgcaacctccacctcctgggttcatgcgattctgctgcctcagccttccgagtagctgggactacaggcaggcaccagcacacccggctaatttttgtatttttagtagagacggggtttcatcatattggccaggttggtctcgaactcctgacctcatgatccgcctgcctcagcctctcaaagtgctgggattacaggtgtgagccactgcgcccggctggaactgagttactttctaaaaatggatgaaggtgtggggtgaggagaagagcaggaagttccgtgccttaaacgcagaagggctgccgtttatatcaaaaaccctgggttctgagagcacagggtgcccgcttcttcttcctaagagtgcgctcacatctgcttgtgagtcaggtrtgtggtggtcccgaagcccacttgattcagtggtagtcaccgtggcttctgagggatgatattggggaagccgtgctttaggaaagtgcgggggctgctgggcaggcagagagcggcgtccacccggccctgggatgtgcttatggggtgcccccgtacccctagtggccctcggctccagagtcttccctgggtcattgtgtgatggtcgtggctttatggcatctttgggacggctgtgtccttttctggggacccaccctgctgccagcccaggtgctgttagagcagcccaggtgctggcctagcctggctgcagacgatagctcccaacaaaaacggctgttagagcagcttatttccaggacttgatgtcctgtcatgtggcacagtggccacaggggaggtgtttgcaccgtcgatgcgttcagaccagcccaagccatcgggtccccggtgcccacctgcgttcagaccagcccaagccatcgggtccccggtgcccacctgcgttcagatcagcccaagccatcgggtccccggtgcccacctgcgttcagatcagcccaagccatcgggtccccggtgcccaccatttgagcagctcagggcccagacctgtgcctggtgcgtttcccatttaccagagggtccctgtgcgaggcgtctgccagagccccctttgtcagggagggtcagaggtgcgggctggagcgtgagcagcctggacacctggctggtccctgggctctgcgtggcttctgaacccagggtgcttggcactgcctcccactgacgcctgctgcccggatctcattgtagaatcaagccagggaggacttcaaccaggacatcggctggtgtgtctccctcatcaccgactacagggtccggttaggtacgtggggtgctggggaggggtggagctgggcagcaggcgtccagcctctgaagaccccttggacgggctgggccggagctgcctggaggcggggcatatttccgtgggcctggggcattccctgtgggtgggctggggttctggcctggcctgattatttcctaaacagagacgccgggccagcccctggaacacacttcctgggactcctcttaggtctacacagtgctctctcccctccaccccctgcaggctgcgggtcttttgctggctctttcctggaatattacgcggctgatataagtaagtctacaggcacatcttggaaaatgtggtttgccttttagccctttagaaaaacaatcttctatgtctgaagctgtggaaggggacgttggggtcaaggcactgtccgcagccacacagcattgttcaacctctatgaggttttgatgtgaccctgaggctccctgggacctggggctgctggtgtccactggcacagcatcccgagcctgccctggggccctcatcccatgggccacatccagcgtgtccctgctgtggctggtggctgcacacatcagatgttgtgaagaatgtaggccaggtgcggaggctcacacctgtaatcccagcactttgggaggctgaagcaagaggattgcttgaggccaggagttcaagactagcttgatcaacagagcaagaccccatctctacagaaaaatagaaaaaaatgagctgggcgtgtggcttgcgtgcctgcagccccagctactcgggaggcagaggtgggagaatggcttgagcccragagttcaaggctgtggtgacctatgtgattgcaccgctgcactccagcctgggtgacagagcaagacctggtctcaaaaagagaacgtgtcacgaacaccgggatgtttggccaccacttcactgtcgatccagcattttcctttatcgacagtagtggagttttccatgcctcctggttggtggaggagtggacgtggctgaattgattctgcttgggcagtgctgcacgggcaggcgcttttctctgctataagggttaaacctggctgcagggcccagtgaggggggaaaggccgggggtcccagcagaggaagtgtctttaggagcgtgaatgctccactcccgtgctaacacggagctcgakcgctagggtctgcccccatccctgccatgtcgcagcctcccatcggccctgacccacagccacccgaggaaggcagcccacgcgctggtcccacgacaggtgcttcttttgcaggctatcctgtccgaaaatccatccagcaggacgtsttggggaccaagcttcctcaactgagcaaggggagccccgaggagcccgtggtggggtgccccctgrggcagaggcagccctgccggaaaatgctccccgaccgctcgcgggccgcccgggaccgggccaaccagaagctggtggagtacattgtgaaggccaagggcgcggagagccacctgcgggccatcctaaagagcaggaagccatctcgctggctgcagaccttcctgagctccagccagtacgtgacctgtgtrgagacctacctggaggatgaggggcagctggacctggtggtgaagtacctgcagggcgtctaccaggaggtgggggccaaggtgctccagcgcaccaacggcgaccggatccggttcattctggacgtgcttctgcccgaggtgagccgcggaccggcgtgtcacgtgggcagggaggggcctgcgctgggattttgcaactccgcacgaggaggctgccacggtcctcgcccctgctccctggccgttcggcggccaacggagcgtggaggcctcctgtgtttacatcctgtcagtgctgggaaatgcgagtgcgtgcgcttgaccctgtgcggagacggagccgcttacttgacccctgtgcagagatggagctgcttagaagctgtcagcaccagggggtgcgaactccctcccyactgcgggcgcacagatgcttcccagcctcggtgggtcagtcctgggaaacccactgcgagttggaaattcccaagtcagaatcgcatttagtacccagataaacccactgtaagttgaaaaactgtaagtggataatgcgcctcatactctgataaacccgtggtaagttaaacacacaaattagactgtctgtgatttcgaacttcagctgcggatttggggcttggtgaggagcaaatacagatgattttgaagtttgtatctgaaatttcagagaggacattgctgggcatatgtgtacatctgtgggaaaaaaacatactcaaaactatttaactttataactatgggaattttcaaatagacccaaaaagaaaatagcataatgaactctaatgygcccataacctgcctggaattattttttggagcataaaaaccctcaagcttttttttttttttttttttgagttggagtctcgctctgtcacccaggttggagtgcagtggcrcaatctcggctcactgcaagctctgcctcccaggttcacgccattctcttgtagccttccaagtagctgggactacaggcgcccgccacgacgcccggctaattttttgtatttttagtagagacggggtttcaccatgttggccaggatgatcttgatctcctgacctcgtgatccgcccmcctcagcctcccaaagtgctgggattacaggcgtgagccaccactcccggccacagtttttttttaagcccataaatacttyagtgtgtgtctctaaaaggagggtgattctgccccctgggggacactggcagtgtctggggacatctgtgcttgtcacagctaagggtgcttctggcatggagtgggttggggcagggacgctgctcagcaccctgcagcgcctaggacagccccacctcagagaacagtctggccccgacgtccacagggccgagtgggagagactctgctctgaaccgaatggactctgttaaaaatgtgtttaccataatcacaaaagtaaaaaatagggatgatttcttaatgtcaggtatgtattgtgtattcrggatactcttttttttttataacaataaacttaaggccgggtgtggtggctcgcatcggtaattccagcactttgggaggccgaggcaggtggatcatgaggccaggagcttgagaccagcctggccaacatggtgaaaccccgtttctactaaaaatacaaaaattagctgggcgtggtggcgcgtacctataatcccagctactcgggaggctgaggcaggagaatcacctgaacccgggaggcagaggttgcagtgagctgagattatgccattgcgctccagcctgggcgacagggcgagactctgtaccagaaaaaaccgccaccaaaaaaaaaacttaaaatttttgagaaatgctcttgtgggtttgggtcttgccttttcttctctgcttttagtgatctgagctattgtgtctagtccgaaagatagtactgatttaattaagaaacatcattacaagcagggattcatggactaggtttgcaccttctgaaccatgagctagaccatgtctggaggctggaacctggtgacccaggctccctgcggccttcttaaccgcaggccacttggggccagttgggcagtgcctgctgctattgagccccgtgccctctcacaggccatcatctgtgcgatctctgcggtggacgaggtggactacaagacggctgaggagaagtacatcaaggggccttcgctgagctaccggtaggccgctcccggcgctatctccagccacttgcgtctctgccttgcagtttctatttccacacccacaggcagtttgactccaggctgccgcagcccctctccctcatgaggtggcccaggtgctgggtggtgagctgatcacatacgctgaactcaccctgtgggtcactcctgccccccaggaaggctgtgcccgggtctcccagctggtcgctgtgggcagcacggggccacgggcacgtgcctgggccgtgtctgttcttaatctctttttgcaggggctgatgtttgctttttgcactttcctcccctctttccacagccccatggctgtgtgagaaatacagcaagattaagcagcagcacggcccggtgctttccagcagccagaagaatgctgtgatcaagatgtttctctcacatccgtgtgcttagctgcccttggatgtttggcccccagagcgcctaatcctgtctctgggcatgcggccaggccttgctgggagccaggcggggcccacggggcagtgacaggctgaagactcaactagagtcaaggacagggtctccggccagggtggcttgcgcagccaccgacgtctcccgggcccacagtcacaggagactcctggtgaagacactgaactccctcaccagccccatgtcctccctgggcagggcaggaggggcccctggagaggccagggaggaggtgtggggcctcggtggcattggcaggccacccccgcagagctgcacaaaggtggaatttggccttgtttagggagtgttggcccagctggcttaccaaaacaggaaaggcctttggatacagaaactgggtgttttcctgctggatcttcatggttcccccgtcatgcttgccgtaagaataagtgaggtccggggagggggtaaggtcggagccaggacacctggacccagcctgctggtttgtcctctccctccgtctcagaagcctcttcaccgctccacgcccatctgtggaaatctttcatcctgatttttttttttgagtctgggttgccgacatcaaaacccgttaggagttcatcacagcttccagttgccatgaaagcctcccgtgacctgtgagaatggtgctggtgctgatggagaagttacttgggctgagcacacaggccgtgatttcatcacgccggggacatgctcaaaataacaagccagtgagcagcatcgcacttgatctttggcctcagtggagccttgggtcacacactgggcrtcctgggacccagtctccccsccgcacggcgtttcccaggccctcttgttcttttagagttgcaccatgagcctctctgcactcttcccaaggctgtcctcctcaggtctgcctttctctggtgctgcggccggtgtgctctcccctatttccakgtctgctggggcgcacatcagagccagcagccgttgttgatctcttttgatccagggcagccctattgctgagaggggttgctagctaagcaattgttataattttcctttacagggaggtcacttagtaaggacaatttggcatctcatactctttcgtaaaaaattatttttagtcagtcacagtggctcatgcctgtaatcccagcactttgagaggctaaggtgggaggatcctctgagcccaggagtttgaggctgtagtgagccatcattatgccactgcaccctagtctgggtgacagagcaacaccctgtctctaaaaataaatattattttaaaacattgttaaggcctggtgcggttgctcacgcccataatcccagcactttgggaggccgaggcaggtggatcacgaggtcaggagttcgagaccatcctggccaccatggtgaaaccccatctytactttaaaaaaaaaaaaaaaccaagcatggtggcacgcgcctatagtcagtcccagctactcagcaggctgaggcaggggaatcgcttgaacccgggaggtggaggttgcagtgagctgagattgtgctactgcattccagcctggtgacagagcgagactccgtttcaaaaaaaaaaaaaaatattacacatcctgtaaaagttaccatcctaacctycttaagtgtatggttcgatggcggtgagcactttcacagtgctatgcagcckgtactgctgctcatctccgaacttcatctttccaaactacagctctgtccccatcaaacaactgccctctcatatatatataatatatattatatatataaaatatatatagccatatatatttatatataatgtatattatataaaatttatatattatataaaatatataaattttatatataatatataaaatcatataatttatatattttatatataaaatatatattatatataaaatatattatatataaaatgtataattttatatattataatatatacaattatataacaattttatatattatataatatataattgtatatattatatataaaatgtacaattttataatatataaaacaatttaatatataatatatataaagtatgtatactttatattatatataaaatatataattttatatatcatatgtatatgtagacatacacacacacacatatgtatttatttatttwtttttttttgagacagagtcttgctctgtcacccaggctggagtgcagtggcacagtctcggcccactgcaacccccccaccgtgccttggttcaagcgattcttctgactcagcctcccgagtggctaggattgcaggtgcccactaccacgcctggctaatttttgttatttttagtagagacagcatttcaccatcttggccaggctggtcttgaactcctgatctcgtgatccacccacctcggcctcccaaagtgctgggattacaggcgtgagccaaagtgcctggactctctgtcatactcttttttttttttttttttttagagacagaatttagctctgtcgcccaggctggagtacaatkgcatgatcttggctcactgcaagcaccmcctcccggtttcaagcgattctcctacctcagcctcctaagtagctgggattacagacatgcgccaccacgcccggctgtttgttttttttttkktttktttttttttttttttggtattttttgtagagacagggtttcaccgtgttagccaggatggtcctgatctcctgaccttgtgatccgcctgcctcggcctcccaaagtgctgggattacaggcgtgagcgaccacacccagtcctctctctcatattctttaacacacaatgattaattactaaaatgaagactcttgttttctgaagggaaaaagaaatatttgacaaccagctccttgaagagcggaaccggcgccgtcggtgagggagcagccggctgtgctgtcagcggggcctggcggtggaagcgcctccagtgtgcatgagcgtgtctgaagatggggggctcagggggcacgtttgcgtttggacctgtctgtgcgttctcctgcgtggcagtcctgatttccatrcttctggagaatccatttcgttaacactgaaagccagttctcttttcctggcagtttttttcattttatttttggcattttttacaagataccgttcgggaaaggcttttgaaaggacggaagcgtattcactgtgcgccagtactcctggctgtgctgtggtttctcccgacgtgcacatcgatctcgtatgtgtggcatctgatattaaacgggaggttttaagaagcgtctgccgtgatcatggagcttcggaagcgggaatggttcttccgggtttgctgttttgtctgtttcccccttgtgtggtttccgcctgcgacagttccagaatttgctctcccactcagtgtgctctgcagctgtgaggaaacagccttcgttagaggcgggagcagagacgagccgctgctctgtgtcgtgtttgctgtggcygcagggagaggagcrggacacgcacctttccaggggcctctgtgtcccgcactgtgtgtgagtggaccgcagcgcgcagccacatgccctggctgccatgggccagaccgcctccacctcccccgcccgcctggcctgtcctgagtgcatttccctgcactgtgtcgtcactgcacagccagtcaccgcggtctcagtcatcggcgcggatggctatgctggggtcccagggtggccgcagcagtcagggtcactgtgggagccctggggtggagtgacaaaccgcattgtcctgtgcccgccatggcagaagcgcagcctttgtatggaggcccaaccgcgctcccgtctggagaagcggcttccggggtgtggctgccgggtcggctctggtccacagcacggtgccggggctgcaggttgttgagggctgtgactccgtggggctcagccaggctccagcagggtcagacgtgctgttaagagcaaagccacagacgatgacttgtccattctcagtggatgctccaggctgtgcctacacagcagtgctggtgacatgtccagggttccagggcccggtggcctgggagctgctttctccccactggctgggctgcatctggccctggctggaggccttgctttgaggggctgtgaccctcttcccccaggccctccccagccgacgacagccaccggagaggagatcggaacacgattgtctcagatgcagggcgctgtgcgggacgaagccgcaaggactctcgtatcgggcccttgggactcgggaggtgccagaggcggcggctgctctggacctcggtgttcactgacctttgtttcacttgcctctgctcgactccgagagcaggaaacccggccgtggcctggcagctccgcctcccatgcccgcacgctggggtctgtcttgtctggagcagtggggcacaccccggaggaggcgggggtcagggctgtcggccttggccccctgctggtcgctgttkcggggactcggggcggccagtaccaccgcctgaggcggggctcagcagcgttgcatgtacgggcctcgtactgcctcatggaaaatcctccggagccgccctccattgtgggttcctgagagtaggacacattgccatggttttgtgggaatcacgcgcccctgatggaacttttctgctgttgtgaagtacttttatccatttgcttctctgctgaccttgccaagttgttcgaggtggaattaaacacctcccagacctctggcttgtcttttctgaacccccaaacacatcccactgcatgggttgtccaagcttggaaatgggagagtgaccctgccatccccagggacatggcctggccttggggtggattcccacctcactggcgggcctagggtgctgtttaaacagcagccagaggctgggcgcggtggctcacgcctgcaatcccagcactttgggaggccaaggcaggtggataacctgaggttagaagttcgagaccagcctggccaacatggtaaaacctcatctctgctaaaaaaaattagcgagcatggtggtgggcgcctgtagtcctagcacctggggaggctgaggcaggagaattgcttgaacccgggaggcagaggttgcagtgagccgagatcacgccactgcactccagcctggccacacagtgagactccgtctcaaaaaaataaacagcagccaggggcctcactggggttcatgcctgtggccccagctactggggaggcttagatgggaggaacacttgtttggaggtcaaggctgcggctccagtgagccgagatcacgccactgcactccagccggaatgacgatgagcacctgtgttgcagcatagccctgcccagcaggtggaaccagaatgtgccagaggcccccttgtgcgtcccaccccgcctgcaccctctgcccttactgtcctgtgggctctgagggtgtcaaggccgctgggacaggccctgcctgggtgcttccctcagtaatggggggtcgtgggtgctctgggttgtcagccgggcagttgagtgggagtcaggggtgctgacctcacaggcacggccagtgaggagcattccggggccctgaggatgccagcatgggtggtcctgggctcgccctctccacagcatggctggcgttcctcgactgccgccggagccccgggaagacaggcttgaccccgtgcacacacgcagggagacgccaggagccctgccctcagaagcctgcacgctttgcctctcttctggcagctagctaaccctgcatccccacctgagcctgtccctggcactgaggacactggacctgtgtcactggggtggggtgtcctgggtcctgctgggtgctgagtgtctccatgccaggagctcccgcctctaccatcgagatgaccacagatgtccccagacgtggcctggtgctccgtggaaaactgctgtccacaaaccatggcgtccttcccctgacccccgccccttccctctctggcttggcccagcgggtgtctcagaacctgggtgcgtgcttctgccagccccccaaccacctggcccacactccccaacccccttcactgagccgcagagacccccatgtccctgccaatgctttttccgaagccggtctcacttgttcccgccctggcagtgtgaggggaattggggtcccccctcagtggcacagctgtgcctgtctgatgacttccaccaagcccccttcactgagctgcagagacccccatgtccctgccagtgctttttccgaagccagtctcacttgttcccagcagtgtgaggggaattgaggttccccctcagtggcacagctgtgcctgtcggatcacttccaacaaggtggccttggtggccgcacggggcacttcgtccatcttaaaggggcaacacaggcatgcagcgagaattccaaaccacagaaacctcactctcatgggccccactgcctgaggcattttctgttttgcttttgttggtgggttggttggttggttggttggtttgagacagggtctggctctgttgcccaggctggagtacagtggtgcaaacgtggctcactgcagccttgacctccctggctcaagcgatcctcccacttcagcctcccaagaagctgggaccacaggtgtgcaccaccatgcccggctaatttttgtgcttcttgtagaaatggtgcttgctgtgtttccgaggctaagtgatcctcatcggcctccaaagtgctgagattataggcgagagccactgcagctggcctgcctgagttcttgtgcctctctgcctccctccctgtgccagcctcacgccccctcctcaccttccccaattcctactctcaccccgccctgggtccttcccctctcactggcctgagctgtttctggaactgctgcctgccctctgctcatgtcctgcctctgccccgtgaaaccagctcctccatgttccctgtctcaggggtgtcctccagggcccggagttcctgaaccagattcttctccccacctacctcacctttctgtccagtccgcctatcagtcagccccctttgcagcagaatgccaccccaaaacccagcgcctggaacattctccacacagtttctgtggggccgggatctaagggcagcccggccaggggcttctagggtggctcgtggggctgcagtccacatgctggttggggccacatcatcagaaggctccaacggggctgggggtctgaggagcctcgctgggggcagcagcccaggagccacagcagccgcccatgaatatcaccgccattctgttggtcacacagagcagccccggttgaacgtgaagaccctataggggctgggcttggtggctcacacctgtaatcccagaactctgggaggccaaggtgggcagatcacctgaggtcagaagtttgagcccagcctggccaacatggtgaaaccccatctctactaaaaatacaaaaattagccgggtgtggtggtggatgcgtgtaatctcagctactcaggaggctgaagcaggacaattgcttaaacccaggaggcagaggttgcagtgagctgagattgtgccattgcactccagcctgggggacagagcgagactccgtctcaaaaaaagaaaaaagaccccataggaaggcaagagcctgaacagcaaacgcaagcccaggagccctgtcatcccagcggccagaggaccatcccccttggctcccactgaactcagctgcagtccccaccccatcccccaccaccactagggctaagagccagcagaaatccttgggctggcttcattgttcctcccgggaagagtccagggcagctgacacatgatcccagcatggcacgccggggacaggggaggcactctgctgtccctgactgtatttaaaaaaaaaaaatccacaagcaaaatccctaatgagcaatgttccacagtaagtcctgcctcagaactgtgcaggcatcagaaacaggaatgcctgagaaacggccacggtcccaggagctgaggaaacaccacgcctgatgccacgtagggtcctggatggagccctaggccaggaaagggcattagaggaaacccaggaaacttggatagagtgtagattttggtcagtaataatgtatcatgtgacaaatgtatcacactcatgaactgggcatggggtactcacaactctaaattattctaaaaatattgatataaatttaagaccaaaaccatggccaggcgtggtgcctcactcctgaatcccagcactctgggaggccgaggtgggcagatcacctgaggtcaggagttcgagaccagcctggccaacaaaccctgtctctattcaaaatacaaaaactagccgggcatcgtagtgtgtgcatgtaatcccagctactcaggaggctgaggcaggagaatcacttgatccagggaggtggaggctgcagtgagctgagatcttgccactgtactccagcctgggtgacagagcaagactccatctcaaaaaataaataaataaaaataaaaccaaaaccctacagcacgggcagctatgagaactagagaaggaagagggttttgtgcacctgccagcctcttaggttcttgtcagcttttcccccaagtctttattattattatgtattgtagagatggggtcttgctatgttgcccagactggtctcaagctcctggcttcaagtgatcctcctgcctcggcttcctaaagtgctgggattgcaggtgtgagccaccatgctgggcccctccaatccttttgagctgcccaagaacagagaccaggcctggctttgctcagcagtgggtccccagcccatggcacgaattcagtaaacacttgttgtggtcctcaaggggcccccagtcttgctagtcacctgtgttcacctaatttgagcctctgttttctttactttttctttttcttttttcttttttttttttttttgagatggagtctcactctgtcgcccaggctggagtgcggtggcacgatctcagctcattgcaacctccgcttcccggattcaagtgattctcttgcctcagcctcccgagtagctgggatttagatacagggtttcaccatattggccaggttggttttgaactcctgacctcaggtgatttgcctgcctcagcctcccaaagtgctgggattacaggcgtgaaccaccgcaccggcctttgcctctgtttttgtaatcataaaacaggcagacaaaacctccagtggaattgtgaaaattaaatgatatgcatgcagaaagcgttctgcaaactctgttttgctagtttgggtgtttagtgttagtttttatatcattagtactggttgtaaacttatcaatttaagcaagatggaaaatcgagggtgtgtcagggaagggggaagtttgagctgaaattatgacctcttaggggtgggaagaggaggctttggggttgtgaggtctgagcccccttactttgggatgagtccacatcgcggcgactcctctgcagaatgcggtgatgttgcggtaaggggtccgggatagctgcgaggcagctggaccaatcctgaacgaaagacatcagtgatcgcaagaggcgctaaaacttctgccgaaacccgggatcgaaccagggacctttagatcttcagtctaacgctctcccaactgagctatttcggctgggcggcagagtcgctctcgccgggactccgtcccgcgctgcgccttccctgcgcaggcgcagtcgtttcgcgtcagcaggccccacatcctttgtaaggtctcccagggcgccggagcgcagtgtcgtctctgtggcgcaatcggttagcgcgttcggctgttaaccgaaaggttggtggttcgagcccacccagggacgcgtggtgactttttccctcctggaataacaagaaaatgagtgtcgcctctgtttttgtcggtccgccgcagacccgcggcccccacgtgcgcactccgatgacctttccgcctcgggtgatctgggggtgcacggcgcaacacgaccacggaggccgaaagcgcagcggaacctcccggctccaggttccggtttccgcatgcgctccgagccgctttgggcggcggccccgggaacccggagcgctaaggagaacggacctcagaggttgtctgaaggccgaggccaagatggcggtgctgtcaggtgagcgcggcaccggcggcgggtgtggggccgcgcgggtctggggccgtgggagcctcgggtgtcgtggtggcgtcgggggtcggtgccggcgtcgtggccgcggtcctctccgggcttctccgagccggccgctcctcgggctccccgcccggcttgcgatgaacggtcgccgttattgcgtccagagtacagtcggggaaaccgaggcccggtaggtcatgacgcaagcctccagcctcaggaaggcgctcggggtggaggctggaggggccccattcacgtccccgagaccagggcacggcccgcgaggctgctcttgagatgccctggagagagcggggcctgcctgacaggctgggaaactgaggcccattgagggtcttcgaggtcacagggccgggcctgggaaggaacaggacccaggacatccacgccaccctgctggaccctccacctccctccccacccctgggaggtaagggcct

SEQ ID NO: 97205 - DNA, 13427 bp, Homo sapiens
gtggagagaaagacagaggctgttgcagcatcccagctgagcccagcccagatgacctgtcagcttgaccagtgtgagatcaggagaactgcccagctgacccagcccagactgcagaatcataagcaaatcaaatggccattgcttgaagtcactaagtgggtgtgctttgctacacagcaatatataagccttaagttctcccgcagccccacaggctctcctgtctgtcaaggacaaagcctcacacttactctctctctccaagaaatcccataggacatggaagtcaagaatcagcttcaaatcagtctttccagaagttttcatcatttactaggatacagattatggaatttattctctgttaatatcatcatttctcacattgggttattttttggttgttatttttatctttccttgagatttgccaacagcttcaccacagaactagattatgaaaatctaatgaattaatttattattcattattattttctttttttgcttcccaagaattacttttttattttaaacttattttgttatataacttgttcattatttattttgtctgtaaatttgtactttttgcatgtttaattcaattttaagatatatagtattctaataacttaaaattgaaatttcatttctcctttgatccaataattttatacaagtatttttagatatctggttaatttttgcagaatttttcatattcatttcttgttttactgtagctttatgggagtatgacaagtgtttcccatttaaaaatttgtagaaattctgatgatttttgtaaatgttttataaacatttttaaaagtgtgtttccaacacaaaaaggtaataattacttcaatccgactttaattctctacgacgttttttgtcacatgtttgctgggcttatcaagggctcagagagctacattcctaaatcctgtaaagatcatctctcaatttctcattttatttggataatttttgctttatatattttcatgcaatattaatcagtatattaatgtttatgaatgtttatgtcccttataatattttctcagtcaacctatttgttttcctccttgaattttacttctttgaaaaccatgttgccatctatgttgtcgttttgtttcttgatatacaagctaaattttaaatgttttattcattaaactgttctagaatgtaagcacatacgtggatactgagttttaatgcagctagaaagtatacatcttttttcacagagcccagcctacttacctttattgtaatccctgccatatttgttattttattatattggaataaatattaagagtattatgtttcactttattttctcaaatggtttattacatttacattctggtttaattgttcaacctataattccttattcaaatcaagaaagatgtgccaggtgcaatggctcacacctgtaatctcagcattttgggtggccaaggcaggaggattgcttgaggccaggagtccaagactagcctgggcaacatagtgagaccccatatctaaaaataatttaaaaatgtgctggccatggtgatgcatgcctgtagtcccagctactcaagaggctgaggtgggaggtccccttgaacctaggaggtggaggctgcaatgagccatgtttgcacggctgcagtccagcctgagtgacaaagcaataccctgtctcaaataaaccaacaaacaacacaacacaacacaacacaacacaacacagagacagaggaaatgtgtcttttgactctgctgcctcagatatacaatatttagaatttagaatgattttccttcttcatgttctaccccccgacttttgattttttaaatatataaactagaccttggaattctccatgtaattaatttttatacttttcctggtaacaaatattagttgtaatacatgcctctagattaacaaatgtatgacagtgctttaggttaattctccctttcactattcataatctctctttttaacaggtgcacaccaccacgcccagctaatttttgtacttttagtagagattgggtttcaccgcatcgaccaggctagtctcgaactcttgacctcatgatccacccaccttggcctcccaaagtgctgggattacaggcgtgagtcaccgtgcccagcccacttttttactatcccaccctccccattctctcatcccagagctcttcatttctatgatatcagcttaacttctttgtatcaaaaataaaatttgatacatgtctttgagtgtctgaccatttcattttcagatgtgaatgaagcttgtttgtgataatcttccctctccaaaaactgtaagtattatttaaaccttagtgcagaagaatgaatttgattcttttgttagtaacttctttttctctctggatgcttgtggggtgaagggatttcccttcatccttctaaataaaactttgttctaggactccaggtattattccttggggatcactgtcaaaaagaaaaaaattcttgaattgtgctaattcaagaaatccttctcttgattatggcaactgtgctagttgcccatgttaccttgtcaggggcacctatgtctttagctcacagttcattttcttcacctgtcattcaccctcttacagatcatacctatttgtccgtattttatgcattccatgagggtttctcaaaaattttccatcagggatttcacttcctgcagttctatccatgttatttaccaagcaaaagtccttctttcaaaaggacctttgttgaaatccgtatttcaagcagatcattttccatctcattgcattgcctttgcatcctatcctctagtctctttgtaccacctgctgtcttttcatctccgttcatctttccgcagctttctgctccaggcttacacagccatgcctatttacatgctattgaggatgccggttttctaggcaaggaaatgccagtgcatgctcttattctgcatatctgcatgatattctctttccccagatctgaagtgtgttttctcaggggtggaggagggaggcaacattttggttttcttgatttactcattttctaagggatgcagagttaacttggtatttctccaagctgtgactacgtggcttctctttgattctccccctcttccccacagtaggtcagctgggagcatagcgacatgcagttcccactgtgtgatgagcatctatctgctcaggggctggactgtgcggttgggagatcttcatccatgcccatctcatgccttgacattctcagttcagaggatggaagggcactcgactgcccgcacactctgcctcacagaggacttgcatatggacacaccttcagcacctcgcatgccccacagggggctcctctgcccatgccatcatgctttgtttccggtggcctctggatggatatattgagagaagcactcatacaaggagaagattctgtcttgcttctgctatcttagcttcatggcctctgaggtcaggccaggccgtgggaccgggaccctgggcccacctgccttattctgcaagttcacagactgtgttcagtgaggcagaacataaataggtcaccaaaagttcttttaatctaattctgtcagacttttccaaatttttggaaataaacggttcatcaatgttggtctttacttttgttcttgtttaaatctgattcctagcaggaattcaaaggaaaatgacttcaaggatcatggtttagtgcgaaacagaaaaccaaataccgcatgttctcacttataagtgggagataaacaatgggtattcatggcatatgttagcaacaatagacactggaggctccaaaagtggagagggaagggagaagggctggaaagctacctattgagtaccatgttctctacttgggtgatgggttaaatcaaagcccaaacctcagccttacatcaaaaatccgtatgtgtaccctttgaagctaaaatagaattaaacaagcccagagcgatggctcatgcctttaatcccagcactttgggaggctgaggtgggtggatcacttgaggccaggagttcgagaccagcctggccaacacggtgaaaccgcatctctattaaaaatacaaaaattagctgagtgtcgtggcgcttgcctatgatcccagctactcgggaggctgaggcaggagaatcgtttgaacccgggaggccgaggctgcagtgaaccaagatcgcaccactgcactccagcctgggtgacagagcgagactctgtctccaaaacaaaacaaaacaaaacaaaacaaaaacaaaaaaaaaaagagagaaagaaaaataaataaataaataaagtctttaattttttattttaaaagcagaccacagtttagcatcctgagaaatccaataaccatgaaaacctccctactttgctacagtctgaggacactccccagcactgaagcagaatgtcataaggacctcaagcctgctgttttcttctgtctcccatcccagctcatagtggagaaatctaaatgtggtacttctgttggtaacttgctgattacccctggatgccaaggtagggggctgtcttctgattcttgctcaggtagcacacaggtatgcttgaccattgactactcttacaggacagcaacaatattcctggtctttctagaccaaggaggtcagcattcatgtcacctcttcctcattgtttaataaggatttttacatgcttcttatcagctataaatgtgctccagggctcagtaacatcaactcaagtcatgaagcagaattcccctgcttagcattatattgtttgctgccggagaaatgaaatgatggctaagatcccccgcctggaattgcttgctattgggaaaggaagattcaagttgttacaacctaaataaagtaaaatatgtgttataaattacaagccacactctagaatttacaaagagcacttcacagtgcatgcctgcctatgtgtaagcctgctgtgcttcttggtatctcttcagataattctcacacagccctgataaagttctatggatgcaagtgatttcatctttccatatgcaaaatccaatttgaacttgggaaggaaaaaaatgaaacaccttaataacagagatttatgacatttttaacctgagaaagattaactttttctatcatttataattcagctcccctagcaaccttatttacaagccagatccatgttcccttacgcagctggctcaattatacagcagcatgaaaaatcatctgggcagagagtattagcttaaacagaaatttgtcttccacactggagtataagccgaattctgtgataaaacacattaccttcgttctttaatttttcaaagaagaaatgagatgactctgtcaggaggctgaggaggggagtctcacttcattccaggattggcaacaacagcacagaattcattcccaacggtacctgctagagatgagcaaatgtctatcaacgtaaattttttaaagaagaaaaatgccaaccaaagagagaaaatggaaaaaggtaaagcacggtgttagtgtcctaaggtggccagcagggggcagcatttcccgtgtaaataattcacgagtgccatttcagaacaatgcatagtgattatttttaattacattaatttctcctttaatattaataattaatattaaatattaatattaaatattaatgttaaatattaaatattaatattaaatattaatattaaatattaatgttaaatattaatattaatattaaatatcgatatttaatattaatattaaatatcaacattaatagttaatattaaatatcaatattaatatttaacattaaatattactgtttaatgttaaatattaatattaataattaataacattttgttattaataattaataacattttgtcttcctctaagcgcctggctccgctgttctcaggagtgggttctgaagtctctggagaacaggatacgtggagggttaggaaggggccaggcctagagatgggagactccctcctggagcaggtggaggcacaggaccattcgctaccccatctgccgrcacctgcggggaagcccaggcattctttgtaagccctcctgaccacctggctcaaagaaaacagaagcatggaggccgccaagtgttttcaagaaataaccccatgaacacggcatcacttttttagaaagaggggtttggggcaggcagaggagagaagggagagcaaactgagagccaagtttccagacaatcttgcaggaggagaggatgcagctscccagagggaagcaggatcacatttaaggaagtgtgtggggtccctggatgacaccagcacccagtgcggctctgtcgggcaacygctcccaaggtgggaggagtgggtgtcccctgtgtgtcagtgggcarctcctgctgarcccrcagctcactrgggagcctgacagyggggccatgyrcctgacactcctctctgcttgtggacctggcaaggcagggagcagaaaacagagcymcttgaaggcttyctgtctgcgtctgtgtgcagtgtggatttagttgtgctttttwcttgctgggagagcacrgccaccatttacaagcagtgtcaccstcgtgggtggygaggacagaacaggagcctctgctctctgtacctatctgggcccggtgggctcccctgtcctggcttccmtctgtctcagyraccattcagccstgsrcaggaacrcrtgttgcttagaaaagccaaatccagcccttgtctctgcctcctctggtctcatgatgtgcatctrttaccttgaaactggaaaccagtctatcaatgtctgtgccarttttttattccctccccaacctccttccccatasgactttttatttmtgtaggatgtgtgctgtctaatgatgggatgaccacayttttccatgttstaaaagtgctyctctccyrcagggtcccagggctggtggttgctttgggtctacagctacgtcttacccrcctcctgcctcaamagcctgtgtggtggcaaagccggtgtggggctggggaacgcagcgttctccaggagggggacccggctctccttctgcartgcaggcgaaggcctagatgccagtgtgacctcccacaaggcgtggcttccagactccccggcyggaagtgatgcttttttgcckygggccctgggtttgaagcagcctggctttctcttggtaagtggctggtgtcttagcagctgcaatctgagctcagccacctacacaccaccgtggccgacactttcattaaaaagtttcctgagacgacttgcttgcatgttgatttcatgatcagcgccgctgggaaggacccctgagccagtggggtggggctggaagcagcaggtgcagtgatggggctgggtgcccaggaggcctcagtgctcaatcaggccaaggtggccaagcccaggctgcagggaaggccggcctgggggtgtgggtgagcacaggcaggcgccagctgggcagtgttaggatgctggagcagcatccgtaactccactgagtggggtagtctggttggggcagggaccgctgttgctttggcagagagagatgatccccactggggagaggctgttctgactctacaggtgggacagggacagatggccaccagggtgacccagctgatcttcctttgctatgctaagccctgggacatggaggattcccgccacacacagcctgggcccgggttcttacctgtggccaccgctctggcatgagcccctcagtcttgggtggtttctgcctggtccgggatttggtgttgctgctgagtccagcctttccaccacctccacatgggccgtgggtgttgtcagctgcctcccgccttggcttcagtagctcacccagcttacaggggagctgccctgggctggagatgggcacgcaccctgggtcctacttgaatgaatgcagcttgaggagacccggccatatccactgggccacaggttaccctcggcaatgcccacatcagccgtcagcctgagcctccccaggagagcaaggctcacacgacaaaggctgcccatagccaatgaggtggctgagctttctcggacctttctcggactcccaggatgtggctctgcttgtgagctgcctggtcagctctctcggggtgagaggggcttgtcacatgggcccctgcctgcagtgtgacccttctcagcttctctcagcagccctgcctgcagagtgtcaccgccaccatgataatttccctgacactgcgagggtggggggacgtcctgggtagagaccgggcccgtggcagcagcaggctcaggggcgccctgcactggtgggctgggaacctgatggagaccatgccaagggctggacaaggggacgagcctccaccctggcctctccgcaggcctcagcagcccctcccacaggcagaagggttgacactgggttctgccctcactgcaagagctgcaagtgccacgtggtgtcctgcccaatctggtgtctgcaggtgaggaaagggctgccgctggcctgtttctgagtgttcagcacctaagggtgacagcactgtctgtccctaccctccgggtcctgtttgaaaatcaaacccatgctcacaggccgattttttttcttttagagacagggtctcagtttgtcacccaagctggagtgcagtggtgcgattatagctcaatgcagcctccaattcccggactcaagggaccttcctgcctcagcctgccaagtagcttggactatagctgtgtgttttattattattttgtagacatggggtctggctatgttgtccaggctattctcaaaattcccggcctcaagcaatcctcccgcctcagcctctcaaaggttgggattacaggtgtgaggcaaggcacccagctcagccacagagccctattgcatctctcttactaggagcaagagctgactgccccctcatccccattccagagtgttggggctgtgttcagctgaggccgggacactggcacggcccagggagcgggatcattcactgctgccccaaatctgagatcattccaccttgacaagacttcctcatccaatccctttacttgacagctggggaaaccaatgcgcacggagcacccccagctcacttggggtctcagagctcatccatgagcagaggctgagatcctgggatcttgtcccccagcctccctgcaagcttactccctttctgctggaagagatggggccggacctcgaccagcagccctggcctggacatgactgtgctcatgcaggtattgaggccaagatgccccggcatcatatgtttttcttttctttttttttttttttgagatgatgtctcactctgtcacccaagctggagtgcagtggcatgatattggctcactgcaacctttgcctcccagttaaagtgattctcctgcctcagccttccaagtagctgggcctacaggcttgtaccaccatgcctgactaatttttgtatttttactagagacggggtttccccatgttggccaggctcgtgtcgaactcctgacctcaggtaatccacctgccttggcctcccaaaatgctaggattacaggcatgagccatggcatcacttaaatgtagtgagaggccaggtatggtgactcatgcctgtaatcccagtactttgagaggacgaggctgtccgatcacctaaggtcaggagttcgagaccagcctggccaacatggtgaaactgtgtctctacaaaaagatagaaaaaaatatccctgcatggtggtgagtacctgtagtcccagttactcaggaggctgaggcatgagaatcgcttaaacctcggaggcggaggctgcagtgagctgagatggcgccactgcactccagcctgggtgacagagcaagactttgtctctaaataattaaataaataaatatggccgagcatggtgccttagacctgtagtcccaacactttgcgaggctgaggcaggtggctcatgaggtcaggagcccgagaccagcctggccaagatggtgaaacactgtctctactaaaaatacaaaaattagccagctgtggtggcaggcacctgtaatcccagctacttgggacactgaggcaggagaatcgcttgaaactggaagtcagaggttgcagggagccgagattgcaccactgcagtctagcctgggcgatggagcaagactccatctcaaataaataaattaataaatacagagcaagattccatcttaaataaataaataaacatacacctgtaatcctagcacttcgggaggctaagacaggtcgatcacctgaggtcaggagttcgagaccagcctgaccaatatggcaaaactccatctctactaaaattacaaaaattagccgggcgttttgacatgtgcctgtagtcccagctacttgggaggctgagacaggagaattgcttgaacccaggaggtggaggttgcagtgagccgagatctcggctgcacttcagcctgggtgacagagtgagactctgtctcaaaaggaataaataaaatacaaaataaaaaaaaaatgtagtaagattgcagagtcgtgccgcggaagcgtgctggtcctatccatgtagtgaaggctgatttcatacacaaatgtcacaagaacttttttttctttttctttttttttgagacggagtctcgctctgccacccaggctggagtgcagtggcacaatctcagctcactgcaagctctgcctcccgggtttatgccgttctcctgcctcagcctcccgagtagctgggactacaggcctgtgcagcagatgctggggggccactaggcccaggcagtcttgggacttgtgtctctcctgctgtgcatccatactgggtgctttagaaatggcaggcagaccagaagcccctgttgcaagtgaggacaaagtgtgggaaggccatgagggtctgcagtcctagatggccttgtcctcaacctgcagtgcactcttgatgcgctggaatgccacctccttctcccggtccaggtcttcagcagtgacccggtaccccagctctaagggaggaggcagcatcaaaggctcccctcgcctgcgtggcagcaggggaaacttgtgtctacagggcctagaggcctgggatctggggaagccacccctgggggcgagtgtctgccctggtgctgtatctgccgtcttttcacaatgggtgtgacccgaagagacagcctgaggtccgtcctcactcactgtgtttgaggaactgagggtcagctggcagtgggatgaggctggccccctcctccgctttcgttccgggaggcctcccgtagagctgtaggagctggagatggcctttcgtttggggcacgagctggtccgggaggtctgggatctctggttctgacctctgggcacctgctgcagctgtggctgaggcccagaaatgtgaagggcctctatccactctagtagtgaccccaacgtggggttcaatgtggaggggggaggggctgctgcggctgcaggagcagaagtgccagggcttgttcttctcatgcccgcatccatgcttgcagctgggaagggggcaggaatcagcgaggtgacctgggctgagtcctgggagtgggaagaggtggcaggaaggggatctgaggaggagaacagggggcctggtggtctgtgcttcttcccagacatgggagctgtagaggggacctctgcagcaggtgctaggggggccagtaggcccaggcagtcttgggacttgtgtctctcctgctgtgcatccatactgggtgctttagaaacggcaggcagaccagaagtccctgttgcaagtgaggacaaagtgtgggaaggccgtgagagtctgcagtccgagatggccttgtcctcaacctgcagtgcactattgatgcgctggaatgctgcctccttctcccggtccaggtcttcaacagtgacccggtaccccagctctaagggaggtggcagcatcaaaggctcccctcgcctgcatggcagcaggggaaacttgtgtatactgggcctagaggcctcggatatggaggagtcattcctgagggtgagtgtctgccctggtgctatatctgctgccttttcacactgggtgtgacccgaagagacagcctgaagcctgtcctcacccactgtctttgaggaactgagggtcagctggctgtgggatgaggctggtcccctcctccgctttagccccggcaagcctcccgtggagctgcaggagctggagatggcatttcgtttggtgcaggagctcgtccaggaggtctgggatgtctggttatatctgatttctcacctctgggtatggaggtctgtctgcagaggcccgggcccgggcacaaagggagagagaggcctccattgtcccgcaggggccgaaatgcagaccgtgcatccccggtgacctcggggaccattctctgatcatcaggattctcttggactctagggtccttgtcctgctcaggcatccctgccccgctctccttgagggccctcaacactgtcttccctggacacaagtctggggacagccgggtgttttggacaccaaaggggtgactcccggctcctgggccccacagagagtccttgtgctcagtggagtggctgagctggaggacgccctggaactcagagcacacagcactggcttgctgtggtacctgtgcaatcaaattgaaagcaggatcccaggaaggaacgcagggcttgcaggatcacggaaaaccttcttagagttgtcttgacaccactgatgtcaagtgtccgggtgcttgtaggatggcctgccactcagtccacaggcaggagcaacggggagatcccacaagcaaagtgaactgggggatgggctgaacgggctccaggcaactgagccctactggcaggtcctaggcctgggcccgaacaggaaggaggggcacagagtgcccaggtaaccgctcctgggagccctggggaaccgtcggttgcttgaactctcgagagctgggctctgcgtcctcgtccagccgccaactcggccaaaggcgaagccagcagtttcttctgctgccgggcaacgcgccttttaaacctgagggagtgggcgcgtgagcacttaatggcgcccgtgacagagtgagcttaacggattaataagcgcagccaggtacccgcgcaaggcacttgctggcaatggcgggaggcggacgt

SEQ ID NO: 97206 - DNA, 103572 bp, Homo sapiens
  misc_feature (1)...(103572): n = A,T,C or G
tccaaaatcaagctcctgaccatccccaaacctgccccttctgcagagtttacctcgctagtcggcgccatccttgattcttctctttctcccacccaggccatcatctcttgcctggttgatacccacagcctcccctttggactttatccttatccccgtcatagctgccagagggaccctgtgaaaacactccccagcctgctcattcctctgccctaagcctgcatggcacagagcaaaagccagttgttatgggacctaggatgtcctgtgggatgggccccagcctgcatcttcagccttttctccccaccccactccattcactctctgcctatcactcaccagcctataccacctgcctcagggcctttgcactgaccatttaggccacattccaggctcttttcacacgttgcctcctctgagaagctctccctaaccactctgcccatacctcatgcctcttgattccccttacctggcttgtggtttcagcactttcgctgtgtgtgtttgtttttcttggcatgagggcaggacctaagtgtctgtttcctattgattccccagtgccaggcatgcagtgcaaactctagaaatattttttgcatgaaggaatgagtgattgaatgcagcaagggtctggaggctgaggaccaggcagacaaacattcagagttgctggaatgcgacagagacagggagtcagactggtcatgcaaggtcctgggcctgcccttgggtcctggggagccacggaaggttgtgggtgccagagggttgtggtcagagccacagtcaggggccttctgagacctgtgccccctccccaccctccctccccacctccctaggccagctctggggtctcggcaggtggtccgcgacatgacctccgagttcttctctgcccagctccgggcccagatctctgacgacaccactcacccgatctcctactacaagcccgagttctacatgccggatgacgggggcactgctcacctgtctgtggtcgcagaggacggcagtgctgtgtccgccaccagcaccatcaacctctagtaggggctgctgggccgcctgggtgggaaagggccaggggagggtggctcagggactgcccacttatccagtaaggtggctccatcacctcttttcctggtgggaaactgaggcccaaccttggtagcttatcctgagcctctcagtgagtatgtttgagcctcagtgggtggatagggaccaggctgggccaggcaaggtcgggcactgtctgacctggctgggcgatagctttggctccaaggtgcgctccccagtcagcgggatcctgctcaataatgaaatggatgacttcagctctaccagcatcaccaacgagtttggggtacccccctcacctgccaatttcatccagccaggtatggggtggaggtccgagggtgggggactggggtggagaggggcgggtgtcctgggcaggcagctgacgggcatccctgtcttctcccattggccgcagggaagcagccgctctcgtccatgtgcccgacgatcatggtgggccaggacggccaggtccggatggtggtgggagctgccgggggcacgcagatcaccatggccactgcactggtatgtgtcacaccttttctccctggccgtgcccaccctgcacagcccccaagccatgctgatcacactcccatgccccaggccatcatctacaacctctggttcggctatgacgtgaagtgggccgtggaggagccccggctgcacaaccagcttctgcccaacgtcacgacagtggagagaaacattgaccaggtgggctgggggttggagaaactgagtcacggtgtggggccccagggcatcgtgggctggaggcctggatcatcacagagtggacaatggttggtgtcctctctctagtgcctgggccatctggagcccctgtgccatgagggccaaaccccttgctccaatgagacccagcaggccccaacctgctcttcctgatgacctggcctgaaatggcaccacctgggctgaggcctgtgaccacacaggtgtggttcaggtggcatctggagccctgctcaggcttcccctctcctcccacccccaggaagtgactgcagccctggagacccggcaccatcacacccagatcacgtccaccttcattgctgtggtgcaagccatcgtccgcatggctggtggctgggcagctgcctcggactccaggaaaggtggggaacctgctggctactgattgctccaggcggacaaggctgacaagcaatccaggaacaaaatactcaccaggacgaggaagaggactttgggggacaggcttctcctgtgagcagcagagcagcacaataaatgaggccactgtgccaggctccaggtggcctccctggcctgtctccccactctctgggcctcagtgtattgtgtgtgaaatggagccatctggctggggaggaacagagaggtgggattcggagatcttcacaatgcgggcactggaactagcctcagcatcttcagcatggggagagccaggcacatggctgggggccaggggaaggttcacaccaagccctgcccctttccaccctgatcccttggactttggggccaggccctcccttactggggctgggcagtgacactacctaggatcagccaccagggggtgccacgaccctggcactttcttaggcagagggtggccagctgatgctgggaacccgggcgccttctcagacccgtaggcgtccagctcaccctgccgatgacactggaggtgaagctgaggtccgaggaatggggactgggcaacaggctggaggaaaacatctcggtcagagccacgcccctggggggtttccaagagcaagcccagagtgaaacccaagcttgtgatcctctccagagggaggcctggttctcagggaacagcaaacgggaagatgtccccagatcccagggatcagggcttggaccagccggggacgcagcccagagggagtgggtccagaaggaaacagctagacacagcagccttcaccatccgcagcccctccaggcctccctcggggcctgctccctcctctgtgcacagttccaacacctggggcagggttctgggaagggctggtggaggtgggctggtgggaggcggtgatcacagcccagcacctggatatcaccaggggcactggggccaggggccaggtgaggccaggtcggggctatccttcaggagccccgaaaacctggtgattccaaagggcccatagacaaacagggttttatgcctgtggagtcaagtcccactgggtctgagctctggagggctgtgtctctggggctctgcaggggtgagacggaggtgggctcaaatggtgtacaagtcattcctcaatccttattttatttatttaatttttttaaaaaaaaattaaaccaatagagatggggtctcactatgttgaccaggctggtcttaactcctgacttcaagcagtgcccccatctcagtctcccaaagtgctaagattacaggggtgagccactgcacccggcctcaatccttattttggcctgagaggaaaggccgtggccccatttacaggggagaagactgaagctggaggggcaggccttgctctgggttgcacagcagcaagagaagtgggagctggccacgaggcttcctcgactcgacacactggtggggtacaccctggttctccaggtcccatggggctcagcccaggactacctcgggtggtgagggacttaaatcctctccttcattctcatcgccccttcccccatcatttcctgaggaaggacattcagggacctgaaggagtggcctgcccctccacatctgtgggtgtttctcatcaggttggacaagagactgagaaaagaaagagacacagagacaaagtatggagaaagaaaagtgggcccaggggacctgcgctcagcatatggagtccccacgctggcaccagtctctgagttccctagtatttattgatcattatctctaccatctcagagaaggggatgtggcaggacaatatggtaatagtgaggagagggtcagcaggaaaacatgtgaacaaatgtctctgtgtcataaacaaggttaagaaaaaggtgctgtgctttgatgtgcatatacataaacatctcaatgcattaaagagcagtattgccaccagcatgtcccacctccagccctaaggcagttttctcctatctcagtagatggaatatacaattgggttttacactgagacattcctttgcccagggacgatcaggagagagatgccttcctcttatctcagctgcaaagaggccttcctcttttactaatcctcctcagcacagaccctttacgggtgtcaggctgggggacggtcaggtctttcccttgccacgaggccatatttcagactgtcacatggggagaaaccttggacaatacctggctttcctaggcagaggtccctgcggccttctgcagtgttttgtgtccctgcttacttgagattagggagtggtgatgacttttaacaagcatgctgccttcaagcatttgtttaacaaagcacatcctggcacagcccttaatccattaaaccttgagttgacacaggacatgtttctgtgagcacagggttggggctagggttacagattaacagcatctcaaggcaaaagaatttttcttagtacagaacaaaatggagcctcttacgtctacttctttctacatagacacagtaacagtctgatatctctttcttttccccacagggaccttcctggctgtgcctcaggtcaggaccagaatgacacccattcatttccctgggcctttgctcaggcggtccctgcaccctgtcctcttgcctgaccaggatggtggagagaggaggggggacgtcccccacgctgctgtctccaccactgttcctgctgcccaggcctctgagcttccaggactgcagcgggtgggtgggtgggctggcctgagcccaggaatgcacttcagctcctggttgagcaatgtcactgaggcttgggagtcgggtggggacgggaggaggcgtccgcaggcccccctaccatgagaagcagccgtgggaacagcctgcctctaaacaatcactgcagcccaggctcaccaggggctctggccagacataggggcctggcaggctgtgtggcctgtaaggacacagtctgtctctgtgcctcagtttctctgctgcccagatggaggggcccagactccaggtgtagacatctggagcaggcagtgttcagctggggaggaagtgcggaggactatgggggccacgtgggaagaagtccagcccacatcacctgcacccctgctgagcctggtcaacagagcccctcagtgggtcctcactctcctggctgcctcccatttaggcaccctgaggcctggggagaacagagccaggccagtgtccccagagaggctgcgctgccagcacagtagtagcggatttggattcagggaagcagacctgcagccagggtgggaaagagctgcaggaggggtggagcccccacatggcacagcccccctccctggaggtccatgctgcatttccaggacagcaagtcccagggatggatggtgccgggtgccaagggctagaggcatggtctgtctgcattccccacaggggcgtcttgtagtcaccagcatttgatgctgtcaagtccccctgtcgtctgtgcagactgggaagcccttgatcaccctggggggttgggggacccaggccaggctgcagaagcataaggacttgaacccgggtcctgagtgacaccaccttgggtcctcctccctctgcctctgttcagctccaccttgatgctgactaggctgggccatgaggagagggttaggggatagagatgggagctggggagcagggctccactctgagacgkgggcagccttgccggatccagggcagagttaagcggccccagctctgctttcctagagctgctgrgaaccygggaaatggtgtggaggttccggggagccctgcccctacctggcaaccgcaatgcagcasgcaccaagttctcctgcacattgcgacagtgkgaccctgggctctggygggcggtaggtsgggcctttggacctaccagcagtgagggagttaacacagcagctgacttctgtaggcaaggaaaactcccctcagacactttgctgcctggcctcctgccagcaacaagcaggagctgaaaacyagaagttgaggcgtgagtttggccactcygtagtgtgcacttggtgagggcagcaactygccacagctgccaggcgtctgtccattcacccatctgtccatctggcagcccgctgttcagacctgtctgtctgtccgcccatctgtaagcccatctctgtcccattgtctatctgaccatctttctcttactgtcctctttgtctagctatctggcctatctgtcgatccatcttcgtgtctgtcttcagcccccacctgtttgtccatctgtccaattacctgtgagtctatctatgcatcttcttgtccattcatctgcccacccatctgtccctccrtctgcccaccggcctcccctctccttctgggccgcagagccacggtccaggactgcagagccatggttggcctggtccttctggggctggggctggcgctggctgtcattgtgctggctgtggtcctctctcgacaccaggccccatttgacccccaggcctttgcccacgccgctgttgctgctgactccaaggtctgctcaaatattgtagggtgagtgagacgtgggaggaagctgggtggcccttggcagccagcccctcctggagaaggcgtgtatgtgagagtgtgtgtgtgagcatatgtgtgtgtgagagattatatgtgagtgtgtgtgggtatatgtgtgagtgtgagtgtggggtgtgggtgtgtgtgaatgtgtgtgatcgtgtttgtgtgtgtatgtgtgagtgtgggtgtgtgtaaatgtgtgtgattgtgtttgtttgtgtgtgtatgagtgtgtgggtgtgtgtgggtatgtgagtgtgagtgtggggggcgtgggtgggtgtgaatgtgtgtgattgtgttttgctgtgtgagggtgtgtgtgactatgagtgtgtgtgagtgtgtgggtgtgtgtaaatgtgtgtgtgagtgtatgtgtgggtgtgtgtgagtgtgtgagtgtgagtatgggggtgtgggtgtgtatgaatgtgtgtgattgtgtgtgggtatgtgtatgtgtgggtgtgtgagtgtgtgtgtgcgcgtgtgtgtgaacgtgcactggcccaagaagcaggagctgtgtgtgtgagcttcaacacctgcagggcttgagcgcaaggagacagcctcagggactttgcacagaacaggtggcagggtgtgcccrtggggcagatggggacttgggaacaatggtggtgtgtgagtccatacctggctccaggattcaggaggcccatttgcatatcccaggtgggaacctgtctggccccgcctgaccctgctggccggtgcaggccccttcagtgaggccaattctccaaggctgsggtcttctcccagggtcatgggtgaaggggtttggaggctccctgcgtgggtactggcctgctggggtacacacaatgctgccatagccagtctgccctaacacccagcccggggccacatctcaggtctctcagtcctgaggagcccggtgccccacccctcacatcctctctccctgaatcagggcctgggtctcgtgagctgagtgactgatacttggtgtcctggatgagggcgtgatggagaggggccacagtgggtgtttcctgaccctcttccaggaaggtgctgctgccgctgcagggaggacacatacaggatgccccttcctgccccctgcctcccattgggcccacaaaagccagggcaagcctcccctccctgccagccacctggtctgcttcccagaaattgtcttgcaggctgttgggaggatcccagtacttcgtaaactaaagcaagggaggagtggccgttctctctctttgttcattcattcaccttttcattcattccttcttccctccattcccccatctgtccatccttccctgccctgattkctcatgccacccccccagcccctcctgacctggtcctttggtttctcttcagggctttctgtctcctcccacagggctgagaatggcagctcagggacaagtgggggctggggactgcttagtctccccagtggctctcaggggatttgagggtttgacgccagctgccaccccaggctgtgcccctcctctgctcaggaggacatwcaggatgcgacacccacttaaactcaaagttgcaaagatgcaaatgagactggggtctcaggcaccagagaccacccgtgggcacgtggcttttgggagtggggacctgctgccacagatctctgaagagtctggacctgctgggtctccccgagtgactgtctgggggtctccatagcatgccctgctgtgtgcgtgactgtcactggttgggtaggggtctctactctaaagctccctctgctggcatcccctcgaactctcccttggtgaagagagagttttatcaaacaactctctccacttcctgttttaagaagctgggagtggaagagagcctggggctggccccagctgctgctgcgaaacaggggtcactggatgctgggtccctggccgggctggctggaggcctcaggaagaggcctgctacagyatcatcctggccaagattcctccctgcagaggaccctggccacrctgccacagggtctgctggggccaccagaarcccatgttcctgcctccatctctcccctttgtgctcacctctcaccaggaggccctcccagagttcagtstcctgcttttttttttttttttttttttgagatggtgtctcgctctgtcaccaggctggagtgcagtggcgcgatctcagctcactgcaacctctgcttccttggttcaaatgattctcctgcctcagcctcctgagtagctgggactgcaggtgccagccaccacgcccagctaatttttgtatttttagtagagacggggtttcaccatgctggccgggatggtctctatctcttgattcgcccgccttggcctcccaaagtgctggaattaaaggagtgagtcgtggtgcccggccccatctcctactctttcagcaccaggttttactcttgggattctgctacagctggagcccctgggtgcgagttcctaagctttctgtgagtgtggacccagcaccgtgcctagtagacatacaaaaggagcatggtgacagtgaggtctgtcatctccagcataatgactgttttgatccttgtaaaaaaggtgatttttggctgggtgtggtggctcacacctgtaatcccagcactttgggaggctraggggggtggctcacttgaggtcaggagttggagaccagcctgggcaacatggtgaaaccacgtctctcctaaaaatacaaaaattagctgggcatggtagcgggtgcctgtaatcccagctacttgggaggctgagacaggagaatcacttgaacccaggaggcaaaggttgcagtaagccaagattgcaccactgcactccagcctgggtgacagagcaagacttggtctcaaaaaaaaaaaaaaaagaaagaaagaaaagtttatatttttgttctaatggttatcttaatatcttcattctataattatatgttttatataattataatagctatataagatataatacccctagtatgttgttttttggatattctactcgctcctgatggttaatttatgtgtcaacttggctaagctatggtgccccgttgtttggtcaaatacttgtcaatatcttgctgggaggtaatatttcatagatgtgattaacactgacagtcaattgactttaagtaaaacagattacccaccataatatgggtgggccacctccaatcagttgaaggccttaagaacaaaaactgaggtttccmagagaagcaggaattctgcttcaagactataacacacaaaccctgcctgagtttctggcctgctgactgctctacagattttaggttccagacttcgagatcaactcttacctgaatttatagcctgctggcttgccctacagattttaaacttgctagtccccacaatcatgtgagccaattcctaaataartctctctctatgtataacctattggtttagyttctctgaaaagctttcacatccagtttcctggwtgttaagaattactgaaactagctagtaacttctttttttttttgtttttttgagacagagttttggtcttgttgcccaggctggaatgcaatggcayaatctcagctcaccgcaacctccacttcctgggtccaagcaattctcctccctcagcctcctgagtagctgggattacaggcatgtgccaccatgcttggctaatttttgtatttttagtagagacagggcttctccatgttcgtcaggctggtmttgaactcctgggcttcagtgatccacccacctcgacctccaacaaagtgccgagattacagtcatgagccaccatgcccagcataactatttttaatgaagtagactttaagaagaaaagtattattagattagtagtattattaggatcgtcccccgatcctgaccgcccttccggcccatgctctcctgtttggcttccacaggcctggacktctctggcttctctgcccacacactccctgcccccagtgtccctgcccctgccccagcacaggtgacttcatttctgtcctctcagctcagtggacttgctcaacttttgcataagtctccacttggtggtagcagcttgctgatgacttgttttaaaactttcatcctaaataacctttygatgcttgaatatttttaagttttatacatagtttctaattttttttccccaacagatccagatacctggatccagggaatgaagttcattttgcagtgctctcaacagctgaaaggtccaattaaaattaaaaggggaaattgatttttctttgggttaaattaaatctttcatttggttagtcagaactaaggccagaaaaatgggctagcctagaattctgctagggaattgtccacgttcggaatgactggagcgggctgcggctgctcccattttctgggcactaccatgaatttcatctccagctacagtgtgattctaggggtgcttctgatgtcagcaagggtccagccttcgttccatggctgccccagacccactttctaagacccaaatgcagtgacagtccctttcatatcatctggtctgtgttttggaagaaatattattaaaaacaatttctaaaaaaaaaaaaaaaaaaaaaaaaaaggccacgcaatggcacatgcctgtaatcctagcacactgggagcctgaggcaggcagatcacctgaggtcaggagttcgaggccaacctggccaacatggagaaaccccatctctaccaaaaatacaaaaaaattagcagggtgtggtggcaggcgcctgtaatcccagctactggagaggctgaggcaggagaatcttttgaattcaggaagcagaggtttcagtgagccaagattgtgccactgcactccagcctgggagacagagcaagactctatctcaaaaaaacaacaaaaaaaatacattttaaaaagataaaaagataaagaactattgaaatgtggcaaaaggaatgtgcagtataccatatattcaaaagtgaaagtattaaacatagaataccagggatcctggtcatgaggtcctacaggtaggaggcatcccctatgtgcctgtggcccccccaattcctggtgctggcccccacccctgcctgggaccacccttcacactgctgctggagtagttcacattttgaaaacctgaacctgattaggtccctcccctgcttaaaaccagtcgcctctctcaattgccttcaagacagttgagaatctggcacctctgtcactcctagctcccaagggctcygacagtgcaggaccacgccccctacatgcccagtgctccctgagacccgctcagcccctttctaccttcctcaccactcrcctgtcactccagggcagggtttctcagccttagcrttatggatatgctgggtcaaattattcttttcattgtgggctttgtcatgtggcctccatgcacagctgtcgatcccatctctttagttgcgacaagcaaaaatgtccccaagcattgccaaatgtcacgtaggaagcaaaatcatctgcagttcagaatcactgagatagacttagatgacagctcctgtaaagagatttcctagctccccacctgtgcacctccttgtgtgccctctacctatggtgctgcactgcactgtgtctactcatccgcctcctcccaggagcagccccagcagagctcatggcatgtgatagattaataatttgtgttgttggatgggtggatggttacatagatgggtagatgggtggatgggtggacagatggacaatggatgggtggataaataggttagtgagtggatggatgaatggacatatgagtgaatgaatgggtgaatggatagagagctgatttctatgaagcatccccatttatgggtgacaattccaggcttcaagtttaagaggcatctccccaggcacaaagtagaaaccgttggtcagtcaggcagagaagatgaaatgagggatggagaggaaggcctcaagcaacactcccctgcagtacagagttggaccatttcatcctcaagccagggagtcacagaactcaggatggtgatctttctcgaaccagggaagaaagccaggcacttctgcagctactacagttgagaagattcatactttaaaataatgccaatcaattaagccatacttcgctttagcaaaagtgatacttgtatttgaaattgctaccagcttcccttgaattctgtgcataatgtacagcctgtaacctttacccagagaactaatcaactcccactgctgcccttcttgacacctgccactaaggtcttcctcacaggagtgaacccaytgttgactggcagtcagatcctcagagctgctttgaggggaccagagctgggagggcagcatccctgcccagcttggacagtgacctcagggtgaagcttcttagaatctccatgctgccaggcattaaggaaatacaagttatcccttctggacatggatcattggcacagaatccttgaaattggtcattgtgtcacccaacagctttcagttcctgcaagaccaagcttcagaagcagcttcaaacctttgtcatccattcttcattcttatagccaacaatgttgtctcaaaatctataattttgctcagacttctaaattttggcttccaggggctcagcccttggtcttctctcctttgtccacttgctgccttgggaatctcttccagtctcttggcttcaaataccatctatttggtgatgacatctaaatttgtaactcctgtcctcatcttgcctgtaaattctagcttatacttcccaagaacatctctgttttgatatttaataggtgtctcaaatttacacatccgaagccagtctgtcagaggtcccctaaagctacatctcccacagtctttcccatcttggcaaatgcactctgtttaaagtccttctgctcatggctttctatatggacacctgcacagatagagaacagmaaacttgtattccaaataaagaaaggagaaggtgtaactgcattgttccatggactcacagtttctacttggagaagtaataagcacatgtggagatgccctccccttgctgtaatgcacaagaggtctaaggctccactctagccagagctgccgaaagcacctgagttcctaagaacaacagctaccaatttggggcatgtcctgtgtgtcgggtgctgttctaagtgctttacacatattgcctcatgtgcccaatctacacagacacttgtgagacaggtattatcaytgcaccccttttacagatgaggaaactgagacacagaaaggataagcaattttcttagtagcactactgagcrgagccaggactcagcccccgacagtggcttgcagagcccatgctctgatgccctctactttgctctgggacctcactgtgtctctgcaggcatgccaacttttgcacagaactgggaaaccctctgagcaggaaccacatcctgacttctcaygggagtcgggatcygagcaagcagcgctcagtgaaactgagcaggattgccctggccctggtctgtgggcacctgatggtcctcagtccaataagctcggagaacactgagttaaacaaagggagccaggrgtcttgactgaaggacttctgggatctttaaaatgctaagtacacacagggaytgggagagcaagaatggagtacatagctcttcacacagcaatttgaaggcagagccctctttctaggatagttcattaatccattttgagaaacctctaattaaggggaaatgccctccagcctgagccaaccccttaatgaatgaaagccgatggcctttcattctcctttgccccrggactctgaagaagccaaagcaagtttctaaggcaaagccaagcccctggctgccagaacacattgatcaatttctgttttcaacccctctccacctccctccctccattaagcaaagtatgctttttcatcctatcrggatcattttcacccaactgtgggcacaggttctagaatggaccagaaacaccgtagaccaggatggtcttcatgatgcagccactgttggtactttaatctttttaattttagaattgattacattcatcttacatttcgcctgatttattttaaatcgagggcttcattttatgcatttttcatcatcaaggcattttcatcatcaagaaatggagtgcatgtaatcaacacaaataatagggcaagaatcatttgtgaatttgtcagaagtcctttccacctctgttgtgctaggatgcagactcgaggtgagtttatttccattccatcttctacctcataaggaaatttaatccagtagattaaatccagcagattaagccttgtcacctggcagagacaytgacctgtggcaacctcacctccacaaaacagaggagcaggcgttgtgccaggaatcctatggtaccaggacrgaggggatgccttctttgccaaaatattgacagactcactggatatcagaaaagcatgacctgcaaagctaacccaaggggcagccaagaaggagagttcttgaggcaactgtttggatgcaaatgtttggatgcaaatgtttggatgcaactgtttggatgcaaatgtgtttctactccaagccatttctgtcttaatggtatctcttcaccagctgttcctctgaggtgaaggttttcacatttcaaagcttccatttcacacaaagtcccatgggagggaatgtatgccttattttttaactgtataaagaatacaagggcctgaggatgtatttcaaggagtccatactgtagagttctttataggctaataaccccaccaggggcccagtaagaaattattgctttgctcttaagaaaaaataaattgaaaccaaaacatcatgttaagccataaaataaggaagttcttcaagaagcatgaggtcatgccaaaggatacaggaggttgctgacaggcctcctgctgagcacatctgacaatacagcaacaatatgaattatactagttaggtaccataacatatagaataaaataagcatcaaaagttcttattgttatgaatgcacaaagtaataaacaaatgagaagaaagtattttttctgataggaatatgaacaaataaatgtggaaaaagtaaagttagaacatcaatgaataataaaactactggattaaaggttgatgaggagcaagatagttacatagtctccaaacatctccctgctagatccctactaattataaagatgaaattgatagcctctttttggagaaccccaggagtcaccatcttaacccggggatgaaggttaacattgctaacgtaggggcagccatggtcatgcgtcttctcatgtgtgcactgggaaggacaaagtgccacctctgtggcattcctgccaaaaaatacatcatgtgaatttaatcgtgaagttgaaaaatcatgtcaagggcatcctacaaagtaactggctttactctgtttttttttttaagacaaaatccatgatcaagaggcccacataaagactgtgaaagtgattaggtttaagacagaccaagaagatgcatcagtcaatggaccatgtaatcctgtattggattttagagaggggaagagaaaactttggggacaattgatgaaatctgaatatgggctgtggattacataatggcattatatcaatattaaattgtttgactttgaaaactgtactgtggttatataataggatatccttcttcttgagaaacacatgctgaactgtttaaagataaaaggggcacaatgtccccaatttactctcaagtaaatagatcaataggtaccaaatttggcaaattgtaaattgtcagtaaatctgcatatatatatatgagctccttctacaactcttgcaacttttctatacattttaaattacaacaaaaaaacctaagcaataaattgggagccaatctctattgtcctatagatgtcaaaagtaaatcctataggtaggtgaatctgaaaagcaagctatctctttgtgagccattgaggctacagtggtaaaccaacaaggtttctgcctcatggaaaatggtaaagttgggcctccaggtgttcccccagctactgcaggtgcccttggcacccttctttctgagcagatgctcttagcagcagcagctcccagcacctgcttctcagcagcagcagmctggcacagcaccttgctcttgaccactgctccctcggaagggccctcccctgagggcagagtcaagagacagtagtcaaagtctgactcctactattagcagatggcactgagggagttaccacctactaaagtggctcccagcctcctccacagttgctcttcctcagcaccccagattgtagaccaagaccgttattacattatctagagtcagctttagggcagcacaatgctaccttgtgtactagttatccactgctatgtaacaaaataccctgaggcatggtgaaattcatgacctcacagtgctatgggtcagaagtccaggagcatcttagctggttggctctggctcagggtctattgccaagtttcatccaaggttgcagtcatctgaggttttgatcagggctgcaagatctgcttctaaatgctcttgcatggctgtgggcaggaggccccagctcctcaccatgtgggcctctcatagggctgctcacaacatagcagttggctttccctgtggacagtgggctgggagagagctaccaaaatgcaagccacagtgtcttttgttgccttatcccagaggtaccacatcaccagttctgccatcccaatgctggtgcactgtgggaggaaaccactgagggatgtgactattagaagcctgggacccatcccaggggctgtatgccaccatcttccctctggcctcaatgagttctgtccatcagacatgcaaaataactcaacccttcccaagactcctataaaagtgatcccatcccatcagctgaaatccgtggtctgttatagttcctcacaactcttgaattgaaaagatcagatcttyccccctcaacataaaatgggtacaggaataggtgtagagtccccagataccccctctttccttctgtgtctggacagaaaaccacagaatgtcttgatctctgtgactcagacagctacaggttcttcgaagcaggctcaaatcaaagttatatcttgaacattttcaggcactgataagggtatctaggttgttgccccaaacactgaaagaaactggcctcatgccctgacccctcactgtggacttgtgtaggcagagcagccttttctcacactgtgtatcgcgaggattgctgcagccctctgttaattaagttccccaaataatgctctggactgaagtttagtgcttctttctttgtaatcccaactggccccatcatgggagggtttggggctctctgttgtgggacctcctctgctgccacttttggggtgatgccagctctgggctcagcagaataaaacagtaagaaccaccttcagccctcctattcaaaaagagggaaacaagaggtgcaccagcacccctggctgcagcagttctggaatccagcttaaaaaatgttggatgtttaggactcagtcctactcatgcccatctgttcttctctgtgcctcctcaactggtccttgggattcttgkttccactatctgaatccttctttttccatgaaaggtagcacacatttgcagctgagtaattttctcaactggcttcctgctaggaggaatggcccatcttattatgcactgtttcgatcctttcatacactgayggtgatttgtcagatataattttttaaaaaatgtgtgaatctcattgagtgttattccattagacaaaagtcacacccacaaatcagtctgaaataagcccttctctaccttaggcttctgctcagagacaatgccttaaccttcttaaaagtccttttgtttgattgagagggtctgtgagtaagtcaccttgttagatatctgagagtcttttggctgattgaatagtattttgaggcaccactcaaataaagcgtttaagagtcatactcttagcctcatctttaggctatgctttcctgagagtgtcttggatttgatctttgcttagaagatatgtcttaagtttagcattatttgccattggggaaggttgggaatctttaccagcaaagcctggattttttgttgtttttcctacagcttatatttctccccttgaatattatcataaacagcaaggaaacaaaacaaatggcaccrtcatcactggctggaaatttccataactaggtcacccagttcattaggtacctttctgactttccacatcactgcaggctactgtgttgctaagctttctgctactacacgaggaggttttaattttcctcccgaggaaggtgacgccttcgtgtcagctctctgcgaagagtgtcccacagctgcctcactgagtgcagggcagcacctgtgcatgtccctaatgctgtctgaaatccccacaccgtcctctttcccttcctcccctgctatgcatttgcttggtagttgcacttggcattggtctacagccaccttccctcccttcctctctcctctcattccctgccttcccgcctgtctctgcccctacaatggcagctccatgaggttctggccacttttaaccaggacttagggcagcayctgacacagaacagaaaagcaacacataatttttaagacatgaatgaattaattcttctaagtttacctcaattctacccttcattatggttgaagaacaaataaacatctggcatgcaacaaatgttccaaaactgaagtgaattatccgtgtcacaaacaacacagataatgtcaacaaggcctggccagcttcagttcacacccaagagaggtccagaccgcggtgccaacactgagaccaagaagtygtgacacaaaaatcaaatcttaaaaacacaaattggcctggcactgtggctcatgcttgtaatctcaatactttgggaggtcaaggtgggtgggtcatctgaggtcaggagtttgagaacagcttggccaacacggtgaaaccctgtctctatgaaaaatataaatacaaacaaacaaaaaaacacgaattgagagaagtgtaaattaaacgaggttttacagtgcagccttttgagtcaggtggcccctgttcaggcccaggctctgccctgtgtagctctgatttcattgctcggggctgcacagtggggcaggcatgagggagaaaggcagccacagaacctagctacgggtctttggaggacaagataggttgaaacaggctgaaaatgattgcaactcattaaggacagtttcccaggaagtgattatctctccatccactcctaagattctagatcagcaggcagctgttgctattccagtctgaaatgagggtggaacacatgactgccctggggaccttcctgggtcctggcccaggggaaatgtgaggaaaacaaaactggcctgattttccccaccaagttgatgtttatgtttttcttttttatatagaaattgatcctcccrgccttaaagcttgaaacacatttgtcttatctgagttcctgtctcaggaaattgaccctcaggccttgcagattgtatcaggaaactaaagctcctcttccttacccctcccaaatttctgttttcctgcctatagctatgttccttccccatgatataaacctccaattttagccagatggggagatggatttgagactggtctcccgtctcctcagctacagcactcagttaaagccttcttccctggcagtactcgtctcagtgactggcttcctgtgcggtgagcaatacgaccgagacaaacccctggcattttggcagcagatttttgttccctgacaggtaggacagtgctcatagctcggctgctgggagataggagaatcttgggagccccccttaaacagctgcctgcccatttttggctggaagtgggtttctctctctctctctctctctctctctctggccccatcctgccagccccaattgtgttactggttgcctaggaagaactacctttgaagtttaactgggcaagtgtctttagtgggtactagagagcaggaatggctccctaaatttgggaaaatctgaaggaatttccgtttgcaggttgaacaagcccaacgaacagagagaggaagcaccccaattgttttactgtggacgctcttgggggttgtcactaattgcgtgtgtgcatgtgcacatgtgcgtgcaagtgagtgtcctttgtgggtccagacagtgggatctgctcctctcaatttaggaaattctagaggaatttccattttcagattgaacaaacccaacctgtggagaaagaaagcacccccattgttcccatttggacacccttggggcttgtttgttgttgcagcagttggactgtattttggcgattgcgtgtgtgtgtgttgatggagttttgggtggttgggttccattccagagtgcagcctgtgtgggtttcttcttcaaggttggtctgagcagagttctggtctgatggagcaagggaaggtctgcagccacaccaccctgaacgtgccagctctcttctgatttcgaaaggtctgtgagttgtagtgctatctcacagttggattcattttgctagtgaatgggaaagcaggatggagttccttgcatccaggttttatgccgctgttctaagcagggttgggcctggttactacatgatgtcctcctggggtgcagtttggccgcagtgttctttagagtctgggaaggtttggccatcaaaaatcaaactgtcacggaaactgctttatccaaaattttgtttcacagtcttcactggattacctactggagcaagcaaagtttacccatgtgaacatgtaggtaaaccactgagtttgtactgctatcttgtggctagtgttctgtggtaaaactattaggtctttgtttgtctgtgtgtatatatatcctgatgttatgtgttgttttcacaggacaccaaactggcttataaatgaaacagtgctcatagattaagtaaacaaatacaaacattattgaagttcacataacttaagtaaatctttaataaacaagtgggctttaaaattattggtaaaataaaaatagaaatgtcttcagaattgtcaatatacatttgtgtgtgtgtgtgttttatatttgtctctgctacatattttgaggtgtcaaggtttggcacacaaggttatgaaactacaaacccattcacagcaaaatgatctttgtttgtatgacttttttttgataaataagactaatttaatgttgttggtttaatgaaaacagctgaatatcctgagttcttggtgaaaatgcccatatatttaactttaaggtcattacttaggtgaatgccagatattcacatgctattaagatagttaacaaggagattacttgaaatgatggctagctttatctaacatctcagttttcagaggtaatctagataaactgttaaaattgaaagaattgagtacatgcaaataggataaatgcttgtaggtaaactttttgtataattttaaatcttaaaattatttttgatactcattagataccttggtaatttccaattaagaaagggttatgatatggggaaacactatttttaaaaatgtggaatgttttcatctataaaatgctaatatctgatagatagttcagatttcttgcttccaatgttttcgccaaaattcaaggttactaagaataaatattatggttaatacataatgatctgtatataaaatatgccaaagaagatgtattcttattgaagaaaataatacttttgtctaattcaacagttatctaaaggttaattgaaattaaagacttagaaagattatttataaaccaggtagaaagaaaagagtaagtagaggagagagatgtaaggaaagttatggatataaagatgcatttctttggtagggaagagaaaaaagaaagaataatttcgtatgaggaaagatctcwtatgggaaatttttgttttgaactaaaatgactggttattttaaaaagaaaatttaggacaaaacagaaagcccaagcatgtcatacattgtctgtgtaagtcatgtgtagttattttctatttctctgtatgtgtatcttgatgtacacacagagaaaatcaagatttcaaaaactttagataaaatattctttaaaaccagatagaaaattggataaatttggccaattgacattgtccatatgtgaaattgtcccacatgtgacattgtcccacatgtgctcattttaggctctgagtaacactagcctccaatgtaaactgagtggaaaaaaattgtgagtcatgttcctatttatttgtttttttcttgctgtttgctcttctttgggttttactaagtaaactgatttttcaaactttgtaatggaagrcttttatttggttctatggatagtcattttgtttctatgcatttccaacaattcatcatttgctctacttatctaaaaatcctaaactaccttcatcaagcctctaaaagttgatagagcacacaagacacttaaaatttgattggtatggttacctctgatgatctggagagctttaagagctttaatatttctggccaaaaataaaagacttacttttataagttctgaacagagatagtacctactttatcttactatttgtaaaagtaggtgagagtagaaacctttaaatggtttttattttcaagataattcaatttgatcagtgtttgaactggtttcagatattgtaatgaggaaaaactgtgatatggtataagtttcaaagttctggaaagtttggccttgtccttaaggaaattatattgactgggatttctctcaagctactttagttgttttaattgttattaaaattaagtggcattcacctggattaggtagcagtttaaaaatgtgagacgttctaatgatttttgatcccaagccttttatcactgttggggattcatgtctgtgcttaaaaacaaaatatgtrtaagtgttgcactgatttgaagatttctagtggtaaaagttacctaattggctgtcagtactgtatctagaaaccaattttgtaattgtgtgatgatgctcttttaaaatagctgaaaataaattattttgtgcttgtttctactgtgtccttgttttgtgtatactatttaagtgaaggagattatttatcttcatactgaatttccaaaactggtatttgcatatatcatttttttaaatgatagaaagaaaagttaattgtctgatttagataagtttgccataggacctaccacattttttatgcttttggtcatagcctgtctccaaaatgctagcatttagatacatgcagggagtaacctagccactttataatttttaaaaaatttttgtgagtacatattaggtgtatatatttaggggctacatgagatatttgttacaggcatgcaatgcatcataatcacatcatggaaaataagatatctaccctgtcaagcatttatcctttgtgttacaaaccacttaattatcctcttttagttatttttaaatgcatagttaagttactttgactatagtcaccctgttgtgctatcaaatactagatattattcattctctcaaactagtttttgtgcccattaaccatcctcacctttcctatactgtccattacccttcctagcctctggtaactatgcatctactctctgtctccatgtgctcaattgttttgatttttacatcccacacatagttaagaacatgtgacgtttgtctttctgtgyctggcttatttcaattaacataatgacctccagtaacatccatatttttgcaaatgacaggatctcatcctttttttgtggctgaatagttctgcatgatgcatatgtaccacattttctttatctattcatctgttgatggatacttagattgcttccaaaccttggcttctgtgaataatgctgcaacaaacaagggagtggagatgtctcttcaatatactgattctcttcttttgggtatatacccagcagtgagattgctgggtyatatgtaacctagccacttaattacagtggtttgaggtcctgcaggcagtaactactcaacaccccatcacagtgttttaatttgtgacaagttagagagaatgaaagaactttctccattatatgtaaatgtaaccacaattttaaaatgttctttatgtttttaaacagtttaataaacactggcttctgttcttagcataaatatatatactatatttgatcatttatattgcagaaatttattttatagcaaagtagtctatctgcatattatggataaaatgcttataattttattctatgctttaaaagttttttgatgatcactttggttaaataagtagctactactttacaatgacctgtgattctgttttgatccaattttttagtcttttaacatccttgataaatgtcctattaactaatcctcctgctgttaagttgcagggttttgactccttggtctgaaaaaggcatccattcctgataaatcttgaatattgacatcagtcaaagcctcctcttcagaccctggagaaggtgacaatcaaaatgaactgcttttctgagacacagagcaaaaaattagatctattcaatccctttaggtcaagggactactgcataaaaggtgagtgagtragattttaagggctgattttgagagataaaattagttcagaccttctaaatcaaggatgggcacacagatgcctaaaagctgaaaaactggggaactttgcttctctaaattcctgaactcagatgggtgtaacaaaatgcttaaatttgggttatctatgctattagctcttagtcaatatggcttgaaatgttgctctaaaatcataataaattcacccagatcgtggggctccaacaagccagatgctaaccaggtactcatgagcacttccaattacagatatgagattctcattactcattatcccaccatgcccctcctytgcttgaagcagccagaaagatcaatgacaagattccccatgattgaggaattggtatatagaaagagggcactgaaatggcccaatttcctggtagaactgatgtttatgttttttccttttaataaacatagaaattgaccctactagtcttaaagcttgaaaccattgtcttatctgagtttctttctcagaaaaccaacctaaggctaatatcaagaaatggaaacacctcttccctactcctccctcattcctgttttcctgtatatatagcatatagctacattccttccctgctacatagtctctcaattgcagtcagatgaggagatggatttgagactgatatcccatctcctcaactgcagcacctgattaaagccttcttctctggcaatactcagtgatttgctttctatgcagcaagcaacaggacttcaagtccctggtatttcagtracaaaaacaccatgatgtacacgatatttagaggagccaaaaaattctgaggtcttttcagaacaaaaaactagcaactaataaatttttttttcctgaagggagttatcttatttcaagatgtcataaacaacattagaaaagtaggtccacaaatattttatagaaataaccataaatattacatttaactaattagaagtgatgaaactacaaaatacagatctaaatacagtaaccaagaagttaaattgtgtggcctacagaataatgttaygctgtaccaaaatatcttttactttataccacctgccttcatttttttgtggtaaataataatttgctgaaatattttcatcaagggtcacaaaatttaaatggatttcatttatatatwtttaaattgacacaataattgcacatatttatcatatttatggagcatagtgtgatatttcaatacatatatataatatgtaatgatcaaatcagggtaattagcataggagttttctaaataagcaaagaattgaactaccatatgatccagcaatctcactcctggatatatatccaaagaaaaggatatgcttctttacgtacattcacgttgaactccctttcaaattcttttgtgtggcaaagtcaagaatctgaaccagcccactgacaacagaactatccttaaaattcattgaagatagaaccaatttaacttgcacatctttgcatgtcaccccatagatgtctcttgcatgtaggaggtgcttagcacatagctgctgatgaaattctatttcaattcccacagtgtaggacaaccaagaattttagtgaggctgtagttttgggcttgttttatgagtaatatgcaatttactggagggaaaaattctgtatttttttgaacataaactgtgctgccttctgccctatgcaaatacatattttcagttgttcaagtggaaaacgaactgatgtggaagctgagtgcagaacttggcatcttacatgtgcttaataagtgttgctttattatgagttaatttggggaaaaaatagaaatctgctattaagaggagcattgtaaaccctgctggaagtcttctgaagcccagcaaagataggcaacatctttgaatgtagggcattcatcaccaagaaaggaagaaagggttgtcagttattcagaaacttaagttttcctgatcagaagcaagccacacagtcacatacagaaagcctcttcagttgtggtgttggcctttcttttctatcgcttatttctttcccaatcaagtccaatggcattagcgtctctgggcaggagattaaaaagggtagagcaatacaaaaagcatgmacaaaggttaattcctcaggagcacatgctgtatatctgcaaggagactaggtcgttaaatttcaagagacgctggttctcaaaacgtagagaataccagagttaccatgagggcttgtcaaagtgcacatgcacgtgtmacacacacacacaccacaccacaccacaccacaccaggttcagcaggtctgggatagggtcgaggaatctgtttctaagtaccatgcaggtgattttcatgcagagtatattggtggaacacattttgaagtaaacttcatatggttatatttatacccttaaagcatggtgagaaaatcatgtatgaattgtgaaaggaggagtcagattaggtggggagtgattgcaattaaagtttgaaaagataaggttgctatagaaaatctggctgtctgcagttcttaacattctttctaaaggtatatattacaaagcttgtgaggagagaagtgtgctcacatttgtattatgataatagttttactttcatttacaaaaaccaaaactgtcccagtttgtgcagttatatatagtttctccatatgcacagcagttactctggcaggtccatacatccaggaaacacatattacaatttgtgtgccatagaccacctaattataggccaacgatttaggaagaaatgattgacctgtttaggactgactcagaaaattaaaacccaaagagtaattgcagccrtcacaacaactagttagtaaattgtttctctgaaccctaaatgtcccaatcaaagatactcatttatgcagcttctgaaacatgcctctggtgaagccagtgggcttcatagctaagtttttaaaggcaatttctggttctcatgtgttactcatatgtaaaatagtggaacaatttctagaatttattggcattcaatttatatgataattcttattaactaactggaatcattcattaactgaaacaatttaaagtacctttatgttttatctaaagaaacaccattgttgatatcttcctaagcaagacttcraattaatgtccaggttaatgtcacatgctgaccctttctttaccctgcaacaaaggggtaaaaccccattcacaaagttacagatgaactcaagcaaggagaaatgcatattcctaatcatgattcattaatttagtggcccaatgtgaactgaaataaggaatcttgtaagtatttaaaagcttctttgaagactgcttatttctctatgagaggaaaagaagaactgccaaagtaaaagacaccaccgttgaacaaattagatattgatgtccaaatgaaggtagccttggattagagttgaataaaaataaaataccatattgttcagccctgatgctggtgacagggccagttattaatcagatcmtactgggttagaaattgaaaacacaaaacatctgaacacaatgactctttgtctagacagacaatggcatcaaaggcagcatctcctctaggcctccagctcaaacccacctgcacctgaaagtgctgccattatatgggcttgacccccacttaattccttcatcttttttctcttcagaccctcccccaattccagcacttggtgatgttgtcctggcragtctctctattaactagaatgatttaatctyagttatcaggattrccacaatggctgcctgaattctttgcacagaagtggaagaaggcatgaggctgaccagtgatccagatgctcatcctgacttgccgcatggtactgggaaaattagtttccatgctgggaatgcagacsgcttccttgcactgaaaagtattttccaagacatgtgaaattatgaccctggttacactgtatattaaagcaaataaaatgtttaaataatatgcctgacttccacaagcaacacctgagcatgagaaataacaccagcctccaagtgagcatggatgatgtgtgcataggacagttggggttctgtatccatcatctcgtctactcttactggtgaagcaggcagcatggctttccctgtttggagaaaggtggaacctggtgcttgaggggtgaccagctgctgaagtcacatggggcaaacatcagatgtcagagtcgaaggcctcacctaccattcactcttgcctccctgaacaaaattaaactcacacagtgatcatctgacacttaaataayggaaagttttgaatactgattaatattattatcccaaataatattgccaccagacatgggacacaaaatgaatctccctttaaatatatataataatctcactttaaccccacatgctggsgtttcacagcagtccctctgtcacacagagatgaacacttctacagagaaagatggggcaaataagaaagttgcagaagtccccagtggcagatgtgaggggctgcttgcaagtccttatagcacaggctccaggatgtgcccctggagcagaggagggggcagggaggccaagagctagcaagtgcatcttctgggccaggtggtgggcactgagctgtgttctgaagccacgaggtctttggagttgtgttaaggaggctcctgattaagtcatatttggaaatatgttgtctcttctaagaattcctttagcaaaaataatatcacaaatcagtggtaaaagacagaaactgcagtgtttattaacccatcatccagcacacacaaatcacttgaaggaggggtgagtgtgttggaggcctgggaagcacaaggcagtgcagtctttctttgggcaagtggacgctcgcacgaccacaggtggaccaggtgctgtggggcctgaggctccaacaatataggggcattctgtatgaaaaatagcatgatattaccaatatgaactaagcacaaaaattaacatgtatttaggaagagaaaagaaatcatagaaaattacacattttaaaatgctactaaaaaaaatacaaaatccagaaaaatgacagtcacaccaagggaacccaggaaaactcgccaaataaaggaaaatatataggactggggaaaggaattttgaggctgtattgatacactcagaaggcctctgtggaaaggagccagtgtctgctctggactgcaaaatgcacccagctcctatgtcatcagaacccataaagttcagccagatgaggaaggttctgtccggaaaccccttctctaacattctgcacctctctgtgaaggtgaatctacatccttcaggcagtgggatgttcttactgataagcaaaaattctgacttccccccaattctacagaacaagatcttccattgagatgaaatgcggtagtcagccaagaaagaggctgtttaacatttcaaagctgcagtttgaaagaaacatcatttcctgctcatgatgccactggctttgttaccatcagtccatctgtccatcctgcaggtgaaagggcagatttgcactttcttgatccatgttattttgacttactcatgtaatattttcttttttctttttttttttttgagatggagtctcactgttgcccaggctggagtgcagtggcatgatctcggctcactgcaacctccgcctcctgggttcaagcaattcccctgcctcagcctcccaagtacctgggattacaggcatgtgccaccataagtggctaattgtatttttagtagagagggggtttcatgttgttggccaggatggtctcaatctcctgacctcgtgatccgcccgcctcagcctyccaaagtactgggattacaggcatgagcyaccacamccagccttatttatataatattttattaattaatatgtgacacaactctaataatttcttcctatgttttcatcttcaattaatgaatcgttatctgcctcatcataagacattgaatttatagcagaattgtgtataaatagggcagaaggataagccagtctttctactaagatgttttatcattttgtaaaactgatggtgcataacatcttccttctaatttataactcaaaccttttctgattgtcgtcaaatttggaaaagtctcttccagtttactttcatagtgatctctaagattttagctctttctaaattttgttgattgatgatcgtagggactttttctattgacagtgctcactatcacagcatttttaatgtgtcactgttgttctgagattcacaattgtgcaaatgtatcattttgtgctatatttattaggtcattgaacatgcaggaggagtttcccttgaaacaagtatttcttcaagctgtcttgctgctggtcaagtttacatctgtgttgcctgcagctgggagaggtcgtcagggtaagaggggagggaggtcagccccgcgcctcgtgtctgtgccattcacatgcgtgtgtccttgctgtgggcagtttcaccacacaggtctgtgctatacaaatgttaaaaatcaagatttatttctcatccaattcccatcaaaaataaatcaactgcatggtgcactaactattgtatataccatattggtgagtatatttccaacaggagaaaacttccatttttgactaggtgtcaaaaagaaccaaattatccactcataatttccatatttctgctgggaataattttccacacagtggcttctggctccacgcattgcaaaccttgtttcctctgcactgatcacaggcttcccatatgyggtgctgggaaatgtcgtgatccaggaaccacctctgcccctgctactttgggtcaaatcctaggcggatggtggggccagggctggggccacttttacaacagggtctctagagacaacgtaactatgcccaggagtggctgagaaccacaggagtgtgttcccctcaccccaggttaaatgygtcccagctcagcttcctcttagccagataccaaaatgcctgtgtccacccwcagagcatgcaggaggagagtgggaaagagaaagtcagagtaaacaaaggcaatgctcttgaataactgcagtttaaatacttcttaaaattgtagaaaacatccagccaagaacacctgttgctcggccccactcagacccttttctgcggttgtgaggagccctgcgcttaaataccattagcttcctggaaactcccctctgacaataacataggcagactccggtattcttgcacagtgcatgggcaaatgggacgttaaggaagaggcaaatccaccagccacaaaagtaggagacctggagaagaggtgagggaaggagaaactcatgcagaagaaatctgcacgggcatcagtgcctggtgagaggccttcagccgcgtgtaaacaagttcccaattaaaatgtcttaaatgcaaagggaatgctccacccctcatgttaagaagcccttggttgagacaggctccagaagcagaactcccagcatccatctcccatcacccagaatccctgggattctctcatccttacctctccgttcatgatgcttcagccttgatctggtagcaagacgtttgagaaagctccagatattacatcatcaacactgacatccagaggcagaaagagctttgggaagagctcatatcatatatagatatgtatacacacatatatacatgtatatatgcatacacatctaacagagagagagagagaaagagagagmaaggggaagacaagaaagccaaactatcatttgcatttttcctggaagaaagcaaagcataagggattattagcaatggatatctttagagatagtagcctgggtaagaagatgggtgcttttggcttttcctttttttttaattttgaatctctcttttccattgaatattataacaatgtgcttgtgttttttctaaacatcttaaatgtcagccatggtgtttgggtgatgagattataggttatttttcactggattctctctatgtctttattttaaataacaaatgctatgcctgattgtcctattggtgtggttgatatgcctgcatatgtttaatagcacactagctgtgaattaatcatgagttgacttttagtatgtgtttctactcgctctgtgaattataactgccatttagtattcaatgcatttctccttgtttttctctgtgtggcactgaacatttctggattagatcttctctcagccacactgtgagctcctgggggaagtaagggtgtcttagttcacattccctattgtgccattaccatcagagagctcatcactgctgtggactcaatgactgtaattagcaggtgggctctggcttggctttagagtactggatttcatcttctttcagtctcctatattctgcatctgttgaaygtaagggggaggtagcctgctgcccagttcacttgaaagtaatggacatgtaaatatcaagatgttggtctgtatttcattcagtgaaaactcatggcatttcatttacatctcagtacctatacctcaatattagagtgatgtgcagtcactgaatccattacaaatctgatgacagttgtagaaataaatgtgtgtgtgtgtatgtatgcacactcctacacaaacacattcataagcttcagagtacaatggggkttctgcaagctcttgatagactcttatattgaaaaactttgttctggaaacctgaccagccatttccaactcccttcctcctgcctgaacccaagtgcaaagactgaaagtatcaggcaataaacttcctagccttcttcacccctggggatatttcagatgtcattgattggaagtggcaaccaatgacatctgagatgtcagccaggtcactactaaaaaaggtctatattgaataaaaagggtgagatcctgcctctctctctctttctttctctctcccttcctcctgccaccactaggactgccttttgctcctagcccttacccttggacactgtactgygggacaggatgccttgggctatggtgttcacctttcactcatgagcaatgtgcccaagaacaagagcccaaggaatgatgtagaagatggaaggaaaccacctgggcccctgctgaggacactgcaccaactctatgaattgaccacccctacagctgttggtaaatggatgtcgtcttcatgggaggtgtagccattgtttcccaggactcttgctacctgtagctaggatgtttctaggagtaatggagccaacacaccctaaatatcagtctcagagccagagcagcaaatgaagcttattgtgcaatggaatcaaaatttaactgaaaattacatgacgtggcatcttgtccctaacttgcttcctacttatttcctcaaagttacaaggggtaatttaccaagccttcctcatcagatgaatcaaagagcattaggtaagtgaaaatatttcaccaagtccgatacaaatggacactttagtattcaattcactgaggataaaagaggacaaaatagccctcacttttggaacacaggtaactttccagatgacatattttttccttaagcaagtctcagctctgagaaaatggggatcatcccaagatgggttatattgagtatcctggatgagagtttcccaaaggtccacagacctaatgcccactgtagctaaaaatgcagagtatcttgtgttgtgagtcatgactccactactcttagttagagtttcctggaaacagatgctgaaatggagattcatgggcaagggtctcattgtaaagagtacaagggtggcagcggcgaggrgtggggcagagggagaagtcaggctggggtgcggctcagcagaagccacggccagccccacggagagctctaaagctctaaagctgggatggcctcagaattgtttcwtattggtgcaaacaagtcaggcctggtacccacttttaggccttttattcaaaataggcagtttcsggggtgggaagggcatgctcttaggcaaagcatcttcctttgyctcagatcaagccccattgaaggactcagctgtgagcaatcagtggacacacaccccaccccccgacctggctgagagaatgagtcttgctggtgaggggaaaccttgagcaatgcagcctccagtgagagagcaagggatgtaatctctctgagacccagttaactcatctgtacaatgggaatgattataactactactgcatatggtcatttaataaataaatgaaagtgtttttgaaaagggactttgagctctgaatgatgttacatattttttggttgttaaaatatattcacaagagagagaataaaattggtgacacctggcaacattctgcatgccccaaagtgagacacaaagagtcatttagcaaatgctcgttaaccagctcttaggtgctttgcctggtgctaaatcctagagtaaaatgacacacaccatgaccttcaataaataaaacaggtgtataattgatttagctgtaagtgtggaaaagaaaaagacatgatttttcttgtttgtagaagattttctcaaatgtctagaaaactcagaagaatcagctttaacattatgaaaatcaatataggtgtttggcaacatggctgaatccgtggcaaaatttaaatatcaatagttttcctagatacttttaaaatctagttagaattaataaagaaaaaaatcccactctgctgttcctaaaaaacaaaatgggcagcaatattttttatgataatgcacttggtacaataacattattcgctacaggcaaaaggtagaagcaactcaagtgtccatcratagataaatggataaccaaaatatgataaattcagataatgaaatactattcagctttaaaaaggaaaatagttctgacacatactacaacatgagtgaatcttgaggacattatgctaagtaaaataagttacacaagaaaaggacaaatattctatgattccacttatatgaattatctacagtagtcaaaacatatttgagaaaataattcaaggaaatttccctaattttctagagaggtagacatccaggtacaagagcttcagagaacatcagtgaggtactataaaaaatggatatcacaaaggcatataatcaccagagatcaatgctaaagaaaaaatcttaaagacggctagagaaaaagttcaagattacatacaaagggaactctaacagctaacagcagacttctcagcagaaatcttataagccaggagagattgggggcctattttcagcaatcttaaagaaaggaaattccaattaagaattttatattccaccaaacttagcttcataagtgaaggagaaataaaatctttttctgacaaacaagtgctaagggaatttgttactcctagatcagcttgacaagacatccttgagggagttacatggaaataaaakaaatgatccctgctaccccaaaaacttaagaacaaagctctcagatcctataaagaaaccacgtaacagaaactacaaagcaaccaactaaccacttcacaataggataaaaacatcacatatcagtattaaacttgaatgtaaatagtgtaaacacccatttaaaaagaataaattggcaagcttgatttaaaaataagacctatctgtctgctgactttaagagacccatcacacatgtaacagcacccataggctcaaagtcaagtctttgttgaaaactggcacaagacaaggatgccctctctcaccactcctattcaatataggaaaccctggccagggcaatcaggcaatagagacaaataaaagatgtccaaataggaagagaggaagtcaagctatctctgtttgcagatgacatgatcctatatctagaaaaccccatagtctcagcccaaaagctccttcagctgataaacagcatcaacaaagtctcagaatgcaaaatcgatgtgcaaaaattactaacattcctatacagcaacaacagtcaagctgagagccaaatcggcaatgcagtcccattccaattgccataaataaataaacaaacaaataaataaaatacctagaaatacagcttaccagaggggtgaaagatctgtacaaagagaactataaaaaactgctcaaagaaatcagagatgacggccgggcgcggtggctcacgcctgtaatcccagcactttgggaggccgaggcaggcagatcacgaggtcaggagatcgagaccatcctggtaatacaatgaaaccctgcctctactaaaaatataaaaaattagctgggtgtagtggcagacacctgtagtcccagctactctggaggctgaggcaggagaatggcgtgaacccgggaggcggagtttgcagtgagcctagattgggccactgtactccagcctgggtggcagagcgagaatccatctcagaaaaaaaaaaaggaaagaaatcagagatgacacaaagaaatgggaaaacattctgtgctcatagacaagaagaatcaatatcataaaaatggccatattgcccaaaacaatttatagattatgctattcctattaaactaccactgacattcttcacagaactagaaacaactattttaaaattcacatagaaccaaaaaagagcctgaatagccaaggcaatcctaaacaaaaataacaaagctgaaggcatcacactaccctacttcaaactatactataggtctacagtaatcaaaataccatggtactggtacaaaagcagacacatagaccaatggaaaagaatagagaacccagaaataaggctgcayacctccaatgatctgattttttacaaatctgacaaataaaagcaatagggacaggattccctgttcaatacatggtgctgggataactggctagccatatgcagaagattgaaattggaccccttccttacaccatatacaaaaattaactcaagatggattaaagacttaaatgtaaaacccaaaactataaaaatcctggaagacaacctaagcaataccattcagaacataggaacaggcaaaaatttcatgacgaagaatccaaaagcaattgcaacaaaagcaaaaattgggaaatgggatctaattgaactaaggagcttctgcacaacaaaggaaactatcaacaaagcaaacagacaacctacagaatgggagaagatttttgcaaattatgcacctgacaaaggactaatagccagcatctataagaaacttaaacaaatttacaataaaatacaaacaaccccattaaaaagtgggcaaaggacatgaacagacacttttctaaagaagacatacatgtagccaacaatcacatgaaaaaaagctcaacaccactgatcactagagaaatgaaaatcaaaccacaatgggataatatctcataccagccagaatggctattaaaaagttgcaaaataacagatgttgatgaggttgtggagaaaaaggaatgcttatacactgttggtagaagtgtaaacttagttcaaccattgtggaagacagtatggtgatttctcaaatacctaaaaacagaaatatcatttgacccagcaatcccactactgggtatataccccccaaaatataaatgattctattataaagacatatgcacacatatgtttattgcagcaccattcacaatagcaaagacatggaatcagcctaaatgtccacctgtgatagacttggtaaagaaaatttggtacatacacaccatggaatattatgtagccatagcaaagtatgagatcatgtcctttgcaggaacatggatggagctggaggcctttatccttagcaaactaacataggaacagaaaaataaataccacatgttatcatgtataagtgggaggtaaatgatgagcttaaggacacctgtaggggaacaacagacactgagaagacaacagaaggtaaaggatgggagacacttctcagaagacacagaggaggctaacaaacataaaaaatgctcatcatcactaatcatcagagaaatgtaaatcaaaacagcaatgagataccattttacaccaatcaaaatggctactaaaaagtcaaaagcaaatgcctgtgaggctacagagaaaagggaatgttcatacactgttggtgggagtataaactagttcagccactgtggacagcagtttggagacttatcaaagaacttaaaacagaactgccatttgacctatcaatccgtttactggatttatatccaaaggaaaataaattattctaccaaaatgatacatgtactcctgtgttcatggcagcactacttatagtagcaaagacacggaatcaacctaggtgcccatcaatagtggattgaactaagaaaactttgtacatgtacaccacaggatactgcacagtcataaaaaagaataaaatcatgtcatttgcagtaaaatgaataaggctggaggccattatcctaagtgaattaacaaaggaacaggaaatcaaatactcttacttataagtaagaatacttattcttacttataagtaggagctaagccttgggtacatgcgtacataaagatggggaagatagacactggggactattagaggggaaagagaagaagggggaaggagctgaaaaacaacctgctgtgaactatgctaactccctgggtgacaggaccgctcaaaccacagtgtcacacagtaacatccaggtaacaaaacagcacatgcaacccttgaatctaaactaaatttgaaattactttttaaaagccctcaaatctcagtgacttaaggcagcaacataacactctattattgtgactgctatttccacagatgcktggcatctgtgctgggggctctggaccacattgtggtcactctgggcctcaggatgatgaagtcaccctcataacaacagaggggccaaggcaatgagcaccagcactccctagcataactagaaagaacacctgtcacttattcttctattatattgactaaagcaggtgatgactacaacaaactcaagggggtgggaatcctgtcttgcactcataagaaacagaaatattcacgggacatccctaacgcccaccacaaatgcccacctaacagctaccaggcaggcacaagcagagctcagaccccactttgtccctgctcaccttatccccttccctggacaccctggacatagggatcctgaaaccacctaacaggagtataatgaaatgcaggatcttaagaattccttaaagtacacagaaaaacattttacccatcttgggcagtcaggtatcacctggacagagtacctgggtgatcattcacatgtttcattcattcagctaccaaattcactaagatgccaaaaggatgaagttgccctgaacccatttggaactgcctgggtgccaacacgtggctactggttgcctctcttatctgattccttgttcagtggaagagaatgagcttcgtagcacctgtgattcattttcatttctaccttattttacttctgggcctccaggctaatgattatattttccttctgtctcatttcctttttacacattttaaatttgggggtaattttccaaattacacaaagcaatttcctttttgtttctgcaacttttataaaatatttttcttttaattattcaagagaatttctctgtaaattaatgtttctgaataaagatttgtgaaagtttttcagacttttcataaaatgagcctaatttcatcactcctactgtctttgttgagtatacattttatgctagaaataaaattgggtgctggagaaaagaaagcaaaagagccaagtcctccagccttgatggatgttcaatatagaattttgggtggtagacagacaagtagaaatcagaggagagaatatggcactggagagcacagagaagggcaccaaacccacatagagggctggaggaggacaagatgctcacatcccttggttggtcctcactatctcagcacttaccagcccacattccaattgccagcatctgcactgattttcctgtgcatrtggcacaagtaagtgcaagagaactaatggccctgcacattcttcacccacagaatgacaccagcagatatgttccaggcaatctcccaggggttcccagtggaaatgagtcccacatgcccgtagcggtagcctggcaactcgcacttgctgtattgaccayttctcttccttgtctcatttcctcactgcttcagtagactttcctgggactacccaccaaataaaacacttgcaattgcatatttgtttctgcttctgggtaggtcaatctagacagtcacctttatggaaaatataatacctgggsaatcacgaaagatgaagaggaatcaatgaaatgacacaggggaagggaattccaaaaaggaggagagtctgggccaagacacatggctgtgatttggtgtgagttccacatgaaggggcaatgacctaggagttaaaagggccccatccactgatctcaaaaacatcttaactgtgtcctaccataaagtctctcaaatgtcaaagattttgagtgcagcagactgctggaacatctaacctcatggcgagagcatgaaaccagattatatgggttaaaatcctggttatccatttacacactgtgtaaatttcaaatatgtccttaacctctctgtgactcagcttacttatcagtaaaatggagacactaattgtaactactaagtagttattgtgaaatgatgattattgttatatataactgtataattatatacattattatatattttatattattgtgagaataatatcattatcattagcttgtttttgtttgtgattatctcagtgatctctgagaggcaaatcacatggagaaggagacttagttgctatcctccaagacctcatggcctggtgagggacagaaatacatacacaagaagaaagactctaagaggaggatggtaaaagcctctagtgaacataaaagttctataggagatcaaactcaaaaggttcacacctggctacattgaccagagaagaatccatagataacgtttatgtggacatgaacttgaggaacaggtagaatttgggcaggcaaagatctagggaggagtgggcaggtacaggtgactttgtataaagaataggtgtcctttcataaagacaaatttatgtgagcctggacaggtatacatgtgcagaatatcaagaagtccagtttcttttgaagccaagccacattatgtgcaaaagcaagagggcggccacagagggcaagatgcctgtgtttcatgtggcaggggatgcagctttctgaacattttagaaccaaggaaacagaatctgagggtggagcccagtggaccagtgaagatgtcactgtggatgtctagatcagacctatgtccagcaatgtgggagctgagaaatgaagtgagtcttctcttttattgattgcagataattctgagaatagaaagcaggttcacacactcttacatcatgttacaaacccaattaccaccttatatttttctataaatgtatacactcagggtaacgatgtaaccacatgaggtttataaacagtgtggcacaatgtctaacgcagactaactgctgagaggcacctggtaattgtggtgaagatgatgtgatgattgtgacgacgatacagtggatacagtggaaatacagtgatgatgatggagatacagtggatacagtggagatggagatggtgatggtgatggtgatagtggtgaagatgataataatgatagtatgctggtgaaggtgatcatgataatgtggtggtgatgatggtggtaatggtggtgatggtaacggtgatgatagtgctaatgataatggtgatggtggtggcaatagtaatggtaatgactatataaggccattcttgtgttgccataaatacctgaggctgtgtcatttatacagaaaaagggtttaattggctcaaaattgtataggctataccagtatgtctccagcatctatttctggtgagggcctaaggaaatttacagtcatgtgtgatggaaggtgaaatgggagcaggcatgtcatataataacagagagagcaagacagagagagaaggaagtgccacactcttttaaacacccagatcactcaggaactcaaaacgagaatgcactcattaccatggggtggtgctaagccattcgtgagggatctgcctccatgatccaatcaccttccactaggtcccactaccaacattgggaattatatttcaacatggtatttggaggggataaacatccaaactatatcagtgatggtggtgatggtgatgatggtcatggtgagaacgcttgtgataatggtgacggtgagaataatgatggtgctggtggtgttggtgatggtagtggtgactggcaataataatggtaatcatgggggtgatggtagtgatgatagtggtgatggtggtgaggatggttgtgatgctgatggtgttgatggtactgatggtgatggtgtttatgttatttgtggtgatgatgatggtgtttgtgattgcgatggtggtaattgtgatgatagtagtggaggtgatgctgatggcggcagtgttgataatggagatgctggtggtggtagtgatgatgatgatggtgatggtgatgatgttagcattggtagaatgatggtgataatgatcagaatggttatggtagtggtggtggtgctgacaaaaatgataatggtgaaagtgatggcagtgatggtaataatatgatgttaatgagaaaatatcaagctctttggagcagagtgtaagcaccaggtctgagcaggtggaagtcaggggggattcctctgtttgcagattcatcagatcaagactcaggtgaatcttctcttcagacaccttacattggatgggaaagtgtgtctgttacaaatggaccacatactcttttttaaaagttatgttttattgttatatgtttagcatgtacaagtgaaggtttcttacatgcatacattgtgtggtggtaaagtcgggcttttaatgaaccaagcacccacatgatgaacattgtacctaatgggctatttttcaaccctcaacccctgccaacctcccaccttttgtaatctccaatgtccattattccattatgtatgtccatatgtactcatggtttagcccctatctataaatgaaaacatgcagtatttgactttatttttctgagttactttagattatggcctttgatttccaccatattgctataaaatacatgattttattttattttattttattttattattattatactttaagttttagggtacatgtgcacaacgtgcaggttttgttacwtaggtatacatgtgccatgttggtgtgctgcacccattaactcgtcatttaggattaggtatatctttttaatggctgagtgttgtttcattatagatggatagagagagagataatatacatatgtatgtatgtatatctcacactttctttatcctattctttattaatggacacttaggttgattccatatctttgctactattaatagtgttgtgataaaaatacaagtgcaggtgccttttttatataataatttcttttcctttgggtagatacccagaagtgagattcctgaataaaagtgtagttctattttcaattctttaagaagtctccatactgttcttcataggagtcgtactaatttatatttccatcagcagtgcataagtgttatctttacatccttgccaatatctgttgttttcagactttttaatagtagccattctgactagtgtaagatggtatcccattgtggttttaatttgcattgctctgatgattactgatgttgagtattttttcatattttgttggctgtttgtatgtttgtatggctttttttttaattttgagacagagtccttgtagatgctggatattagcccattgtcagatgcatagtttgcaaatattttttccccaatcttaggttgtccatttactctattgattttgctgtagtaatagttgttattgttgtttgtttcttttttttctttctttcttttttttttttgagacagggtctttcttagttttccaggctatagtgcagtgatgtgatcatagctaactgcagcctctaacttctggactcaagtgagcctcctgcttcagcctccagagtagctaggactacaggtgctagccaccaggcctggctaatttctcatttttttttagagatgaggtctcactatattatccaggctggtttcgaacttatggcctcaagaaatacttcaaactcagcctcacaaactgatggtattataggtggagtccactatgtcaggaccattgattatttcttttgctgtgcagaagctctttagttttattaagtttcatttgcctatttttgtttttgttatgtccttttgaggacttgctcataaattcttttcctagtccaatgtccaaaagatgttcctaagttttcttgtaggattttttaatagttttgtctcttatgttgatgtctttaacccatgttaagctaatttttgtatatggtgagaggcttgggtctagtttcattcttstgcatatggctgtccaattttcccagtgccatttattgaagagggtgtcatttccccagtgtacatttttactgactttgtctaagataagttggttgtaggtatgtggcttcatttctacattctctactctgtttcactgattcatatgtctatttttataccagtaccatgctgttttgattactgtagcattgtagtataatttgaaatgaggtgatgtggtatctccagctttgctcttttgcttagacttgctctggctattcgagttcttttttggttccatgtaaattttagaattgttttcttctaattttgtggaaaataatactgctgatttgataggaattgcattgaatctgtagattgctctgggcactgaggtcattctaactataatgattattccaatcaattagcatataatggttttcaatttctttgtgctatctatgatttctttcctcagtattttgtagttctcatttgtagttctgcttaaatatattcctaggtatttcattagtttttgatagcgactataaatgggattgcttcttgacttggttctcagctacattgytattggtgtgtagaaactccaatgatttctgtacattaattttgtatcttgaaactttttaccaaatttaacaaatctaagagatttttggtgaagtatttagggttttctagatataagaacatatcatcagtgaacaagggtaatttcacttcctcttttcccattaggatgcctttcttgacttgttccagttggtagagtgaatgaattcaactttcccccattaaatatgatgttgactatgagtttgtcatttatggcctttattatgttgagggatgttctttctatgtctagtttgttaacagtttttttgtcatgagtgatgctgaacttttatcaaatgctttttctgcctctatgatatgatcatgatttcgttgttaattttgtttatgggatcatgtattttgttaatcagaggaataaaagcagatttttkcccctggaattcatgcctctgacccctagatattaccatgaacaagaaggagatgggtagcttcagaaaagagggagggaaggaagagaaagaatgccaaaaaaggggtgagaggagaaagagtggaagagaggacagaaaccaggcttggctatagtgtcacaggatatttacagtgtcactttgccaactggaaacttctgtgcctcgtgacacctctactcaggttttgcttgcacccactgggctcattccacccacttggtctgtcaggctgtgctcagctcacactgtggcccagattccacacctgccaagggtgagccaggtgcagagtggtcaggggtgtgtaagcaaatgagcattgggtcaggccactgtgcagagccagacatgttgactgcagtggggcaggcagctccagttgctggcataggcactggctctgtgtggggctttggctggaccagacgtactgcaagtggcttccactgcaggcaccagcatctggacaaggggaatgtggtggcacctgaaagcttggagatgccaggaaccacagagccccaaacagggtgttaaagcatatcacagccctggctcccagaatggccacagcttttctctcctcatcaccacagtgtggtgagttggggggtgtttcagcccttacagctcttgcagtctcgccatttggcaggtcctgagttcctgtcccacgtccaggaggaatggggtatgcgtacaagtggagggtgagcaaggtggagaggcgcttcattgagtgacagaacagctctcaggagacccaagatgggtagttcctttctgcaagcaggtcagccccaggagtgtccagctctcagtggaaaggagaaccatggtgtatagctcctttccacaracaggttgtcccaaggagttgaggagacctgaagtgggtagctccttcccacagctggtagtcctgatgtctggctgagtctggctgagtctggggtttttataggctccgaatgaaggaagtgtgtgctgattggtccatgggcaggtgcaaaaaaagtaccataagttttcactctggaccacggcytccacccagaactgacaccctggttccaaggcttcaggctgtccctggcttgaaggtgggaattcaccaggtatccacccctttctgtccaggaacctgtctgcctcccaccatcaacatgccgtccatggtgcccaggctgttcatattgaacagtgcctgcaagcccatgctgagctgcactcagcccccaccagcagccctcccatgctagtcagctcccacagtccagagggggctgaagtggcagagggctggccactccagcactgacagcactgccccaagtgcacaaacacccagctgggtcatgacsgctcccaggctcagctacaactttgctctgctgcagagcaggtgccaggagcagggacaggccaggkagcaggagcaggcacttctgaacctgtcagggctggggactttctgggccctgagagcacagggatgcccaggtctggagctgcagctgggtgaccacagctatgcctgggagcatggggctcccacctgttcctggcccccaccagctctggggagcatgcagccccagccacacctctcctgctgcagctggcatcctcacagtagctgctctagatgggccactgtcaccatcaataggggtatccacactttcattgtcwcctgccttgtgaaggtctagcaggggcagtggggagagctgcagaaataggaggttgtaccatccactgtcaattgctctaatcaataaaaccctgcatgcccaggcagcctagagtagcaaggatagagccaagcagagggaactctgcagaacccagaacagcactagggaagtatttagtttgcaaagcttgttcctccaaggcagaccctatgtcaaccccaggactaccttcagagcctgctctctagcatgaggttggagtagctggtgcccgagaggctggtcatccgtgggtgaatgcttccctctggtggtaactatggtgaagtggaggatgcacgctccaccttgcagaggttctctgcaaactcatgaactgagcagaatttacagggcaggtggctgtgggagcaggaattgccctttagctttgtggtttatctgccaccttggaggattttcttcttgtctttatctttgcatttgatatttcagcatatcattctctcctttattatgtgggagggggttgcccactctgcaagcctcttccctccttagttcccctgacaccctccatctctcagggcccagtggctcacccttccctgccaactctggcacagcccaagggttcttctcagacaccttccatgccacaagttgcagactgtaggttcctgtagtccgtggtatttgagactaataattgcaaatattttgattttccaaatatgattggcaaaggaaaagttctacgatcactattccataatagaaagtcattttggtgccacccaaaatgaggcattgtgaaaatgaaggatgccctgccctgcactctagtgaaacctgacccctaggctggatatgaaactagcccaattgtcccataaaacttgtatttatggtttcttttgaatgaacatagaaattggccctctgcctcttaaaacttgagaaacttacatttgtcttatctgagttccttaagaaacgcaccttcagcatcaaggaacggaaactcaccagatcaccattccagacaatgagatgccagattcctcaaccatcatgacttctgctcaccaattcctcttccttgaccctccccaattcctgttttcctgcaagtagttacatttcttctctactatataaaccccttattttagtgggtaagaacaatgatttgagactggcctcccatctcctctgctgtggcacccaatgaaagccctctccctggcaatgctggttgtctccatgtttgactttctgtgcaaggagtaacggaacttasatggaaccccctgcattttggtaccagattttggtttcctcaccaggaaagtgttgctcatggctcggctatgtggggaaggagacttttggaagattccctaagctgctgcccatctacttttggctggaggtgggtttcagtctccatatggccccaccgctcctcgccccaatcgggtttctgactgcctaggaagaacagcctttgaaatctgacatctgtgtccagatgggtgagtgtctttttgggcccagagagtgggatctgatccctcaatttgggaaattctaagggaatttccatttgcaggttggataagcgcaaccaacgtaaagaggaaaaccgtctggctgtttctgtttaaacattcttgaggcttgtttgttactgcaacaattgaattgtgtttcggtgattgttcgtatgtgtgtgttcatataatcatgggaaaccaaatttgataaactgataatcttttgtaatactgttgggaatctggagtttgctgttgaatgggaatgtgggatggagttgtgtgtaatcaggctttatgttgctgttttttgggcctgcttagtayatgatgttcttccggggtgttgcttggcccagtattctttacagtccggagaagtttggtctttaaaaaatcaaactgccgtggaaatgagtttaccctaaattttgattctgagccttcgttggattacctatggggtaaaaaagctttagacatgtgaacagaacagtgttataaaccagtgagtttgtattactacttcatggctagattwctgaggtaaaayctattggatcttgtgtgtgtttttgtgtgtacatgattagatgtgtttgtgtctatgtacctttttaatgttatatattatatctgctaaatttgcttatgaataaaagagcactcataaattaattaaataagactatataatttttaagttcatataacttaggtagatctttaataaacaacctggctttaaaattatttgtaaaattaaaacagatacgttttcagaatggtcaacatacatttttgtctgggttttgcatttgtctctactagatattttgaggtgtcagggtttggcacacaaagttataaaactatraacccagcaaaaacaaaatgatccttgttcatgtgatttttttgatgaagaagactaatttagtgttggtttaataaagacagctggatcttctgagttattggtgaaaatatccatatgttaaactttaaggttcttaggtggataccagatattcacaaactatataaaaagtggtcgggttgggcactgtggctcacacctgtaatcccagcactttgggaggctgaggtaggtggatcacaaggtaaagagttcgagaccagcctggccagcatggtgaaaccccgtctctactaaaaatacaaaaattagccaggtgtggtggtgggcacctgtagtcccagctactcgggaggctgaggcaggagaatagcttgaacccaggaggcagaggttgcagtgagcygagatcgcgccactgcactccaggctgggcaacagagtgagactctgtctcaagaacaaaaaaaaaagtggttgacggccggacacggtggctcacgcctgtaatcccagcactttgggaggccaatgtgggcagttcacaagctcaggaaatccagatcatcctggctaacacggtgaaactccatatctactaaaaatacaaaaaattagccaggcgtggtggcacgcacgtctagttccatctactcgggaggctgaggcaggagaatcgcttgaayccaggaggtggagcttgcagtgagccaagattgtgccactgcactccagcctgggcaacagagcaagactccgtctaaaaaaaaaaaaagtggttgacaaggaaataagttgaaatgatgactagctttgtttaatgtctcagttttcagaaggagtctagataacctttttaaaaatgaaaaaactgagtacatataaatgagataaatgcttgtaggtgaactttttgtgtagtttaaaatgttaaagtgattttgggttaagtaacagaagctccttggatgtctggtcatttccaattaagaaaggtttatgatatggggaaacatgtttttaaaaattgtgaaatggctgttatctataaaatgccaatatctgaaaggcagtttaggatttcttgcttcctaggttttcactaagatttaaggttagtaagaataagaattgtagttaatatataattttgcatataaaatgtgccaaagccttactgaaaaaaagagtaattttgtctaattcaaaagttaagtcatgtgtaatttcttcctgtgtctctgtgtgtctgtcttcatggacataagagaaaatggaaagttgaaaagtttagatagtaaaatattacttaaaacctgataaaaattggagaaatttagctaactagcattgttcatagttaaagctcttactgttgatgaaggtaaaataagaaatattgtaaagagatacattggtagttggacaattctctcttaaatttagttaaacatgaagccagatttagcatggagccaaattttacataaatgcttgcattgctttatttcacactgcctttgctattctgcatagatagtactagcactacartactggccatgtgcgtcaagtaaatgtctgaattcagtggtgttgctggactaaartacattaatttgtacatctggaaaaaawtatccatcatttgttattgtaggatctggataacctgtggcttctaaggtaaactgaataggagataaatttagggttggtttaccttttttgttttttttacttttatttactttttttaatttttgtagagacaggatcttgctaggttgcccaggctggtctcaaattcctggcctcaagccatcctcctgcctcagcctcccaagtgctgggattacaggtgtgagccamcacacctgggatgttttcacatttaattttcatttatttgcagatataaagccattgatgtttttgagtttcttatggaaagcttgtattgggttctatttatagttgttttrttccctatgcatttccaaaaattcataatttgctctacttatctacaattcctaaactacctttgtgaagagtccaacaatgacagagcacaccagccacttaaaactgaatcggttttgcctacctctgataacctagagagctataagagctttgaggtttctggccaaaaataaactcatttttataagttctgaacagaaataattatttattttgttatttggaaaagtaggtgagagtaaaaatgtttaaatggtgttcatttccaagataattcaatcgataatttgagttggtttcagatctttccctttaggtaatgaggagaaactgtgacatgggtacaaagttttatgttcagaaagattggccatgtcctggaggaagttacattgactgggatttccctcaaactacttccgttgtgtttaccgttattaaaactaagtgacattcactggttaagcagtaatttttaagaagttacactttctagtgattttggatcccatgcctttgatcactgttgggccttcttgtgtgtgcttgaaaacaaaatatgtacaagacttctaatggtgaaagttacctaatcagctgtcagtactctatctagaaaccaattttgaaagtgtgtgatgatgcccttttaaaatagctgaaaataaattatcatgtgcttgttgttgctttgtttctgttttgtcgttcaatatttaagtgaaaggagattatttatcctcatcctatatctccaaaactgatatttgtgtttattaccatttttaatgatgcagaaraaactgaattgtctcacttggatacgtttggcatagggcctatcacattttttatgcttttggtcataattcagccatgacaatgttagcaattagacagaggcaagaagtaacctaaccactttaacacggtggtttgaagtgctgcagacagtaaccactagacacaaaatcacagtgttttaatttatgacatattggagagaatgatggaactttctgcagtattagtaaatggaagcacacatttctaaatattcttttttttgtctataaacatttcattaagctttggcttctgtttttatcacaatgtatatagtatacttgatcttttgtgttgtagacagaaacttatttttacagcaaaagtcatctatctgtatattatgggtagagtgcccctttactctaattttatttctacattgcttttaaagtcttttggtgatcactttggttaaatgaataactattattttacaatgacctatgattctgttttgatcaactgtcttgagccttttagcatctttgataaatgtcctattaactaatccttgtactgttaagttatagggctttgactcctaggtctgaaaaaggcatcaactcttgctaaatgttgaacactgacactagtcaaagcctcatcctcagagtcaggagaaggtggcaatcaaaatgaactgctttcatgagacacagagccagaaattagaacaattcagtccttctaggcccaggcactgtcgtggaagagctgagcatgtgagrttgtaagggctgattctgaaggatacgtttagttacgtatgttattttttggtggctgtgtgtgtccttacatagacctttaaaagaactcactactcttggccaatgctgaagacacaactcagcttgggagcctggggggctgggcctcccaggtcagggtgwggccccttgaatggcaaaggcaattccttttgagtcacaagaaattctgcaaccctacttttaggcttttagtttttagctcttaagttacttaaagggtgtttgaggggttatgagaagctgcccagctccattgctgtctggcctagaacatttaattggctggaagtctcttgactgtaagtcccttggccataggctttccactgaggaacaggatgaaccatggcaggaagtgtagtataccactccagcaatagtatgggacaaaataaagttctaagaccccccaccaacttagcaaactcacttgtggccaaggggaccccagttgccaagagacaaatcttacctggaaataggtcttgctctttgcactgctgagcatacaatagcccccagaaatgggctggctcttagcccctatcccacaacccttgtcttcagcatgaggcagtcagaaagatcaatgaacagattccccatgatttggaaatcgatacatagaaagggggttgaaactggcccaactgkcccatagaactgatatttatggtttcttttgaataaacacagatattgaccctttcagtcttaaaacttgagaaactcacatgtgccttctctgagttccttgctcaggaaatcagacttcagggctcccagatagcatcagggaactgacactcaccagatcacagcatctggacaatgagatgccaggaccttcacccatcatgattcctgcttacaatttcctattccttacacttccctaatcctgttttcctgaatatgagcacatttctcccctgctatttaaatccctgattttagtcatatgaggagatggatttgagactgaccttccatcttcttagctgcagcacctgattacagccttcttccttgacaatacttgttgtctcagtgtttggcttcctgtgctgcaagcaatgaatcctagactaagcccctggcacttcagtaatagatctatgggctggcatttgacatccacagttctacacacatgatgtcccaacaatctctaaggacgctctcaaattttccctgaggcccaagcccagacaatctgctcatcctcatatctcctcaagcttagtaattttcctgccccgtcatgaggcctgggctagagttctgtktttttccttccttctgcaccctcaccccagccctcagcaagtcctgccatgccacctctcacaggcatcctgagtctcctgtgctccacctcttggccactgcactggcccaggtcactctcctccctttcctggatgactacaatgtcctcctgactgtcccccaccctcccattctcactgactaaaagcttttttccctctgkgtggccatgtcagccttctaataacatataaggtgttatgctatgtcccagtaaatcatttcaaaggcttctcattgcattttgaataaaatasgagttcttcctcgtggtgggaactgacatctgctcatccaccaaacccggtcttcttacctctcctgcctgccggtccctgacactccattcaggagcttccacaggttaagatcatttctgcctcaaggtcagttcaggctgttcttgaccagaaacaccccacccttgggttggtgcagctggctgcttctcctcctgcagagtccagctcccatgccacatcctcagagtgacctttcctggtccctctttctagatagacaggacgaagggaaggatcaagagagagacctagaggaagatgttacacacttttaacaaccagatctckagagaactcactgactattgtgaggacaacaccaagccatgagggatcagaaactatgacccaaacacctcccaccaggttctacctccaacacaggactggaattcagcatgagatttgatgggggtgtatattcaaactatctcataaagtaattgttggaaagactagaaacaagaggtttaattgtttccttttarcaattcctgactggtgcccatatctgggagacacaagacagcatttaactcttcccagatacacataagtgatcctgatcgcctgtgtgctctcctcactgctgaggtgctggacccaaacattacatcagaacagcaaagcaatgtgggaagaagagcccagctctccttcatacaccacgccctaaccagaaagtgacatgctgaaaaatagagaagccaagggcatgagaaggacctaggaagggctactgctttagrtaagaaaacaatatttaaagaagctggaatccacctttagtttcgatgaagtgatgcaggagagaaacaacagaagcaggamtggggactcccatattggctaccctatttttgtttgattatttctcagatatttagaactttctaagccaacctggagagggacggggtaaactcagctcctgactcctgagcttcagtgccttcctcyggacacctcatctcaatccagatattacaggaagccaaattttcctcaaacagccatctataaaaatctgtattttcgacatcagactggtccaggctcacatctctctcctggattctgtgcagggagcggaggtagacacaggaaacaaccacaatgcacggggcctcgcctctcactctgtgaggccccgcccactctgaggctgggcttggccacgtgacctgctttgatgaatgagacaacggctggcaggagtctgcaatggctggggccgggccacacctaggcgctgagctcctgaaataagatcttggaactcgtcttcatgtgaaagcatcctctaaccttcttaaggctaaaagaccacctggaaagagatgcccactgtgcctgctgagcacattcccagcctaccycacctgaatgcagcccgcgagtgaacccagcaagaccagcgcaagagccgaggacagctccagagtcgtgagaatccatacattacgtgactttcagctaggaaaattcagggtggctgctgatgcagcagcaggtaatgcatacaggatgctctgaacagctctcccagcaaagacccacagtccaccccatgtggggtagagagggggaaaatcccctcccccatagactgtggtttctgctggtgtctgcaactgccatggggcggctggagggcagccctttccttctgaatccagcctacatttcatgctctccatctgccttctcaccggcttgcatcctctttctatagcactagaactatcaaacccatcaagctgccccyggagggtgagcctttcaaaaaatcttaaacaggtgcaggaccaggtgcactcaggattgtgagcaaatttctaggtgcagaacagtccagactctcagcccaaagttcaggccaggccagagcccacttgcctgcaggangcacaagggagggtagggacaggtttagatgccaagtactcatcagagtttcaatttaaggacactcggaagccatgggaggctgtgaaccaaggatcacaatctgatttgctgyggtgggtaggacagcacaggagtggaggcacagagtagagtgaagattcctcaaagatcagacagtcacaagacatccatgagcgttctcatagctgtggcaatgtgaagaacaaaaaaaaaaaaagaaagaaaatmcaactcagagaattttacaggactttaattattattgtctggggaaagatgaggawtagagtggaaacatgatatatggacagatacatagatttgatacatagatatatacatagattagatagatgagatcaattgatcaatcaataggtatgtcaggcactgcactatcaactcacaagcatttgatttagttttcctgacactaaatctatttgttcaaaatactcactccctgtaccccactctccatggcaaagtgcacttctgcaccacttcctttgggctgggccgtgtgatttgctttaaccaaaggagtttaaccaaaggtgtgaagtaaccagaagtttgaaacaagtttgtgcaattcagcttgccctcttgcaccctgctcttgccatgygagaatatgaaaaatgtcagctatctccytggagaaggatcacagatgtggagcagagccagctcagacaatcccattccaggtcagtgactcccagctggactgcagatgtgagcaaaataactggtcattgccataggccaatgagatcatgcagttccttattacacagcctattgtaatcattgtcattcctgttttacaaatcaggaaacagaagcaccaagagaatgaatatcttgtcacaaatatatctcttgtcacagccatgggcaaggatggggctactaacacagatggggacactagtcgaagggtaggtctatgggcaaaatgawggtcaatggacatacagaactggtgatgcctgcaggacatccagtgataacatcatgggcagggcaatgaggagcttcactgctggaagcctgagcttggttgagatgactcaagayaattgcaatagggtcaacactctcacaataaaagagagagagctcaactatgaatataaaaagggcaagtgaggatatatagccaaggagcagggagcagggttaatrgattaaaaaaaattactaagcagagacatcaaatgtgggagtttcttgctaaattgacctaacaatattcttgctaaaggcaggacaaagccttagacatcaaagttgagaaatgaggaacttggtcagatgttgagggtgatcagataccaagggtgaggggattctttctgaactgacttagcaggattctttcctaaacctggscactgcagccctcgcaagagcaggaggtaggggctggggactagggttgaggccaagggaagamggtggctcagacgagcttaactaaggtttggtcaaggtgagtcttatctctggatccagcccctctgtgacaggaggaaagggcaggcagggccacaggagcaggcagggctgtcctgatggcctctggctccagctccagcactcagtgattgagttgaacaggattccaaccaggaacaggaaccactctccacagtcactgcactttgctaaaggaattgatatttaaggttacacaaacagtgacagggaaatcccagcagtgacccaaacaggataagaaagtctgaccacccagagatgccaaggggattgctctcccgctcagagccatctgtttcccttgaggccagtcccctgcagtctgcagcccagggagtcaggcgcagcccagcctgccccagctagcaacccgagytcctggaggcctctccctgtcctcttcactaggctgtgtggttcttcagtcactggctctgctctggtgaatgcactccttgagaaagtcagtggtaacttataatccaaaaccacgagcactgttcatatactggtccctgagcagaaatgtcccaaggattctcttttccccatgaagctcaaaacagtcagacctcagacactgggctctgccctctcgtcacattcggcaggggctgtcagcagccttccccatgagtatcacagtttcccaatgatgtggcatcatctcaaaaccaaatgagataccaacattggcccatggtctagaagcatctggtggggagggagaaggagggagggtgtgtgtaagggaaggcttgaccccagagaactccaggcactctataaaggaagcttctgggcttcccctttgagaaaccagcaaatcaagtggctgctctgtccaagctcctaccatagatgctgaatgttaatttctcaaaacccaaatgtgcagaatctcaactcttggccaacttgtcctgaccacttgcacctttagtagatgtttatgtgcttgatgatttattatagcattgtttagtgttcacttattattgcttatttattatagagaacttctgccactcacctaaattctcactaattcagatcatgagatcaatagtaccccacacagcctgggagaacacagctttctttttcatcacctggcagaagggaaacatgccccctcctgtgcagctggacttctccaggttacctgggtgctggaggccccaggctcagtcctgggtccattgtttctctctkggtccctattaccttgtccttgaagctgtaggttacaggaatcaaggcatacacagctrtgtcatgttttattttttttaagatggggtctatgctgcacagtttccctatgttgtccaggctggtctggaactacagggcttgaggggatcccccgtcatagcctccccagtagctgggattacaggtgcaccaccacatcaygctactgagtcattttcaatcatgcttaaatgtcactcctgaagcccgcttatcttgctgcttctgaactgtcagacactactgtttacaaagccgcccacctctccagatgcatgatgcagagaaggcaaaacatttgcctaaggycaccaaatatctggagcagctgtccagctaccctaaccttccacttcccatcacccgcactggacttggctcccgtagctcctgagagtgcccaccaatgctgtytgtcctgttaggattacagcagtcattgatcaggacagctggccctccctgcagcacatgctagtgtcctgacagaggatgaccataggtaatgtcatcacattcaggggtgcaggtcagcactccagcccctcttcccccacattccactcaccactaccctccccctatctgggtgacctgcaccttcttcctagtgatagaagttaggagatttgtgaytatttaatcttaccctctgtacaacacatcttcctgagattggagccccagtggcttcaagaagctgggggccacagagaagaaccaacccccacacttgggagatgaccattgtgcttggaagtacctggycaggggctgacccctctttctcttatctgtggagctcccagtctttcttgtctaactaggaggcatcatgcgctgccctgtttgagggccttccttccctcacccagcagtaaacaccatccctgggcctcctactgtatctgctggggtgcacagcttttctaggggtgctggattcacagtgggtgagagggtcacttggccttgggtaacaagtttcccaatcttaacaatgaatatgagcatccgtaagtaatattgttcccactgccgggttcctgctgatccagccccagccatggctgagacccaggattacagcaggtctgggctgacactggccaaccctcacctccaccactcccaggagagtcctctgggtccctggcaaaggcccagaatttcctggcgtttctggccaaggctgccacttcaccataagggatttgccacagggtcacctttaggcatggagggtggggttgagagaacaaagggagcagctgtctgttcagagcctccttccaccctccccactcctggagtcacattccagcccaggcccgcagccatccgagctggggactttgtcaccccacagagcacccagctgacccatctcctcatctggggagaaggagaactcacaatcctggcaatgaagcaactcagggctcgctggaaagccacgctgagcaaaggacaaagacacacatgggctckctctgcaggactccattcctgggaagctcaaggacaggtgacaaaggagtctacagggctggataggggctgccagggtggggtgggcacgagagtgggcttgagaggcaagaggataccatctggggcaaggcagatgtcacaggtctggacaaagtggtaacacaggtatatgcatttatgaaatcccccaagttgggcacttgcaattgggcattttattgtatgtaaatccgacctcattcactgtaatgtcataaagtcagatgagttttccaagcagtgaagagaggaaaggagcccgaagtgtggctcccacattcatcccgcggctgctgatccctgtactgccaactcttaccacctgccagggggtctccctgcaccttccacttggccccacccccagttactgtgagactccaggtccttcycttccctgctcacgttccctccaggggcttcctcttcctggaacaggcacactcagccccacctcagggcctttgcactggctgttcctgctgcctggagctgtttcctgtctaaacagggcttctcacctttccagtctcatagagacctccctgaccagggtcyggtggcacccatctctctccaccctccattctatttcacttcctgcagaacagatctactcccctcatctgatcactgctccccatctccacacacaccctaacttcggctgtgcagttccacagccaccagccacaggtgaccatgggatgttggaaatggggccagtccaagatgacacttggtctaagtgtaaaaatttcagagacttacacatacccaaaagaatgtaaactctcttattaataattgttgttcctatgtgttgaaataatattttcgatatataaggttaaaaaagagatattctttaaattattttcaccagtttctcttttcttttttcaatgtgtttcctagaaaacagaaaattgctcatgggttcatgtcacaatctgttgggcagcggctctgcaatgtcacgtccatagctcagtcacccaggctccatcccaagctctagaccacatggtgctgggagaagttggtgacaggtttgtttattaaataatgagttatgaaaagagaacccactgactttttcccaaaaggttaattcctttatgtttggcaaagaagttccccagaacagggaatggacaaggtcttccaggagtgtttaaaatagtctccctgcgccagggattcccaactttcaccaagtgctctcagatttccctgacatctgaagaccccaggatgccaagccttttatttttcccttttctaaggaagtagaaggtcaccttgtttcacaacacagacagcagtgtcacctttctggagaccagggtgacccaatcttgggagcactgggaaggaagggcaagactgaagtgagctggggattggagagaggagttaggagaagggggagatggaggagaagggcctggaagaacagggggacttaggcagggagagaggtgaggggagatggaatgggagacaaaggaaaaagaggaggggcagaaagagagggagaatctaggggcagggcatggaaggacgtggggctgggggcccccaggctgtcttgcttttatccatttatcctaatgcacagctgcctgctggtctgggctcccygcctcaggatcatgccccttcactctcctgcacttcccccttctcactctttgtccttgtcccagcagaccacaacctggcccctgcacactccactgcccttgctggctgccctgtttgtggccctagcctaragtcccccagctctggctagaaagatcattcaaagtgacatctgtgatgcagaccttaatgatgatagatggcagcatgccctggacttcgccatcagtgagtacaacaaggagagaatgatgaacactacagtcacccygcaggtgctgccagsccaacagcaggtgggtgatgccaccacccaaggggtcctgagtcccagccagatttgccccctaaccccaagagcattcccagcaaatcagcactgacacattcatgatctaatgctcagactcattcagctttctctgactgtctgttgacagccttcatgccctaggacgctcccgggccatgagtgcatgagctcagccctgtcctgtccacttggcctcctttaacctgcatcagctcctgggtctgtgccatgaccgtggcatttcccagggtccagcaggtgtggatggagactatgctggctctgggtgggcttggtgctgctcaggatgagatccaggccataaggctcatcctcctccctgagtcctctctgcaggggccacaccggagcctagctccttgtcctgcagagccctgcttccctcccaaagtcacacccctgggcacaaccccctagggmgagtggccttcaccctcaggctggctgaccacccccgacagcccagggcagctgagttccttctggggtggagcacgcctgaccctgcttttgccagctgacatagcatcagacctcaaccagatgaggacagcagtcacccagcatagtggaggagggggtcaggtcgggagggagcttcagcagggctactggttccattttgacctgcatcccatggcacagcaacaaacagtgacacagcctttggctctcctccaccttcccttggaaattcagaggagtccagaccagccccgtttctcctyctgcagctgtcagctggggccctctccctgcacaggaggggcactccctgctgccaggatccctgctggcctgtacccctctctcaagtgtgacactcacatgggatgataaggatcactgggccctgaagcatgttttacagtgagcaaactgacaccagagagatctcaggacttgcacgtggtccccggggctccttgtctcacactgcttcacagttctcaccattcatgtctggaggaggccttgtgcagggaaaagggctcaattccactctgcaatcacaaatataagacatgcaggtgtgctgctcactttagaaatattgcttccaacaacacacttagaatggagatcctacagagacaataygttattggcctaaaacatctgtgcatgtgaagcctctcatttcctgctgtatatgaagcataaataaatctaggttaatagagggaatgagatgctctatgggctggatgccaggagctggaagttagcagaaatttcatcatcaggtgacagccttcctaggacaggtcaagtgtccctggcctctgagccacaagtagcagaaatcagttaatcctttgctgtgggaaagagcattcacttgctgcttaaacccgccctgcaaacctggtgccaggactgtttctttgccccaccctggctggctccmcagagctgtgccttctattcctgaatccaatgaagggggttttaggccttggcttccatctgccctgcccttgcttctcctcctactgggctgcatgagacaccttgtttcagttacttagagaaaacaagttatcagggaggcctggcgcccggggccactgccagccagtgtgtatgccttgtgggtgrcagtgtgggcggttcagaaaggcaggcatgaagccccaggcaaacccagtgactcaatcacagtgaaatgcctgtgtgtgcacggaactgacagtgtgcttcccatgcaccctgctctttcgtgcttgtagatgtgggctgggtgagctacttctttgatatgaagatagacctaaccacatgcactaagtctcagccagacttggacaactgtctcttcagtgaccagccacagttgaaggaggtatgtgactgatgtgggtcagggatgtcaggcagtgcagaggggtgtgagtggtgtgtgtgtgtgtgtgtgtgtgtgtgtgtctgctcctgcacatgttttgaagggaatggagcatgagtgcagatgcatgaaagccatgcatgcatgggtgtgcgcatgtgcctgtggagatgcatgtgggtttgtgcacacacgtgcaggtgcctgttgtgaggggcatgcatgtgtgtgtgaatgtggagttatatgtgtacatacatgtatgtgggggtggtatgcatatatgggtgtatgtggaatggagcatgtgtgtgcccacatgtgggaggtacatgagagtgtgtgtgtatgtgggtagatggatgtttgagggagtatgcatgtgggttcatgcatagatctgtgtgggtgagggttggggtgagcttatggagacgcctatgtgtgtgcagatgaggtggtgtggagacgggtgattaatttgatttgctaagagggctttagcttgggaatgggggtactgggagctccaccctgtgtgctttggggtattgcctgctggactggaggagggctgggttctggtcagagagaagaggctctgtctaatcccagcctcatgcacctgcccacagccacagcctctctgagcagattagagggaattaaatgcctgttagcagtgaagccctggacctgccccagctcacccaacaccagcttctctaagaacccaggatttcttgtgaggtctctgttcaggggagagccacactctccttgtcatctcctcactacccttttgagttacagtttccagttccctgggttcttccctctggtccctcttagtgctggcctgagtgctggaggtggaaggagctggggrcagtgagccacctccccctgccctgcacccttggggctcccgaggccatgcacaagctcgggttgtgctggggcaggaatcctgcaggctggggtgggggcccaatgccacctggtgacttggagccttgagaggggtgatggaacagtcactgtgcagtcgggctcagtgctctgggactcagcgggggagggtgagaacccagtgtctcacctggatctgtccttgccccactctgaaatgatatacctgggtgtcttctgatttaactgcaacccacactgattgtccccctctctttcctttcacagaaacagttctgctctttccagatctacgaagttcccttgaaggacagaatgtccctggtgaaatccaggtgtgggaaagcctaggggtctgtgcaaggccagccgcactgaccacctcctactcccaccccctgtagtgctcccacccgtggactggtggccccaaccctgggggaggtctccccatgtgcctgcaccaggagccaaaagagaaggcagcaggaggactttgttgctcagcagggggctctgtccttgctccttttttcttgcttctcacagccccccacttcctgcaattaaacagtagcatcgcctccctctgagttcttggctgtctagggatgtgcacacagaaaggtttccgcagttcctttatgaaacctccttgtcctgctggtgtggagatcagaggagtatctgggagctgacatggccacagcaaggctgtcaggggagctgctgctataggagacctgagcctcagagcagggagagagcagccaggggctcgggacccaggccttcagctgcagcagcccctggtgagggggtcagggagaggagtgggcccaggctgctgcccgcgaagctgggctgctgttttggtctgagctcttggtcagaccaggaggagggggctggctatatccacagccaggggccaggcctcagtggagctcgccaggccgtagattccatctgtgcttgcagagttgagcagactccagggactgagctgctctcatcaaatcccctagacactaaacatatagcaatcgatgtgtgcttctttccataggagattttaggcccctacatggaaacaaagtccaaaagtgtgtgtttgtgtgcgtgtaactgattggaagaaatgccaaccagaccaaggatgggcaagatcacagagaaagcagcgcctgctgtcatccgttctgggagggtgcagcccacgctgggaggcggtgccctatgaaggttttaataattcgcgcccacaggtccattatctggacttgaattgaaaaccagtcctcatgtcaagcttaatgttagggatggaaaagttagaacacaagcaggactgccatgcaatggactctcttctttttccaaggaggttctatttaataaatagaacacatccttttcttgtcagcatcatcctgtagaatagtggatatttgtgtcacaaaaatccactaagatgtagcccgtcctgcacagcccttccttttgccatttcaagacagaggagtgcagccctcacggccagtgcctctggggcagggctctcaaatatcttccatgcctacagctgcagtgagggagggctgctgccatgaacagtgagggtaaaatgccaaagggaaatctgcccaaacagccctgaggccagcaccccatatgctaccctagaaagccaggaggagaatggtctgacagggacagtaggaagcatctgcttccatttgctctccaccgcgatgggatttaacagaatctttgggatgtaggaatgaagcagagcccaggaggccatgagctggggagatgtaagtctgggcctcaacctttcggtggagggtgtgcttagtgattcatgcttttgctgggagacaggtgcagagggcagagcagcaggtggtggttggtggaaaagtcttccatgcagcgaggtgctcataattttccacgtggataagagatcttttttcacgcaagcaaccaccacctaggcacacagtgaacagctgacttcgtgtaaatcattcccttttctgacacaattctttcttccttggggaagtttgggttgaagtcatggctctgcacagggctttccccaccatctccctgtgtgtctgctcccttggaggggagcaggaggcagggaaactgagagtgtggaggtgcttcttctgggccaagagatgggcagtgagctgtgtcccgaagccactggatctttagaggagtgcaaagaactcccctgatcaggtcatgttcaaaatattaacctcttctaagagttcttttaacataaattacacaccaaatcagtggtaaaacactgaaactgcagaggttagaaacatctcaaccagcatagagaaatcactctgcaaggaggaatgagtgcatcggaggcctgggaagtgtgagacagtgcagcctttccctgggcaggtggacgctcggcacaacaagcacagatggatcaagatgctgtgaggcctgaggctcctgtgatataggggctccctgcatggaaaatagagcaatactagcaatacaaaagaaagcacaaaagttaatgtttatttacgaagagaaaacaaattacagcaaaatactcattttttaaaatgctgagatatactacaaacatctacaaaatccagaaaataacacatatcctagtgcaaccagccaccaaaatcagtactgtagtcaacacattcaatattggcttgttgcaataagggaatacagtcacatcaaggatcctcagatgactcgacaaacaaaggaaaagaagttatcataggattggaaggagggattttgaggctggattgatgcactcagagcatggcaggcctccgtgtaaaggagccagggtcaggtatggtctggtctgcaaagtggacctaggtcctgtgtcctcagaacccataaagtccagccagatgtggagattctttctagaaaccccttctctgtagctctgtgcttctggtttaaggtggacctagatcctccaagcagtgggatgttcttcttactcataagcaaagtttctgacagccctgacgctagagaacaaggtcttccattgagtcagaaagcagtcatcagccaaggaagagtctgcttgacttttcaaacctgcagcttgagagaaaagttgtttcctgttcatgatgctactggctttgaccccatcagtccatccatccaccctgcagatgaaagggcagatttgccttgccttaatccacatgatttgtattgcctcatataatttttttaattaattagctacttgacacaaacacataataatttcttcctatatttcctacttagctaaggaatccctgcttgcctcatcatatgacattgatttggtaacagaattttctataaatatagcagaaatataagccactttttccaccaacaggtttgatcacttgtaaaattaatggcatataatgtttccattctaatttaagactcgtaattgtaatatcatgcaaatttttgattattatctaatttggaaaagcctcttttagtttcctttcataggtgagcagtaagattttagtattttctaaatgttcttgacttaaggcttaggatcttaaagactattgacaatgtcactatcacagcattttaaaactgtcactgttgtagtgaactccaaaattgtgtaaatgtatcattatgtgctatgttgattagctcattgaatgtgcaggaggagtttgtcctgaaacaagtatctcttcaagccctctcacctgttggtcgctattttatatctgtgttgcctggagctgccagaggtcatcaggataagaagggcaaggagggagtttcccatctgtcgggtctgtgccacgcacatgcatatgttcttgctgtggacagtttcaaaacaaaggtctgtgctctacaaatgtcaaaaatcaagatttctatcaaagttcccatcaaaagtaaaaacaattacatggtgcactaattatatatatcagattagtgagtacattttcaacaggagaaaacttccatttttgactaggtgtcaaaaagaaagagatcatccattcacaattgcccataattctgctgggaataattttctacacagtggcgtctggctccacacattgcaaaccttgtttcctctgcactgatcacaggctttccatgtgtggtgctgggaattgtcctgaactaggaaccgtctctgtccctgctgctttgggtcaaatcctaggcggatggtggggccagggctggggccacttttacaacagggtctctagagacaacgtaactatgcccaggagtggctgagaaccacaggagtgtgttcccctcaccccaggttaaatgcgtcccaactcagcttcctcttagccagacaccaaaatgcctgtgtccacccacacagcatgcaggaggagagtgggaaagagaaagtcagagtaaacaaaggcaatgctcttgaataactgcagtttaaatacttgactttttaaaattgtagaaaacatccagccaagaacacctgttgctcggccccgctcagacccttttctggggttgtgaggagccctgcacttaaataccattagcttcctggaaacccccctctgacaataacatgggcagactccggtattcttgcatagtgcatgggccaaggggatgtgcggaaggaggcaaatccactaatcacaaaagtagaaggagaccaggagaagagatgagggaaagagaaactcatgtagaagaaacctgtagaggcattgggacctgctgagacggcttttggctgcatgtaaacaaagttcccaatgaaaaatgtcttgaatgcaaagggaatgctctaccttcatgataagaagtccctgggtgaggcaggcttcaggaacagaactcccagcatgtagctctgcttccctgggattctctcagccttgcctttctgttcttgaagcttctgccctgagctggtagcaaggcggttgcaacagctccagacatcacatcatcaacaccaacatccagaggcagaaagagccttgggaggagcctctgttccacacctccttcctgattatggggaggctcttcctacccactccccagctcaccacccctgctgtctcattggtcagggccggttcacatgctcgccccctacaccaattcctgttaggaattcacatcattcatggtgtcaccaacactcagtgaaacctgtggatcaggcagcatcctggtaatagcacaaacttcaacatgattaaaactatgtcaccactgtagactggtagagtaaattagggtgcacatgtgttggaatgggcattaagaagaattagataaggatatatgtgttaaaatggcaataatttttaatacaccttgaatagatttttattgaagaaaggtatatatggcatgttaatacaaagttctttgtgaaaacaaaactaatcatacatgtgtatgagtgtatatatagacatgtatacccacatatacatatatgtatatgcacatacacgtcagagagagagagaaagagacagaggaaaaagaggcaagctatcatctgcatttttccaggaagaaatacaagcataagaaattattaactgtggatatctttgaagagagcttgtagcatgaataggaaaataggtggtttggattttattttttaaattttgcatctttgtggctttgtggtccatttgaatattattacaatctgtgtgtgttccaattatttttagatgtcagccatgggtgtttggctgataagattataggttatttttcattgcatcctccttatgtctgtatttttaaaactaacaaatgctatggctgaatgtcctattggcatggttgatgtgcctgcataggcacattaactatgagttaacggtaagttgattttcagtgtaaggtgtttccacatgctccctgaactatgacagccatgcagtattcagtatatttttccttgtttctctaggcactgaatgtctccggatatacccttgctcagctatagtgtgagctcctggaggaagagaaagtgtcctatgttctacacccattgaatgtgaggaggacgtaggctgctgctcagtccagttgaaaggaacgaacgtgggaatctcaagatattggtctgcatttaatttcagtgcaagctcacggctttgcattcacatcccagcaccgatacttaaacattgaaatggtgtgcagccactgatcccattaggaatctgatgaaaaatttagaaatggtgtgtgtttgtgtgtgtgtgtgtttgtgtatgcactctcctgcacaagcacatttgtaaccttcagaattcaatggagtttctacaggatctctatggatctatggtaagaaaccttgttctggaaacctgaccagccattctcaattcccttcctcctgcctgctctcaagtgcaaagactgaaagtatcagcccatgaatttcttagccttcctcagccctggaggcacaggacccagatccagacaaaaacatttaagacttcaaccaggtcactgctaagagagtctatactgaataaacagagagaccctggggacagcctgtctcccactgtgtgtatctctctcactctcactctctccccaccctcctctcaccccctgtgacctcctcctgcttctactcctcacctttcagggtgtagtttgggacaggatgccttgggctatggagtccacctttcacttatgagccatgtgctcaagaacaagagccaaaggaacaatggagaagatggaaggaaaccacctgggcccctgctgaggacactgcagcaactctgtgaacaccatcccacgacctttggtaaatgactgccgtcatcatgggagaggcagccagtgtttctcaggactcctgctatctgcagccaggacgctcccaggaacaacggagctcacacaccactaagtgtccatcccagagcccgcgtttcaaataaggcttattgtgcgacaggaacaaaatttaactgaaaattgtatgacttggcaccttgtcctcaacctccctcctacttatttcttcaaaaatgcaaggagttatgttacctgctcagccttcctcatcagatgtataaagaaaattaggagagtgaaattatttcacaagaaattaggtgagtaaaaatatttcacaaagttcaatacagatagaagctttagttttcatttcactaagattggaggaaggattaaaaatgttccagttgaataagagatttttgaaaaaaggtgaatttccagtgaggctggaaagaaaattggaaatccaattttttttttttttttttttttgagcaggtctcaggtctgagaacatttggaacatcctacctctcaaatcctgagaaggggagatatccagtcttccagacaggaattgtctcatcctcaaaacgttcacagacctaacacccactgtagttaaaaaggcaggatattctgtgctgtgggtcttgactccacaagctcttggttagggttcctggaaacagactcagatggagattcataggcaagaggctcactgaggcatgtgctgggaggcagggatgtgggtcggggcagagggagaagtcaggcaggggtgcagctcagcagaggccacagccaggcccatggagagctctgtaatggggatggcctcagagtggtaacatatcggggcaaaaaaatcaggcctttgtatccccatagaagccatttatttgaaataggaaattcctggctaattttttttgtatttttagtagagatggggtttcaccatgttagccaggatggtctcgatctcctgatcttgtgatctgcccacctcggcctcctaaagtgctgggattacaggcatgagccactgtgcctggcccctattttttctcctgttctaagttaatattataacatattaggttggtgcaacacattaaataataaaaactttttgggagtggcaagatggccaactagaagcagctagtgtgcatggctctcatgggcagaaacagaaggggtgaataaatataacatcttcaactgaaacatccaagtactcactgggattaatcaaggaaacaacttgacccacagaaaactaaaaaaagcaagacaagagaacagcccacctggaagcaatacagaaccaggggatccccacccacccagggaaggggtgagtgcatgattgacatcaggaaaccatgcttcctccatatgtcttagcaaccctcatgtcaggtgatctccttgtaaacccactccaccaggaccttcagtcttcagtctgccagagaaagctgtgtggagtttcagcagagcagccactcaggcatgtgtggagaccctggagtcttagatacttgggctttccagcaaaaatagctgcagctccagcaaagtgggatagactactctgtgtaaccgtaaaaatggtttgaatccagggggctgagcagcaaaagcccatggtccccacttccatggcacctcacaagacaagacccactgtcttgaaagtccaaccagctactagtagcagcattgcacctccctaagaaggagctcccgggagaaggggcaggctgccagctttgctatttggccaccttagctgttccagccttcagactttggaaagtctgagccgacctggaaagaagggatccctcagcacagcccagctgctctattaaaatgtggccagtctgctgctttaagcaggtgcctgatcctgtttctcttcactgggcaggacttcccaactagagcctccacccggttccacctgagatctccagccaatacagatccgaattccccctgggatggtgctcccagagggaggagtgtgctgccatctttgctgtttgggtgacttagccattccagcctttgggctttgaagtgtctcaggtggcccaggggctgaagtggaccccagaatagcacagctattctgccaaaacatggtcagactgcttttttaagtgggtcccaatcccatttcttcttactgggtaggacctcccaactggggtctccagccactttctacaggtgcctttgggctggcaataggtccatacttccctgagacaaaactcccagagggagggaaatgctgccatctttgctgttttgtagccttcgctggtgacatctccaggttctggaaaatccaggtgactagggactggagtgggcccaagcataccacagcagccctacagaaaagtggccagattgttatgtgggtgtccattcccatatctcctcaccaggcaggtcctccaggcctgggcctccagccatgccccaccagagctattaagccagcagcaactcagcaattccatgtacagagcctccaggggcaactgaaagtctctctgccgctgcccttgccacctttgcactaatgaataagcaaataccctaagtgccttaacctccaacaagcttcagtagacccaaggagaggaggtcagtctgtcttccagggatcccacacactcctcatagttcgtcattggacagggaaccttggcttgggcccacagcacaacccttcatcttagactgattgcatggagcaattggtgacctgcatctctctgggatggagcccccaggagtcaagcaaaatgactcttggccacaaccactacgaagatcccttccactgctgcctctaaactggggaaaaaacataacactgggatcaccacagagctgcagtgggcagcctggggtgccaagtcatgaactatagccagcactcaagggcgagagaaactcacactttcagagcactgagagggaacacagctgcaactgtgagaaaacacagggagctacacaacagagcaagaggctaccaactgacccataagcctaagtgtcacctactggatcacaccccaaagcttcaacatcaaaaatacctcactaatatacccacatctgaaaccagagacaagaagtcaactttaaataaagaccctacacaaagactcaatctggtgaaaacattgatttaaacaaagtctattgactgtactcaatctacactgcagttaaagggacacccacacatgaagatgagaaagaaccaatccaagaactccagtaactcaaatggccagagtgtcatatattctctaaacaattacaccagtttgccaacaagagttcttaaccaggccaaactggctgaaatgacacaaatagaactcagaatatggatagaaacaaagatcattgagattcagtagcattgcaaaacccaatccaaggaaaataagaattaaaataaagtgatacaggagctgaaggacaaaatggccagtataaaagatggagcttaataacacaataacacaacgattttcacaatgcaatcacaagtactaacagcagaataaaccaaactgaggaaagagtctcagaatttgaagactggttctctgacataagacaatcagacaaaaataaagaaaaaagaataaaaaggaataaacaaatcctcctagaagtatgggattctgtaaagaggtcaaatctatgaatcattagcatccctgaaagggagggggagaaagcaaacaacttggaaaatatgtttcaggatatcatctatgaaaaattccccaactttgctatagaggccaacagtcaaattcaggaaatacagaaaactccttcaagattctacgtaagaatatcgcccccaagacatataatcatcatattttccaaggttgaaatgaaagacagaaagttaaaggaagctggagaggaaggacaggtcacctacaaagggatccgcatcaggccaacagtgaatctctcagctgaaatcctacaagccagaagagattggggacttatatgcagcattcttaaagaaaaaaatcttcaaccaaaaacttttaaatccagctaaactaaacttcctaagtgaacaagaaataagatccttttcagataaacaaatgttgagggactttgttacaaccagacctgccttacaagagatcatgaaaagagctaaatatagaaataccactaccagctagtacaaaaacacacttacacacacagactagtgtcactgtaaatcaactacacaagcaagccaacatcataaccagctaacagcacaatgccagggtcaaatccacacacatcaatgctaacctttaatgtaaatggtttaaatgtcccacttaaaaggcacaaaaaaaggcaagacccaatgatatgctgtcttcaagagacccatccaaacgtggactcacaggcacaaaataaaggatggagaaaaacctaccaagcaaatgaaaaccagaaaacagaaaaacagaaaaattaggattgcaaccctaatttcagagaaaacagattttaaaccaacaaagattaaaaaaaaaaggaagggtattacataatggtaaagggttcaattcaacaagaagacctaactatcctaaatatatatgcacccaacacaggagcacccagattcataaaacaagttcttacagacctgcaaaaagacatagactcccaaacaataacagtgggagacttcaacactccattgacagtgttagacagatcattgaggcagaaaattaatgaagatattcaggacctaaactcagaatgcgacaaaatggatctgatagacctttacagaagtatccacccaaaacaacagaatatacattcttctcattgccacatggcacatattctaaaatcaccacataattggacataaaactatcctcaaaaaatgtaaaagaactgaaataataccaaacacactcttggaaaatggcacaataaaaatagaagtcagcacaaggaaaatcactaaaaaccatacaattacatagaaattaaacaacatgctcctgaatgacttttgggtaaataaaatgaaatcaaggcagaaatcaagttctttgaaaataataagaataataatacaacataccagaatttctgggacatagctaaggcatctaagagaaattcataacactaaatgcccctatcaagaagttagaaacatctcaaattaataacctaacttcacaaactgaaagaattagagaagcaaggacaaatcaaccctgaagctagcagaagacaggaaataacaaaaatcagagctgaactgaagggaatcaagacatgaaaaaccattcaaaagatcaacaaatccaggagttagttttttgaaaaaattaataaaatagaaaggtcatttgctagactaattgagaagaaaagagataagatccaaatgaacacaattagaaatgatgaagggaacgttacttctgaccccatagtagtaaaaacaaccatcagaaactattacaaacacctcttcacacacaaatttaaacatttagaagagatagataaattcctggacacgtacactcccccaagactgagccaggaagaaattgattccctgaacagaccaataatgtgctccaaaactgaatcagtaataaatagcccaccaacaaaaaaatcccaggacatgatagattcacagccaaattctaccagatgtacaaagaagagctggttccatacctacagaactgattccaaaaagtttaggaggagggacttctccccaattcattctatgaggccagcatcatcttgatactgaaacctgggggagatacaacaacaacaaaaacttcaggccaatatccttgatgaaaattgatgcaaagctcctcaacaaaatatttgcctgctgaatccaataaataacacatcaaaaagctaatccaccatgatcacataggcttcatctctgggatgcaaagttggttcaacacatgaagaccaataaatgtgacacttcgtatcacagaactaaagacaaaaaccacatgattatctcggcagatgcagaaaaggcttttgataaatttcaacatctcttcatgttaaaaactctcaataaacttgatactgactggacatatctcaaaataataagatccctctatgacaaacccacaactagcattatactgaatgggcaaaagctggaagcattcaccctgaaaacttgtacaatacaagaatgccctctctcaccacttctattcaatatagtattggaagtcctagtcagagaaatcaggcaagagaaagaaataaagagcatccaaataggaaaaggggaagtcaaactctctctgtttgcagatgacatattctatatctggaaaaccccattgtttcagcccaaaagctcctttagctgataaaccatatcagcaaagttacagaatacaaaatcaatgtacaaaaatcactagcattcctatataccaacaacaatcaaactgagagccaaatcagaaaggcagttccattcacaattcatacacacacacacacacacacacccctaaaaatacagctaactggggaggttagggacaattctctacaatgcaaattacaaaacactgctcaaagaaatcagagaagacacaaacaaatggaaaaaatgtcatatgctcatggataggaagaatcaatattattcaaatggctatagtgctctaggcaatttacagattcaatgctatttctatcaaactatcaatgaaattattcacagaacacgaaaaaattattttaaaatttatatggaaccaaaaaagagcctgaatagccaaggtaaatctaagcaaaagaacgaagctaagagaatcacattacctgacttcaaactatactacaaggctacagtgaacaaaacagcatggtactggtgcaaaaacaggtacatagaccaatggagtagaatagacagcccagaaaaaggcgacacgtccaggaccatctgatctttgacaaagctgacaaaaacaagcaatggggaaaagactccttattcaacaaatggtgctgaaaaactggctagccatatctgaagatttaagctggaccccttctttacaccatatacaaaaattaactaagatggactaaagactcaaatgtaaaacctaaaactataaaaacctggaagacagcccaggcaatatgatcctggacttggaatgggaaaagatttcacaacaaaaacaccaaaagcaactgcaacaaaagcaaaaattgacaaatgggatctaattaaagttaagagctagagcttctgtacagcaaaagaaactatcaacagagtaaacagacaacccacagaatgggagaaaatatttgcaaactatgcatctgacaaaggtcttatatctagcatttataaggaacttaaacaaatttacaagagaaaaacaactccattaaaaagtgggcaaaggacataaatggacacttctcaaaagaagacatacatgcagccaacaagcatgtgagaaaaaggtcaatatcactgatcactggagaaatgcaaatcaaaaccacaatcagataccatctcacaccaatcagaatggctattattaaaaagtcaaaaaataacagatgctggtgatgttgcagagaaaagggaacacttatacactgttggtgagagtgtaaattagttcagccattgtggaaagcagtatggcaatttctcaaagagcacatcttagaatgctaaatagatgagtgacaaaatgaatagagggaaagctgttaggcttggagataaccaaaagaaaaaaagaagtgatatgtcttccttccattgctcttgacagagccagtgcttgctgccttggcccctgtgttgctgccatcagcctgaggctcagagtgaccacaacatggttcagagcccccaacacacatgcatcaatctgtgagaatagcagtcacaataatggagttttatgttgctgtcataagccactgatatttcaggtttttgtgttatgactgcacaactcagcccatcctggttaatgcaacagtctctacataaagaaaattggggctcagaaagattaagaaatattccgaggattgtacactgggccctttccaattttgcttgcctaataaggatatatgctctgcttttgacaaacaagatatagacaaatggagggcaaaaagttttcctttcttaaaaatttttatttcaggtttagggttacatgtgaaggtttgttacatacataaacatgtgtcatgggggtttattgtgcatattcttacatcacccacataataatcttggtacccaatggttatttttctgctcctcttcctcctcccaccctcccctttcaagtagaccctagtatctgttgtttccttatttgtgttcataagttctcatcatttagctcccacctataagtgagaacatgtggtatttggttttctgttcctgtgttagtttgctaaggatgatagcctccagctccattcatgttcccacaaaagagaggatttaattcttttttatggctgtataatattccattgtgtatcagcatcacatttcctttattcagtctgtcattgatgggaatttaggttcattccatgtatttgctattattagacctctatgaaaaaggcaataaaagatagagttctattaatgacttggaatcttgaataaccttttctgccttctattcaactttcttttatttagacatcattacatctgccttctaagtaaataccaaaattttatgaggcattatacagaaattacttggtgtggcttgtatttctgttcatatttttgaaagtacctccagaaataatgcttttatactttgcctgcttttgctcctttgttataaagtaagctgatgtgaattccttttccctctaaacttattttcaagttgtataaagtttacaaatttaactctttaagttatttgtgaatgtattcattcatttacatattactgatgtcttgtgtaaggcaaagaaggagaaaatagattaaaaaattcaaaatgcaagagaaggagtttccacaagatggctgaataggaagagctctgatctacagctcccagagtgagcgacacagaagacgggtgatttctgcatttccatctgaggtaccgggttcatctcactacggagtgccagacagtgggcacaggacagtgggtgcagcgctctgttcgcgagccgaagcagggcgaggcattgcctcacttgggaagtgcaaggggtcagggagttccctttcctactcaaggaaaggggtgacagacagcacctggaaaattgggtcactcctacccgaatactgtgcttttccgactggcttaggaaatggagcaccaggagattacatcctgcacctggctcagagggtcctacgcccacggagtctcgctgattgctagcacagcagtctgagatcaaactgcaaggcggcagtgaggctgggggaggggtgcccgccattgcccaggctcccttaggtaaacaaagcagccaggaagctcgaattgggtggagcccaccacagctcaaggaggcctgcctgcctctgtaggctccacctctgggggcagggcacagacaaacaaaaagacagcagtaacctctgcagacttaaatgtccgtgtctgacagctttgaagagagcagtggttctcccagcacgcagctggagatctgagaacgggcagactgcctcctcaagtgggtccctgacccctgacccccgagcagcctaactgggaggcaccccccagtaggggcagactgacacctcacgtggccgggtactcctctgagacaaaacttccagaggaacgatcagacagcagcattcacagttcacaaaaatccgcggttctgcagacaccactgctgatacccaggcaaacagggtctggagtggacttctagcaaactccaacagacctgcagctgagggtcctgtctgttagaaggaaaactaacaaacagaaaggacatccacaccaaaaacccatctgtacatcaccagcatcaaagaccaaaagtagataaaaccacaaagatggggaaaaaacagagcagaaaaactggaaactcaaaaaagcagagcacctctcctcctctgaaggaacacagttcctcaccagcaatggaacaaagctggatggagaatgactttgatgagttgagagaagaaagcttcagatgatcaaactactccaagctacaggaggaaattcaaaccaaaggcaaagaagttgaaaactttgaaaaaaatttagactaatgtataactagaataaccaatacagagaagtgctcaaaggagctgatggagctgaaagccaaggctcgagaactacgtgaagaatgcagaagcctcaggagccaatgcgatcaactggaagaaagggtatcagtgatggaagatcaaatgaatgaaatgaagtgagaaggtaagtttagagaaaaagaataaaaagaaacgaacaaagcctccaagaaatatgggactatgtgaaaagaccaaatctgtgtctgattggtgtacctgaaagtgactgggagaatggaaccaagttggaaaacactctgcaggatactatccagaacttccccaatcaagcaaggcaggccaacattcagattcaggaaatacagagaatgccacaaagatactgctcgagaagagcaactccaagacacataattgtcagattcaccaaagttgaaatgaaggcaaaaatgttaagggcagccagagagaaaggtcaggttacccacaaagggaagcccatcagactaacagctgatctctcggcagaaactacaagacagaagagagtggggaccaatattcaacattcttaaagaaaagaattttcaacccagaatttcatatccagccaaactaagcttcataagtgaaggagaaataaaatactttacagacaagcaaatgctgggagattttgtcaccaccaggcctgccctaaaagagctcctgaaggaagcactaaacatggaaaggaaaaactggtaccagccactgcaaaatcatgcagaaatgtaaagaccatcgagactaggaagaaactgcatcaactaacgagcaaaataaccagctaacatcataatgacaggatcaaattcacacataacgatattaactttaaatgtaaatggactaaatgctccaattaaaagacacagactggcaaattcaataaagagtcaagacccatcagtgtgctatattcaggaaacccatccacatacagagacatgcataggctcaaaataaaaggatggaggaagatctaccaagcaaatggaaaacaaaaaacggcaggggttgcaatgctagtctctgataaaacagactttaaaccaacaaagatcaaaagagacaaagaaggccattacataatggtaaagggatcaattcaacaagaagagctaactatcctaaatatatatgcacccaatacaggagcacccagattcataaagcaagtcctgagtgacctacaaagagacttagactcccacacaataataatgggagactttaacaccccactgtcaacattagacagatcaatgagacagaaagttaacaaggatacccaggaattgaactcagttctacaccaagtggacctaatagacatctacagaactcttcaccccaaatcaacagaatatacatttttttcagcaccacacagcacctattccaaaattgaccacatccttggaagtaaagctctcctcagcaaatgtaaaagaacagaaattataacaaactgtctctcagaccacagtgcaatcaaactagaactcaggattaagaaactcactcaaaactgctcaactacatggaaactgaacaacctgctcctgaatgactactgggtacacaacgaaatgaaggcagaaataaagatgttctttgaaaccaacgagaacaaagacacaacataccagaatctctgggacacattcaaagcagtgtgtagagggaaatttatagcactaaatgcccacaagagaaagcaggaaagatccaaaattgacaccctaacatcacaattaaaagaactagagaagcaagagcaaacacattcaaaagctagcagaaggcaagaagtgactaaaatcagagcagaactgaaggaaatagagacacaaaaaaaccttcaaaaaatttatgagtccaggagctggttttttgaaaggatcaacaaaattgatagaccgctagcaagactaacaaagaaaaaaagagagaagaatgaaatagaccaataaaaaatgataaaggggatatcaccaccgatcccacagaaatacaaactaccatcagagaatactacaaacacctctacgcaaataaactagaaaatctagaagaaatggataaattcctcgacacatacactctcccaagactaaaccaggaagaagttgaatttctgaatagaccaataacaggatctgaaattgtggcaataatcaatagcttaccaaccaaaaagagtccaggaccagatggattcacagccgaattctaccagaggtacaaggaggaactggtaccattccttctgaaactattccaatcaatagaaaaagaaggaatactccctaactcattttatgaggccagcatcatcatgataccaaagctgggcagagacacaaccaaaaaagagaattttataccaatatccttgatgaacattgatgcaaaaatcctcaataaaatactggcaaaccaaatccagcagcacatcaaaaagcttatccaccatgatcaagtgggcttcatccctgggatgcaaggctggttcaatatatgcaaatcaataagtgtaatccagcatataaacagaaccaaggacaaaaaccacatgattatctcaatagatgcagaaaaggcctttgacaaaattcaacaacacttcatgctaaaaactctcaataaattaggtattgatgggatgtgtctcaaaataataagagctatctatgacaaacccacagccaatatcatactgaatgggcaaaaactggaagcattccctttgaaaactggcataagacagggatgccctctctcaccactcctattcaacatattgttggaagttctggccagggcaattaggcaggagaaggaaataaagggtattcaattaggaaaagaggaagtcaaattgtccctgtttgcagatgacatgattgtatatctagaaaaccccattgtctcagcccaaaatctccttaagctgataagcaacttcagcaaagtctcgggatacaaaatcaatgtacaaaaaatcacaagcattcttatacaccaataacagacaaacagagagccaaatcatgagtgaactcccattcacaattgcttcaaagagaacaatatacttaggaatccaacttacaagggacatgaaggacctcttcaaggagaactacaaaccactgcttaatgaaataaaagaggatacaaacaaatggaagaacattccatgctcatgggtaggaagaatcaatatcgtgaaagtggccatactgcccaaagtaatttatagattcaatgccatccccatcaagctaccaatgactttcttcacagaattggagaaaactactttaaagttcatatggaaccaaaaaagagcccgcatcaccaagtcaatcctaagccaaaagaacaaagctggaggcatcacgctagctgacttcaaagtatactacgaggctacagtaaccaaaacagcatggtactggtaccaaaacagagatatagatcaatggaacagaacagagccctcagaaataacgctgcttatctacaactatctgatctttgacaaacctgagaaaaacaagcaatggggaaaggattccctatttaataaatggtgctgggaaaactggctagccatatgtggaaagctgaaactggatcccttccttacaccttatacaaaaatcaatttgggatggattaaagacttaaacgttagacctaaaaccataaaaaccctagaagaaaacctaggcattaccattcaggacataggcatgggcaaggacttcatgtccaaaacaccaaaagcaatggcaacaaaagccataattgacaaatgggatctaatgaaactaaagagcttctgcacagcaaaagaaactaccttcagagtgaacaggcaacctacaaaatgggagaaaatttttgcaacctactcatctgacaaagggctaatatccagaatctacaaagaactcaaacaaatttacaagaaaaaaacaaacaaccccatcagaaagtgggcgaaggatatgaacagacagttctcaacagaagacatttatgcagccaaaagacacatgaaaaaatgctcatcatcactggccatcagagaaatgcaaatcaaaaccacaatgagatgccatctcacaccagttagaatggcaatcattaaaaagtcaggaaacaacaggtgctggagaggatgtggagaaataggaacacttttacactgttggtgggactgtaaactagttcaaccattgtggaagtcagtgtggtgattcctcagggatctagaactagaaataccatttgactcagccatcccattaccgggtatatacccaaaggaatataaatcatgctgctataaagacacatgcacacgtatgtttattgcagcactattcacaatagcaaagacttggaaccaacccaaatgtccaacaatgatagactggattaagaaaatgtggtgcatatacaccatttaataccatgcagccgtaaaaaatgatgagttcatgtcctttgtagggacatgaatgaaattggaaatcatcattctcagtaaactatcgcaaggacaataaaccaaacaccgcatgttctcactcatagatgggaattgaacaatgagaacacatggacacaggaaggggaacatcacactctggggactgttgtggggtgggaggagtggggaaggatagcattaggagatatacctaatgctaaatgacgagttaatgggtgcagcacaccagcatggcacatgtatacatatgtaactaacctgcacattgtgcacatgtaccctaaaacttaaagtataataataataaaacacacacacacacacacacacacacacacacacacacaaaagaaagaaacaaaatacaagagaacccttggtcacttgtctatagtagaaattttctgcccaactgcttttctgaggaaagtattttgaaattttttaattttaaaattatttaatttcaataggtttttggcgaacaggtggtgtttggttacatcaacaagttgtttaatggtgatttctgagatttgagtgcacccatcacccaagcggtgtacactgttcccaatgtgtagtcttttatccctcgtccccctcccacccttttccccaagttcccaaagttcattgtatcatttttatgcctttccatcctcatagcttagctcccgcttacaagtgagaacatatgtttggtttttcattcctgagttacttcacttagaataatggtctccaattccatccagcttgctgtgaatgtcatgattttgttccattttatggctgagtagttttacatggtatgtatctgtgtatatatcacattttctgtatctgcttgttgattggtgggcatttgagctggtttcatatatttgcaattgtgaattgcgctgctgtaaacatgcatgtgcaagcatctttttcatataatgacttctttttctctgggtagatacccaggagtggaaaatggtagatctacttttaattctttaaggaatctccacattgttttccatggtgattgtactagtttacattcccaccaacagtgtaaaagtgttcccttttcaccacatccatgccaacatttattattttttattttttttattatggccattcttgctggagtgagatgatattttattgtggttttgatttgcatttcctggataattagtgatgttgatcatttcttcatgtttcttgaccatttttatatcttttgagaattgtctattcatgtgcatagcccacttttaatgggattgtttgttttgttcttgctgatttttttgagttctttgcagattctggatattagtcctttgttgtgtgtatagattgtgaagattttctcccactctgtgagttgtgtgtttactctcatgattatttcttttgctgtgcagaagctttttagtttaatcccatctatttatctttgtttttgttgcatttccttttgaggtcttggtcatgaagtctttgcctaagccaatgtccagaagggtttttccaatattatcttctagaatttttatggtttcatgtcttagatttaagtctttaatccatcttgagtagatttttgtatagggtgagagatgaggctccagtttcattcttctacatgtgacttgccagttatcttagcaccataggtttaatagggtgtcctttccccactttatgtttgtgtttgctttgtctaagatcagttgactataattctttggctttatgtctggattcttcaatctgttccattggtctatatgcctacttttatatcagtaccatgctgtttttgtgactgtgaccttatagtatagtttgaagtcaggaaatgtaatgcctccagatttgttccttttgcttagtcttactttgatatgcaggctattttttgattccacatgaattttaggatttttgttctagttttgtgaagaataatagtggtattttgatgggaattgcatggaatttgtagattgcttttggcagtatggtcattttcacaatattgattctacccacccatgagcatgggatgtgtttacatttgtttgtgtcatgtatgatttcttttggcagcattttgtagttttccttgtagaggtctttcacctccttggctaagtagatccataagttttttgttgttgctattgtttgtttggttgtttttgttttcattttggagctattgtaaaaggggttgagctcttgattcgattctcagcttggccactattggtatatagcagagctactgatttgtgtacattaattttgaatcctgaaactttgccaaatttacttaccagttctagcagatttttggatgagtcctcagcgttttctagctatacgatcatgtcatcagcaaatagtgacagtttgacttccttattaccaatttggatgcccttgatttctttctcttgtctggttgctttggctagggcttccagtacgctgtggaatagaaatggtgaaagtaggcatccttatcttgctccagttctcaggaactgtttttaactttcctccattgagtataatgttagctgtgggtttgtcatagatggctttttattatcttaaagtatgtcccttctatgccaattttgctgagggttttaatcataaagggatgctgggttttgtcagatgtattttctgaatctattggaatggtcatgtgatttttgtttttaattttgtttatatggtgtatcacatttattgacttgtggatgttaagccatctctgcatccctaatatgaaacccattcgaaaaccatggtggattatctttttgatatgctgttggattctgttacctagtattttgtttaggatttttgcatccatgttcatcagggatattggtctgtagcttttttgttatgtcctttccttgtgttggtattagggtgatactgccttcatagaattaattagggaggagtccctctttttctatcatgcaaatagtgtcaataggattgctaccaattctttgaatgtcggatagaattcagctgtgaatccatcttgtcctgcactttttgttgctgttaactttttaattaccatttcaatttcactgttgtttttggtctgttcagagtttctatttcttcctggtttaatacaagagggctgtatatttccagaaatttagctatctcctctaggttttctagtttatgtgcataaacatgttcatagtggctttgaatgatcttttgtatttctgtggtatcgattgtaatatctcccgttttgtttttaattgagcttatttggatcttctctattctcttcttggtttattttactagtggtctatcaatttgatttatcttttcaaagaaccatcttcttttgtttcaattatcttttgtaatttttgtttcaatttcatttagttctgctctgattttggttatttctttccttctgctgggattgggtttggtttgttttttgtttctacaaccaaggaccctcacagagttcacttcactcccctgctacctctaccagagtaggtgttggtatccatggctgagagacctgaagacaagtcagatcacaggactctttgcgaacactcccgagtaccacccacgggcctgatagctttgctgggtggctagatccagaagagaaataacaatcactgcagttcagctctcaggaagccccatccctaggggaacagagaaagcactacatcaagggagcacccctgtgggacaaaagaatctcaagagcagccattgagtcccagatcttctgtctgacacagcttagccaaatgagaaggaaacagaaaaacaattctggtaatataacaaaataaggttatttaacacccctaaaagattacaccagctcaccagccatgcatccaaaccaacaagagatctctgaattgccagaaaaggaattcagaaggtcaattattaaaccaaccaagggggcaccagagaaaggtgaagtccaacttaaagaaataaaaaaaaaaaagatgcagcatatgaatagaaaaatctccagtgaaaataaataaataaataaaatacaatcacaacttttggaaatcaaggacacacttagagaaatgcaaaatccactgcaaagtctcagcaatagaatcaaacgagtagaagaaataacttctgagcttgaagacaaagttttcaaattaactcagtccaacaatgacgaagaaaaaataatgtaaaaataaacaaagcccccagcaaatttgggattatgatagatgaccaaacttaagaataattggtgttcctgaagaagaagagaaacctaaaagtttgaaaacattttatccatctttgggcagtcaagtattcctggacagtgtacctgggtgatcactcacacttctcatccactcacttatcaagttcaccaaagtaccaagaggatcattttgccctgaacccgcttggaactgctcgggtgccagtacacggcttctggttgcatttcttacccaattccttgttcagtggaagagaatgagctttgtagcacctgtgatacgttttcacttctaccttattttactttccgggctctaggctgatgattacattttccgtctctctcatttcctttttgtgcattttatatttggggatgatttttcaaattacacaaagcaattttctttttgttcctggcaacttctatgaaatatttttcttttaattattcaagagaatttctccataaattaatgtttctaaataaagacataaaagtttttcagacttttcataaaatggtcttaatttcatcactcccactgtctttgttgagtatacattttatgctagaaacaaaatctggtgctggagaaatgaaagcgaaagagccaagccctccatcctcagtgaatgttcggtgtagaattttgggtggtagacaggcaagtggaaatcagatgagagaatatggcattggagaatacagagaaggacaccaaacccacagagagggctgggggagaaggacaagctgcccacatcccttgattggttctcactgcctcagaacttaccagcccacattccaattcccagcatccccacaaatttacctgtgcaaacatttgagaaagaattatgtgagcctggacagttctgtgtctggagaacatcagagtccagttaccctagaggccgggctatgtcatgggcaaaagcaagagtgcagccacagacagcaagatgccaatgcttcatgtggcaggggatatgggtttctaaacattttagaaccagagaaacaaaatctgagggtggagaccagcaaagcagtgaagacttcacagtggatgtccacatcagacctctgaagggaagatccagcaatgtgggagctgagaaataaagtgagtcttctctttcattgattgtagatagttctgagaagagaaagcagattctcacacccttctatcatgtttcaaagccaattaccaccttttttctataaaatatagaattagcatgactatgtaatcacatgaggtttataaagggtgtggcacaatgtccaatgcagaacagctactgacagacacctggcagtgatgctgaagatgatgatggagatgagaatggtatgctggagatgaaaatggtgatggtgatgatggttttgaaggtgatgatgatggtatggtggtaatgctggtaatggtaatgatggtgatggtgttgatgatgatagcggtgctcatgatgagtataatgatggtgagtatactgatggtgatggtggtagtggtgatggtgatgttgatgacagcagtaatgttggtattgataatggtgatgtgattgtgataatagtgatgatggtggtggtggtggtggttataatggtggtgatgatggtagctcttgtaatgataatagtggtgatggtaatagtggtgaagttggtgatagtgatggtagtaatagtggtggtggtgatggtgatgacggcagagacggtcgtattgataatgatgatgatggtggtgatgatagtgatgatgatggtgataatggtgatggtggtaaagatggtagtgatggtggggattatggtggtactggttttgatggtgatggtcttggtggtggcagtaatggtgacggtgatgataatagtgatggtgatggtagtgatgattatggtgagggtggtgatgatggtgatgaccatgatgttgaggttatggtgatggtgatcatggtggtgatggtgatggtgatgatgctggtgatgatgatggtgatcatgggggtggtatcaatggtgatagtggtaaagataatggtgatggtggtagtgatgattgtggggatggtggaggtgatgctggtgatagtgatggtggttatggaagtggcaatagttgtgaagattatggtgatattgatgatatagtggtgatggtggtgatatgatatttgatgtgaaaagataaagctctttgatgcagaatataagcacgaggccagagcaggtatcattaagggttttcctctgtttgcaggctcatcagatctggactcaggtgaaacttgtcctcagacaccttgccttggatgggaaactgtttttcattaatggatcatgtgttcttcttaaccacagcagcaaacgtggtttttccatggtattcacgcctccaactgactaagatgaccatgaaaaagaaggagatgggtagtttgagaaaggggcagggagcaagagagacagcaccaggaaaggggtgaggaggcagagtggaagagaagatagaaaccagacttgtccacagggtgtccacacgttcattgtcacctgccttcagaatgtccctgtcttctgagagagtcacttctgggcctgtctctcctttctggaaagatccagcaggggccctggggagagctgcaggaacaggaggctgtgccatctactggccattgctctgttcaataaaaccccacatgcccaggtagcccagggcagcgaggacagaaccaagccgacgggcctctgcagaacccgtacggcactcagggagtgcttagtttgcaaaacccctttctccaaggcagatgctatgacaaccccagggttaccttcagagactgctccccagggtgaggctcgagtagaggcacccgaagggctggtcatccgtgggtgaatgcttccctctggtggtcactgtggtgaagtggagcatgcagaacccagaggttctctgcaacctcatgaactgagcaggagttacagggcaggtggctgcaggcacaggaattgccctgtagctttgtggtttatctgccacatctgggcattctctttgtgatgtgttcatcttcacaagtgatgtttcagcatatcgtcccctcctttatcatggggtgaggaggttgccaactctgcaagcctcttcccacttagttcccctcagacacactccatctctcagggcccaaaagctcaccattcctgccaactctgacacagctcaggcatcattctcagatacattcaatgccatgaatggcagacttagctgggcatagtggcacgcacctgtagtcccagctactcaggaggctgaggaagaatcacttgaacccaggacgctgaggaagaatcacttgaacccagaaggcggaggttgcagtgagccaagatcgtgccactgcactgaagcctggtgatagagtgagactccatttaaaaaaaaaaaaggctaatgttttctttttccaaatatgactggcaaataggtacttaaaacattttataataaaaagccattgtggtgccatattcataatgaagtccatcagcaaaaggaagaagaccctcccctgcactctaatgaaatctggcccctctaggctgggcacaggggttgacattttagatccacagtctggcatgtatgatgtcccaagaatctcctgaggacagctctcggttccttcctgagaggtgaccatctgctcatcctcatgtctcctctagttcagtaattttcatggcacgtgctcagaccagggctggagttctgttctttcctccccactatgccctcaccccagccctcagcaagtcctgtctcgctgcctctcacagacatcctgagtctcctgtgctccacctcccgaccactgcacgggcccaggtcactgtcctccctttcctgggtgactgcaatgtcctcctgactgttctccaccctcccattctcaccgactagaagcctgttccttccttgaggccatgccagccttctaataacatataaggtgtcatgtcatagtcccggtaaaacctttcaaaggcttctcattagagttggaataaagtatattcagcatgatgcatatggcctggcaggaactgacatctgctcatccccagacccagtctctgtatctctcctgcctgctggtccttgatgatcaattcaggagcttccacaggttaagatcattttctcctcagggtaagttcatgctgctttttggccagaaaatccccacccttgggtttctgcagctggctgcttctcctcctgcagagtgcagctcccatgtcacatccccagagtggtctttccaggtcactctttctaggttaggatatcatttggctacaagctgggtagaggcaatactgtattcgtcccattatctgtaaagtgcctatgaacaatccctggaccatagaagactctgaatatacatattggatgaaatgcctttatggacgtatcagagactttctcagtggcaatgagataatgtcatgtgaacatcttaccggcagcatctgtgaggttgtgttaactctacaactatttgttataactatcatttcaatggcaagagttaagatgacctttggatcttttgaaaaatgacaaaagcttgggatcaaatatcaaaatgcaactagggaaggataagaaatcaccctagggagggtggcaggaagcacagggtgtcccagagacagtgtcctggaacccagccagcagagcttccaccagcaacactgtcaccctttctccagggcttctctgtgccgagcagttcagtaaggacctggtatgcattgtcattttgttcttcacatatctgcaaatagagaagtgtactcttgctgatgagaaaataattcttgacatacagcaggcacaccatacctctcttttgactgaacgcacacatgtatccaaggtcctcccttacggagaagacatcactggagagctccaagatcccagacagggctcagctatgatgacatcacagtgtggggtcctgtgcacttgcatcagactctgccttgacactttttgttgcaggttcctcatctgcaaaatatggaaacacatttcataaagattgttggaggatccattaattcactcaactaattccttactgaaccctgtgctagggctgggaccacagcattgagcaagtagacagtgtgcccgtgtctagaacacaggaagcacatagagaggcacagatatggttgataaaaagcttttactttccttcctggcctgggagtctcatgaatagaggatgccttggagtagggtgtgatcaaaggtagacagcagaggaggtaaagtgggaccatctccagtgcattgctaccctaggaagaatctacagtgttgctgagctcctgacaatgataacaaatactgcagggcaaactcagagaccctagagaagggcaatggggtgctctagggggatgcaggagctgctgaatggggataagccaggctcatcatgggaccagtagtgggcagctggacagctttcagactcctgaggagggattgatgcctggccatttgtccaagtacatgcatacacacagtcacacacaaatacacacagtttcacacacagagagaataacacacatacacagagtctctcacacacacacatagaatcacacacccaatcacacacatacatgcagtcacacacacatggtcttgtacaaaggtggattactatgaaggaaacctgctgaataagtattttcctgcattgaatttccttaaaagcacaaaactatgttcatggcaaaatctggaagagctagatgcagactgaaacagatctaaaactgcattttgcaaactgctgcacgcagcacaaatgcagctgtaaaagttaatgtgcgctcctaactacatttttaaaaattccttcaacaaacattgaaattattttgtataccaaagcctccttttggaactatcaatgcacattataatattcattaaaactcataaaatgcctgcagtaagccacctgattttttatcttcaaactttaatcaattattctgaaattcctacactttgatttttgaggggaatggctaacacctatcagctaccttcagaaagagtgtcctgtggaaataaattaagaaacattcatctgtaatattgtttcactttctgtaaattctagtattgaggaagttaagtaaatatagccatccattggtatccatgagggattggttccaggacctccctcttataccaaaatccatggatactgaagtccctcatataaaatggtgtaacatgcatataacccatgcacatcctcctgtatactgtaaatcatctctaggttactcataattcctcagacaatgtaaatgctatgtgcatacttgttatgctgtatagcttagggaacaatggcaagataaaagtctgtccatgttcagtgcagatgcatttgttaaaaaatattttttatctgaacttggttgaatccaaaaaggtggaactcaaggatacagaggctgactgcatgatgatggcaattgatgggatccaagtttttaactgtcaaagaaagcagccacagctttggaaagggaagaaccagaatgaatctcacagggttggaaatgaggtcaatattaacttatggtttataacgtatagacagataatgtagaaataaatatcaacatgtgagtatgttcaggtgtggatttcgtagctctgtcccactgaggaggcctggaacaaggctcctcaccctccccactgtggacattttgggcctaatcactctatctttgggagctgtgctgtgaaattgcctgatgtttatcagcatccaagacctctatccccaaaatgacagcagcacctcctcccgagtagtgacaaccaaaaatgtccccagacactaccaagtgtgctctgggaagcatatttggtgcctcctgccacaggttgagaagcacagaccgaggactcatggccatccaggagcaatgagcacaggttgcacttgggccttgctttctaaattcaccgcagattctagccactgattctaaggttggctcagaaaagtgaaagataaatctgcaacttcttgttacatcagaaagtaaaaatagactcaaataatgatgaaaacatctcataagaatgcaggaagcagctgaaggggtccccaatagccaactctgagataattttcacattggaataaatagtgctaacagagtgtaactcattgaataaaataagaaaccatgagtcagatagatctatggaaagataaatggcaaataggtaggtaggtagacagataagcagatagaagaaaatagagattttccttatagtagaatgaatgccattaataaatgtagaacaaataatgaaattagaaacaaccttttcacaacagtcataataacaattgattcaagcaacaattatcattgtatgctaaagctagaaagtgaaaatttgataagaagtaggatataatcgtatttcaaagcattgctttatgcaatatttgttaatgataaagtgaaaaatagcaactttatagtggactggtatagatacgctgcaatggctggggccaggccactcctgggaggtgggctcctgaaatgtgatcatggacagcaacttcatgtaaaagtatcctctcaccttcttgagagtgaaagactgcctggaaagagatgctcaccatccccgctgagcacatttccagcctaccccacctgaatgcagcccccaactgaacctaacaagaccagcagaagagccgcggacagctccagagtcataagaatccacacatcatgttgctttcagccaggaagattcggggtggcttctgatgcagcagtaggtaactgatgtgtacaggatgctctgaacatccctcccagcagagacccacagtccatcccatgtgaggtccagagagggagaaatctcctcctccgtagactgcatggtttctgctggtgtctacaactgccatgcaactcgtggagcgcagccctttccttccgaatccaacctacatttcatgctctccatgaggggcaggtctgtgggcaaaatgatgattgtagcaatagacatgctgaactggtggtgcctgcaggaagtccagtgatgacgtcatggacagggggatgaggagcttcactgctggaagcctggccttagttgagataactcaagacaattgcaatggggtcaacactctcacaataagacagagtgagctcaagtccaaatataaaaagagtaagtggggatttatagccaaggagcagggtgtggaggttagtgaagaaaaaattactaagcagagacatcaaaggtaggggtttctggctgaactgaccaaacaggattcttgctaaaggcaggacacagccttagacatcaaagctgagggatgaggaacttgatcagatgtcaagggtgatcagaccccaaggacagcaggattctccctaaaaggaagcaggattctttcctaaaactgagcaatgcagacctggcaggtaggagctggagaccaaggttgaggcctagtgaagaaggctcagaggagccttaaagtttcgttagagagtcttttcactggatccagctcctctgtgacaggaggagagggcaggcagggccacaagagcaggcaggctgtcctgatggcctctggctccagctccagcacccactgattgagtgtaacaggattccaggcaggaacaggaaccactctccacagccactgcagtctgctaaaggaattgatatttaaggttagacaaacagtgacagggaa

SEQ ID NO: 97207 - DNA, 19340 bp, Homo sapiens
  misc_feature (1)...(19340): n = A,T,C or G
agcctggtcaacatagtgagaccccatctctattggtttaatttttttttaaaaaaattaaataaataaaataaggattgaggaatgacttgtacaccatttgagcccacctccgtctcacccctgcagagccccagagacacagccctccagagctcagacccagtgggacttgactccacaggcataaaaccctgtttgtctatgggccctttggaatcaccaggttttcggggctcctgaaggatagccccgacctggcctcacctggcccctggccccagtgcccctggtgatatccaggtgctgggctgtgatcaccgcctcccaccagcccacctccaccagcccttcccagaaccctgccccaggtgttggaactgtgcacagaggagggagcaggccccgagggaggcctggaggggctgcggatggtgaaggctgctgtgtctagctgtttccttctggacccactccctctgggctgcgtccccggctggtccaagccctgatccctgggatctggggacatcttcccgtttgctgttccctgagaaccaggcctccctctggagaggatcacaagcttgggtttcactctgggcttgctcttggaaaccccccaggggcgtggctctgaccgagatgttttcctccagcctgttgcccagtccccattcctcggacctcagcttcacctccagtgtcatcggcagggtgagctggacgcctacgggtctgagaaggcgcccgggttcccagcatcagctggccaccctctgcctaagaaagtgccagggtcgtggcaccccctggtggctgatcctaggtagtgtcactgcccagccccagtaagggagggcctggccccaaagtccaagggatcagggtggaaaggggcagggcttggtgtgaaccttcccctggcccccagccatgtgcctggctctccccatgctgaagatgctgaggctagttccagtgcccgcattgtgaagatctccgaatcccacctctctgttcctccccagccagatggctccatttcacacacaatacactgaggcccagagagtggggagacaggccagggaggccacctggagcctggcacagtggcctcatttattgtgctgctctgctgctcacaggagaagcctgtcccccaaagtcctcttcctcgtcctggtgagtattttgttcctggattgcttgtcagccttgtccgcctggagcaatcagtagccagcaggttccccacctttcctggagtccgaggcagctgcccagccaccagccatgcggacgatggcttgcaccacagcaatgaaggtggacgtgatctgggtgtgatggtgccgggtctccagggctgcagtcacttcctgggggtgggaggagaggggaagcctgagcagggctccagatgccacctgaaccacacctgtgtggtcacaggcctcagcccaggtggtgccatttcaggccaggtcatcaggaagagcaggttggggcctgctgggtctcattggagcaaggggtttggccctcatggcacaggggctccagatggcccaggcactagagagaggacaccaaccattgtccactctgtgatgatccaggcctccagcccacgatgccctggggccccacaccgtgactcagtttctccaacccccagcccacctggtcaatgtttctctccactgtcgtgacgttgggcagaagctggttgtgcagccggggctcctccacggcccacttcacgtcatagccgaaccagaggttgtagatgatggcctggggcatgggagtgtgatcagcatggcttgggggctgtgcagggtgggcacggccagggagaaaaggtgtgacacataccagtgcagtggccatggtgatctgcgtgcccccggcagctcccaccaccatccggacctggccgtcctggcccaccatgatcgtcgggcacatggacgagagcggctgcttccctgcggccaatgggagaagacagggatgcccgtcagctgcctgcccaggacacccgcccctctccaccccagtcccccaccctcggacctccaccccatacctggctggatgaaattggcaggtgaggggggtaccccaaactcgttggtgatgctggtagagctgaagtcatccatttcattattgagcaggatcccgctgactggggagcgcaccttggagccaaagctatcgcccagccaggtcagacagtgcccgaccttgcctggcccagcctggtccctatccacccactgaggctcaaacatactcactgagaggctcaggataagctaccaaggttgggcctcagtttcccaccaggaaaagaggtgatggagccaccttactggataagtgggcagtccctgagccaccctcccctggccctttcccacccaggcggcccagcagcccctactagaggttgatggtgctggtggcggacacagcactgccgtcctctgcgaccacagacaggtgagcagtgcccccgtcatccggcatgtagaactcgggcttgtagtaggagatcgggtgagtggtgtcgtcagagatctgggcccggagctgggcagagaagaactcggaggtcatgtcgcggaccacctgccgagaccccagagctggcctagggaggtggggagggagggtggggagggggcacaggtctcagaaggcccctgactgtggctctgaccacaaccctctggcacccacaaccttccgtggctccccaggacccaagggcaggcccaggaccttgcatgaccagtctgactccctgtctctgtcgcattccagcaactctgaatgtttgtctgcctggtcctcagcctccagacccttgctgcattcaatcactcattccttcatgcaaaaaatatttctagagtttgcactgcatgcctggcactggggaatcaataggaaacagacacttaggtcctgccctcatgccaagaaaaacaaacacacacagcgaaagtgctgaaaccacaagccaggtaaggggaatcaagaggcatgaggtatgggcagagtggttagggagagcttctcagaggaggcaacgtgtgaaaagagcctggaatgtggcctaaatggtcagtgcaaaggccctgaggcaggtggtataggctggtgagtgataggcagagagtgaatggagtggggtggggagaaaaggctgaagatgcaggctggggcccatcccacaggacatcctaggtcccataacaactggcttttgctctgtgccatgcaggcttagggcagaggaatgagcaggctggggagtgttttcacagggtccctctggcagctatgacggggataaggataaagtccaaaggggaggctgtgggtatcaaccaggcaagagatgatggcctgggtgggagaaagagaagaatcaaggatggcgccgactagcgaggtaaactctgcagaaggggcaggtttggggatggtcaggagcttgattttggatacttcatcagacctgaagagcatgggtgcacgtataaaaaaaataaataaataagcatgggttcacgggcaagggcgggctgagagatgaacatggaggtattgacattgagtggctgctggatgccatgagcctggccaaggtccccaaggcagtggcgaggaggagatgaggaggtcaaggaggagacagagaggatggacccgaaggccgaagaaaatgcctcaagggagtttccacaccgggcgcggtggctcacggctgtaatcccagcactttgggaggccgaggcctgtaatcccagcactttgggagggnnnnnnnnnnnnnnnnnnnnnnnnnnnnnnnnnnnnnnnnnnnnnnnnnnnnnnnnnnnnnnnnnnnnnnnnnnnnnnnnnnnnnnnnnnnnnnnnnnnnnnnnnnnnnnnnnnnnnnnnnnnnnnnnnnnnnnnnnnnnnnnnnnnnnnnnnnnnnnnnnnnnnnnnnnnnnnnnnnnnnnnnnnnnnnnnnnnnnnnnnnnnnnnnnnnnnnnnnnnnnnnnnnnnnnnnnnnnnnnnnnnnnnnnnnnnnnnnnnnnnnnnnnnnnnnnnnnnnnnnnnnnnnnnnnnnnnnnnnnnnnnnnnnnnnnnnnnnnnnnnnnnnnnnnnnnnnnnnnnnnnnnnnnnnnnnnnnnnnnnnnnnnnnnnnnnnnnnnnnnnnnnnnnnnnnnnnnnnnnnnnnnnnnnnnnnnnnnnnnnnnnnnnnnnnnnnnnnnnnnnnnnnnnnnnnnnnnnnnnnnnnnnnnnnnnnnnnnnnnnnnnnnnnnnnnnnnnnnnnnnnnnnnnnnnnnnnnnnnnnnnnnnnnnnnnnnnnnnnnnnnnnnnnnnnnnnnnnnnnnnnnnnnnnnnnnnnnnnnnnnnnnnnnnnnnnnnnnnnnnnnnnnnnnnnnnnnnnnnnnnnnnnnnnnnnnnnnnnnnnnnnnnnnnnnnnnnnnnnnnnnnnnnnnnnnnnnnnnnnnnnnnnnnnnnnnnnnnnnnnnnnnnnnnnnnnnnnnnnnnnnnnnnnnnnnnnnnnnnnnnnnnnnnnnnnnnnnnnnnnnnnnnnnnnnnnnnnnnnnnnnnnnnnnnnnnnnnnnnnnnnnnnnnnnnnnnnnnnnnnnnnnnnnnnnnnnnnnnnnnnnnnnnnnnnnnnnnnnnnnnnnnnnnnnnnnnnnnnnnnnnnnnnnnnnnnnnnnnnnnnnnnnnnnnnnnnnnnnnnnnnnnnnnnnnnnnnnnnnnnnnnnnnnnnnnnnnnnnnnnnnnnnnnnnnnnnnnnnnnnnnnnnnnnnnnnnnnnnnnnnnnnnnnnnnnnnnnnnnnnnnnnnnnnnnnnnnnnnnnnnnnnnnnnnnnnnnnnnnnnnnnnnnnnnnnnnnnnnnnnnnnnnnnnnnnnnnnnnnnnnnnnnnnnnnnnnnnnnnnnnnnnnnnnnnnnnnnnnnnnnnnnnnnnnnnnnnnnnnnnnnnnnnnnnnnnnnnnnnnnnnnnnnnnnnnnnnnnnnnnnnnnnnnnnnnnnnnnnnnnnnnnnnnnnnnnnnnnnnnnnnnnnnnnnnnnnnnnnnnnnnnnnnnnnnnnnnnnnnnnnnnnnnnnnnnnnnnnnnnnnnnnnnnnnnnnnnnnnnnnnnnnnnnnnnnnnnnnnnnnnnnnnnnnnnnnnccatcctggctaacacggtgaaaccccgtctctactaaaaatacaaaaccattagccaggtgtggtggcgtgcgcctgtagtcctagctactccagcaggctgaggcaggagaatggcgtgaacccggtaggcggagcttgcagtgagccgagatcaggccactggaatccagcctgggcgatagagggagactgcgtctcaaaaaaaaaaaaaaaaagagtctggctctgttgcccaggctggagtgcagtggcgcgatctcggcacatcacaatcccttccccacccccgggttcaagtgattcttgtgtctcaaccgccggagtagctgggactacaggcgcatgccaccatgtctgactaaatttgtatttttactagagacggggtttcgctatgttggccaggctggtctccaactcctgagctcgtgatccgcccgctccgacctcccaaagtgctaggattataggcataagccaccacgcccggcctcttttttttctttttctttatttggagactgagttttgcacttgttgcccaggctggagtgcaatggtgcgatctcagctcactgcaatctccacctcagcaggagagcaggaatcttcagtgatccacgggcagatctgccgccattgtgggcacctgttcctcccgcgacctttgtgcccgtgtctctccttccagtacctattgcacgaccccccacgtccgcctcccgccattgccagcaagtgccttgcgcgggtacctggctgcgcttattaatccgttaagctcactctgtcacgggcgccattaagtgctcacgcgcccactccctcaggtttaaaaggcgcgttgcccggcagcagaagaaactgctggcttcgcctttggccgagttggcggctggacgaggacgcagagcccagctctcgagagttcaagcaaccgacggttccccagggctcccaggagcggttacctgggcactctgtgcccctccttcctgttcgggcccaggcctaggacctgccagtagggctcagttgcctrgagccsgttcagcccatcccccagttcactttgcttgtgggatctccccgttgctcctgcctgtggactgagtggcaggccatcctacaagcacccggacacttracatcagtggtgtcaagacaactctaagaaggttttccgtgatcctgcaagccctgcgttccttcctgggatcctscttycaatttgattgcacaggtaccacagcaagccagtgctgtgtgctctgagttccagggcgtcctccagctcagccactccactgagcacaaggactctctgtggggcccaggagccgggagtcacccctttggtgtccaaaacacccggctgtccccagacttgtgtccagggaagacagtgttgagggccctcaaggagagcggggcagggatgcctgagcaggacaaggaccctagagtccaagagaatcctgatgatcagagaakggtccccgaggtcaccggggatgcacggtctgcatttcggcccctgcgggacaatggaggcctctctctccctttgtgcccgggcccgggcctctgcagacagacctccatacccagaggtgagaaatcagatataaccagacatcccagayctcctggacgagctcctgcaccaaacgaaatgccatctccagctcctgcagctccacgggaggcttgccggggctaaagcggaggaggggaccagcctcatcccrcwgccagctgaccctcagttcctcaaagacagtgggtgaggacaggcttcaggctgtctcttcgggtcacacccagtgtgaaaaggcagcagatatagcaccagggcagacactcaccctcaggaatgactcctccatatccgaggcctctaggcccagtatacacaagtttcccctgctgccatgcaggcgaggggagcctttgatgctgccacctcccttagagctggggtaccgggtcactgttgaagacctggaccgggagaaggaggcagcattccagcgcatcaatagtgcactgcaggttgaggacaaggccatctcggactgcagactctcacggccttcccacactttgtcctcacttgcaacagggacttctggtctgcctgccgtttctaaagcacccagtatggatgcacagcaggagagacacaagtcccaagactgcctgggcctactggcccccctagcacctgctgcagaggtcccctctacagctcccatgtctgggaagaagcacagaccaccaggccccctgttctcctcctcagatccccttcctgccacctcttcccactcccaggactcagcccaggtcacctcgctgattcctgcccccttcccagctgcaagcatggatgcgggcatgagaagaacaagccctggcacttctgctcctgcagccgcagcagcccctcccccctccacattgaaccccacgttggggtcactactagagtggatagaggcccttcacatttctgggcctcagccacagctgcagcaggtgcccagaggtcagaaccagagatcccagacctcccggaccagctcgtgccccaaacgaaaggccatctccagctcctacarctctacgggaggcctcccggaacgaaagcggaggagggggccagcctcatcccactgccagctgaccctcagttcctcaaacacagtgagtgaggacggacctcaggctgtctcttcgggtcacacccattgtgaaaagacggcagatacagcaccagggcagacactcgmccccaggggtggctyccccagatcccaggcctctaggccctgtagacacaagtttcccctgctgccacgcaggcgaggggagcctttgatgctgccwcctcccttagagctggggtaccgggtcactgctgaagacctggaccgggagaaggaggtggcattccagcgcatcaagagtgcactgcaggttgaggacaaggccatctaggactgcagaccctcatggccttcccacactttgtcctcacttgcaacaggggcttctggtctgcctgccatttctaaagcacccagtatggatgcacagcaggagagacacaagtcccaagactgcctgggcctagtggccccccagcatctgctgcacaggcctgtagtcccagctactcgggaggctgaggcaggagaacggcataaacccgggaggcagagcttgcagtgagctgagattgtgccactgcactccagcctgggtggcagagcgagactccgtctcaaaaaaaaagaaaaagaaaaaaaagttcttgtgacatttgtgtatgaaatcagccttcactacatggataggaccagcacgcttccgsggcacgactctgcaatcttactacattttttttttattttgtattttatttattccttttgagacagagtctcactctgtcacccaggctgaagtgcagccgagatctcggctcactgcaacctccacctcctgggttcaagcaattctcctgtctcagcctcccaagtagctgggactacaggcacatgtcaaaacgcccggctaatttttgtaattttagtagagatggagttttgccatattggtcaggctggtctcgaactcctgacctcaggtgatcgacctgtcttagcctcccgaagtgctaggattacaggtgtatgtttatttatttatttaagatggaatcttgctctgtatttattaatttatttatttgagatggagtcttgctccatcgcccaggctagactgcagtggtgcaatctcggctccctgcaacctctgacttccagtttcaagcgattctcctgcctcagtgtcccaagtagctgggattacaggtgcctgccaccacagctggctaatttttgtatttttagtagagacagtgtttcaccatcttggccaggctggtctcrggctcctgacctcatgagccacctgcctcagcctcgcaaagtgttgggactacaggtctaaggcaccatgctcggccatatttatttatttaattatttagagacaaagtcttgctctgtcacccaggctggagtgcagtggcgccatctcagctcactgcagcctccgcctccgaggtttaagcgattctcatgcctcagcctcctgagtaactgggactacaggtactcaccaccatgcagggatatttttttctatctttttgtagagacacagtttcaccatgttggccaggctggtctcgaactcctgaccttaggtgatcggacagcctcgtcctctcaaagtactgggattacaggcatgagtcaccatacctggcctctcactacatttaagtgatgccatggctcatgcctgtaatcctagcattttgggaggccaaggcaggtggattacctgaggtcaggagttcgacacgagcctggccaacatggggaaaccccgtctctagtaaaaatacaaaaattagtcaggcatggtggtacaagcctgtaggcccagctacttggaaggctgaggcaggagaatcactttaactgggaggcaaaggttgcagtgagccaatatcatgccactgcactccagcttgggtgacagagtgagacatcatctcaaaaaaaaaaaaaaagaaaagaaaaacatatgatgccggggcatcttggcctcaatacctgcatgagcacagtcatgtccaggccagggctgctggtcgaggtccggccccatctcttccagcagaaagggagtaagcttgcagggmggctgggggacaagatcccaggatctcagcctcygctcatggatgagctctgagaccccaagtgagctgggggtgctccgtgcgcattggtttccccagctgtcaagtaaagggattggatgaggaagtcttgtcaaggtggaatgatctcagatttggggcagcagtgaatgatcccgctccctgggccgtgccagtgtcccggcctcagctgaacacagccccaacactctggaatggggatgagggggcagtcagctcttgctcctagtaagagagatgcaatagggctctgtggctgagctgggtgccttgcctcacacctgtaatcccaacctttgagaggctgaggcgggaggattgcttgaggccgggaattttgagaatagcctggacaacatagccagaccccatgtctacaaaataataataaaacacacagctatagtccaagctacttggcaggctgaggcaggaaggtcccttgagtccgggaattggaggctgcattgagctataatcgcaccactgcactccagcttgggtgacaaactgagaccctgtctctaaaagaaaaaaaatygkcctgtgagcatgggtttgattttcaaacaggacccggagggtagggacagacagtgctgtcacccttaggtgctgaacactcagaaacaggccagcggcagccctttcctcacctgcagacaccagattgggcaggacaccacgtggcacttgcagctcttgcagtgagggcagaacccagtgtcaacccttctgcctgtgggaggggctgctgaggcctgcggagaggccagggtggaggctcgtccccttgtccagcccttggcrtggtctccaycaggttcccagcccaccagtgcagggcgcccctgagcctgctgctgccacgggcccggtctctacccaggacgtccccccaccctcgcagtgtcagggaaattatcatggtggyggtgacactcygcaggcagggctgctgagagaagctgagaagggtcacactgcaggcaggggcccrtgtgacaagcccctctcaccccgagagagctgaccaggcagctcacragcagagccacatccygggagtccgagaaaggtcckrsmrrgctcagccacctcaytggcyaygggcagcctttgtcgtgtgagccttgctctcctggggaggctcaggctgacggctgatgtgggcattgccgarggtaacctgtggcccagtgkatatggccgggtctcctcaagctgcattcattcaagtaggacccagggtgcrtgcccatctccagcccagggcagctcccctgtaagctgggtgagctactgaagccaaggcgggaggcagctgacaacacccacggcccatgtggaggtggtggaaaggctggactcagcagcaacaccaaatcccggaccaggcagaaaccacccaagactgaggggctcatgccagagcggtggccacaggtaagaacccgggcccaggctgtgtgtggcgggaatcctccatgtcccagggcttagcatagcaaagraagatcagctgggtcaccctggtggccatctgtccctgtcccacctgtagagtcagaacagcctctccccagtggggatcatctctctctgccaaagcaacagcggtccctgccccaaccagactaccccactcagtggagttacggatgctgctccagcatcctaacactgcccagctggcgcctgcctgtgctcacccacacccccaggccggccttccctgcagcctgggcttggccaccttggcctgattgagcactgaggcctcctgggcacccagccccatcactgcacctgctgcttccagccccaccccactggctcaggggtccttcccagcggcgctgatcatgaaatcaacatgcaagcaagtcgtctcaggaaactttttaatgaaagtgtcggccacggtggtgtgtaggtggctgagctcagattgcagctgctaagacaccagccacttaccaagagaaagccaggctgcttcaaacccagggcccrmggcaaaaaagcatcacttccrgccggggagtctggaagccacgccttgtgggaggtcacactggcatctaggccttcgcctgcaytgcagaaggagagccgggtccccctcctggagaacgctgcgttccccagccccacaccggctttgccaccacacaggctkttgaggcaggaggygggtaagacgtagctgtagacccaaagcaaccaccagccctgggaccctgyrggagagragcacttttasaacatggaaaartgtggtcatcccatcattagacagcacacatcctacakaaataaaaagtcstatggggaaggaggttggggagggaataaaaaaytggcacagacattgatagactggtttccagtttcaaggtaayagatgcacatcatgagaccagaggaggcagagacaagggctggatttggcttttctaagcaacaygygttcctgyscasggctgaatggtyrctgagacagakggaagccaggacaggggagcccaccgggcccagataggtacagagagcagaggctcctgttctgtcctcrccacccacgasggtgacactgcttgtaaatggtggcygtgctctcccagcaagwaaaaagcacaactaaatccacactgcacacagacgcagacagraagccttcaagkrgctctgttttctgctccctgccttgccaggtccacaagcagagaggagtgtcaggyrcatggccccrctgtcaggctcccyagtgagctgygggytcagcaggagytgcccactgacacacaggggacacccactcctcccaccttgggagcrgttgcccgacagagccgcactgggtgctggtgtcatccagggaccccacacacttccttaaatgtgatcctgcttccctctgggsagctgcatcctctcctcctgcaagattgtctggaaacttggctctcagtttgctctcccttctctcctctgcctgccccaaacccctctttctaaaaaagtgatgccgtgttcatggggttatttcttgaaaacacttggcggcctccatgcttctgttttctttgagccaggtggtcaggagggcttacaaagaatgcctgggcttccccgcaggtgycggcagatggggtagcgaatggtcctgtgcctccacctgctccaggagggagtctcccatctctaggcctggccccttcctaaccctccacgtatcctgttctccagagacttcagaacccactcctgagaacagcggagccaggcgcttagaggaagacaaaatgttattaattattaataacaaaatgttattaattattaatattaatatttaacattaaacagtaatatttaatgttaaatattaatattgatatttaatattaactattaatgttgatatttaatattaatattaaatatcgatatttaatattaatattaatatttaacattaatatttaatattaatatttaatattaatatttaatatttaacattaatatttaatattaatatttaatattaattattaatattaaaggagaaattaatgtaattaaaaataatcactatgcattgttctgaaatggcactcgtgaattatttacacgggaaatgctgccccctgctggccaccttaggacactaacaccgtgctttacctttttccattttctctctttggttggcatttttcttctttaaaaaatttacgttgatagacatttgctcatctctagcaggtaccgttgggaatgaattctgtgctgttgttgccaatcctggaatgaagtgagactcccctcctcagcctcctgacagagtcatctcatttcttctttgaaaaattaaagaacgaaggtaatgtgttttatcacagaattcggcttatactccagtgtggaagacaaatttctgtttaagctaatactctctgcccagatgatttttcatgctgctgtataattgagccagctgcgtaagggaacatggatctggcttgtaaataaggttgctaggggagctgaattataaatgatagaaaaagttaatctttctcaggttaaaaatgtcataaatctctgttattaaggtgtttcatttttttccttcccaagttcaaattggattttgcatatggaaagatgaaatcacttgcatccatagaactttatcagggctgtgtgagaattatctgaagagataccaagaagcacagcaggcttacacataggcaggcatgcactgtgaagtgctctttgtaaattctagagtgtggcttgtaatttataacacatattttactttatttaggttgtaacaacttgaatcttcctttcccaatagcaagcaattccaggcgggggatcttagccatcatttcatttctccggcagcaaacaatataatgctaagcaggggaattctgcttcatgacttgagttgatgttactgagccctggagcacatttatagctgataagaagcatgtaaaaatccttattaaacaatgaggaagaggtgacatgaatgctgacctccttggtctagaaagaccaggaatattgttgctgtcctgtaagagtagtcaatggtcaagcatacctgtgtgctacctgagcaagaatcagaagacagccccctaccttggcatccaggggtaatcagcaagttaccaacagaagtaccacatttagatttctccactatgagctgggatgggagacagaagaaaacagcaggcttgaggtccttatgacattctgcttcagtgctggggagtgtcctcagactgtagcaaagtagggaggttttcatggttattggatttctcaggatgctaaactgtggtctgcttttaaaataaaaaattaaagactttatttatttatttatttttctttctctctttttttttttgtttttgttttgttttgttttgttttgttttggagacagagtctcgctctgtcacccaggctggagtgcagtggtgcgatcttggttcactgcagcctcggcctcccgggttcaaacgattctcctgcctcagcctcccgagtagctgggatcataggcaagcgccacgacactcagctaatttttgtatttttaatagagatgcggtttcaccgtgttggccaggctggtctcgaactcctggcctcaagtgatccacccacctcagcctcccaaagtgctgggattaaaggcatgagccatcgctctgggcttgtttaattctattttagcttcaaagggtacacatacggatttttgatgtaaggctgaggtttgggctttgatttaacccatcacccaagtagagaacatggtactcaataggtagctttccagcccttctcccttccctctccacttttggagcctccagtgtctattgttgctaacatatgccatgaatacccattgtttatctcccacttataagtgagaacatgcggtatttggttttctgtttcgcactaaaccatgatccttgaagtcattttcctttgaattcctgctaggaatcagatttaaacaagaacaaaagtaaagaccaacattgatgaaccgtttatttccaaaaatttggaaaagtctgacagaattagattaaaagaacttttggtgacctatttatgttctgcctcactgaacacagtctgtgaacttgcagaataaggcaggtgggcccagggtcccggtcccacggcctggcctgacctcagaggccatgaagctaagatagcagaagcaagacagaatcttctccttgtatgagtgcttctctcaatatatccatccagaggccaccggaaacaaagcatgatggcatgggcagaggagccccctgtggggcatgcgaggtgctgaaggtgtgtccatatgcaagtcctctgtgaggcagagtgtgcgggcagtcgagtgcccttccatcctctgaactgagaatgtcaaggcatgagatgggcatggatgaagatctcccaaccgcacagtccagcccctgagcagatagatgctcatcacacagtgggaactgcatgtcgctatgctcccagctgacctactgtggggaagagggggagaatcaaagagaagccacgtagtcacagcttggagaaataccaagttaactctgcatcccttagaaaatgagtaaatcaagaaaaccaaaatgttgcctccctcctccacccctgagaaaacacacttcagatctggggaaagagaatatcatgcagatatgcagaataagagcatgcactggcatttccttgcctagaaaaccggcatcctcaatagcatgtaaataggcatggctgtgtaagcctggagcagaaagctgcggaaagatgaacggagatgaaaagacagcaggtggtacaaagagactagaggataggatgcaaaggcaatgcaatgagatggaaaatgatctgcttgaaatacggatttcaacaaaggtccttttgaaagaaggacttttgcttggtaaataacatggatagaactgcaggaagtgaaatccctgatggaaaatttttgagaaaccctcatggaatgcataaaatacggacaaataggtatgatctgtaagagggtgaatgacaggtgaagaaaatgaactgtgagctaaagacataggtgcccctgacaaggtaacatgggcaactagcacagttgccataatcaagagaaggatttcttgaattagcacaattcaagaatttttttctttttgacagtgatccccaaggaataatacctggagtcctagaacaaagttttatttagaaggatgaagggaaatcccttcaccccacaagcatccagagagaaaaagaagttactaacaaaagaatcaaattcattcttctgcactaaggtttaaataatacttacagtttttggagagggaagattatcacaaacaagcttcattcacatctgaaaatgaaatggtcagacactcaaagacatgtatcaaattttatttttgatacaaagaagttaagctgatatcatagaaatgaagagctctgggatgagagaatggggagggtgggatagtaaaaaagtgggctgggcacggtgactcacgcctgtaatcccagcactttgggaggccaaggtgggtggatcatgaggtcaagagttcgagactagcctggtcgatgcggtgaaacccaatctctactaaaagtacaaaaattagctgggcgtggtggtgtgcacctgttaaaaagagagattatgaatagtgaaagggagaattaacctaaagcactgtcatacatttgttaatctagaggcatgtattacaactaatatttgttaccaggaaaagtataaaaattaattacatggagaattccaaggtctagtttatatatttaaaaaatcaaaagtcggggggtagaacatgaagaaggaaaatcattctaaattctaaatattgtatatctgaggcagcagagtcaaaagacacatttcctctgtctctgtgttgtgttgtgttgtgttgtgttgtgttgtttgttggtttatttgagacagggtattgctttgtcactcaggctggactgcagccgtgcaaacatggctcattgcagcctccacctcctaggttcaaggggacctcccacctcagcctcttgagtagctgggactacaggcatgcatcaccatggccagcacatttttaaattatttttagatatggggtctcactatgttgcccaggctagtcttggactcctggcctcaagcaatcctcctgccttggccacccaaaatgctgagattacaggtgtgagccattgcacctggcacatctttcttgatttgaataaggaattataggttgaacaattaaaccagaatgtaaatgtaataaaccatttgagaaaataaagtgaaacataatactcttaatatttattccaatataataaaataacaaatatggcagggattacaataaaggtaagtaggctgggctctgtgaaaaaagatgtatactttctagctgcattaaaactcagtatccacgtatgtgcttacattctagaacagtttaatgaataaaacatttaaaatttagcttgtatatcaagaaacaaaacgacaacatagatggcaacatggttttcaaagaagtaaaattcaaggaggaaaacaaataggttgactgagaaaatattataagggacataaacattcataaacattaatatactgattaatattgcatgaaaatatataaagcaaaaattatccaaataaaatgagaaattgagagatgatctttacaggatttaggaatgtagctctctgagcccttgataagcccagcaaacatgtgacaaaaaacgtcgtagagaattaaagtcggattgaagtaattattacctttttgtgttggaaacacacttttaaaaatgtttataaaacatttacaaaaatcatcagaatttctacaaatttttaaatgggaaacacttgtcatactcccataaagctacagtaaaacaagaaatgaatatgaaaaattctgcaaaaattaaccagatatctaaaaatacttgtataaaattattggatcaaaggagaaatgaaatttcaattttaagttattagaatactatatatcttaaaattgaattaaacatgcaaaaagtacaaatttacagacaaaataaataatgaacaagttatataacaaaataagtttaaaataaaaaagtaattcttgggaagcaaaaaaagaaaataataatgaataataaattaattcattagattttcataatctagttctgtggtgaagctgttggcaaatctcaaggaaagataaaaataacaaccaaaaaataacccaatgtgagaaatgatgatattaacagagaataaattccataatctgtatcctagtaaatgatgaaaacttctggaaagactgatttgaagctgattcttgacttccatgtcctatgggatttcttggagagagagagtaagtgtgaggctttgtccttgacagacaggagagcctgtggggctgcgggagaacttaaggcttatatattgctgtgtagcaaagcacacccacttagtgacttcaagcaatggccatttgatttgcttatgattctgcagtctgggctgggtcagctgggcagttctcctgatctcacactggtcaagctgacaggtcatctgggctgggctcagctgggatgctgcaacagcctctgtctttctctccac

SEQ ID NO: 97208 - DNA, 40850 bp, Homo sapiens
  misc_feature (1)...(40850): n = A,T,C or G
ctaaatttacctctgtagagaaaaactaaaaacaaaacaaaaacccaactaattcacattctttcctgggcttttagaaaaagaactgatttgataaatggccaaggaccaaccctccccctcccccataacatcttttattttaaaaatgtaattgaaacatctcttttttgttttgtttttttgagatggagtctcgatctgtcgcccaggtgggagtgcagtggcgcagttttagctcactgcgacctccagccaccgggttcaagcaattctccttgcctcagcctcagcctcagcctcccgagtagctgggatcacgggctaaggtcaccacgcccagctaattttcctttttttttttagatggagtcttgctctgtcacccaggctggagtacagtagcacgatctcagctcactgcaacctccacctccagggttcaagcgattctcctgactcagcctcctgagtagctaggactacaggtgtgcaccaccacacctggctaatttttgtgtgtgttttttttttttagtagagatggagtttcgccacattgtccaggctggtctcgaactcttgacctcagccgatctgcccgcctcggcctcccaaagtcctgggattacaggcataagccacatgcccagccaaaaaacagcattggttttaatatctgatatagctggcagagtcacaccacaaacagataagagctctcccctttttgccttgcagccaggaagctcagaactaaaccttgtatgaaactgcaacaatatggcttagccaaattttttgacatgatcgcttctcccaaatcccattactactggcctaatgtcctttgacttttaatattcccataataactaccaattattttagctatcttgcagcctttcaagacacaagcaagggcacaaataattatttttatttatttatttatttttgatggagacaagagtctcgctctgtcgcccaggctggagtacagtagcatgatctcagctcactgcaacctccgcctcctgagttcaagcaattctcctacctcagcctcctgagtagctgggactacaggcacatgccgccatgcctggctaatttttagtattttagtagagactgggtttcaccatgttgcccaggctggtctcgaactcctgagctcaggtgatccgcccgcctcggcttcccaaagtgctaggattacaggcatgagccaccacgcccggccaaataattatttattttgaaatggtggcttggacacagctcatttcacgctgctcctggatgaagactttccaagaaagaggatcttttccccagaacctgggatgggtaccctggcagctctctcattgtttagaattattgcccaagagcgaagcaaagaagcaggaaagagtttggcactcaaagacacataaaccaggttcaaatcctggctctgcctccttgggcactgtgggagctggttccaaacctcttcaggtcccagtttccttaggtaagaatgatggcaggaatgcctgccacccatgtttacttatgaagactaaacaagataatgcacacaactatgctctgtatcatgcaaattttaattattcccataagttaatcatcaaaaactaataatatttatggaaaactagattatgccaagccctgcactagatactttactggcaaagactcattgaattcttccatcacaggatgaagagattcagagttcaagtaatgcccccacccacacaaaagaaaacagccaggtatttcactaggctggaaggattacaatatcaaaaggctggtacttacaaacaaattaaagaaacaaagcacatatttactcccaactagcataaagataagaacctggctgagcccaaggtaagtattcaaatactttatagcagtgactgggggccgagaagaggggggccaatcaatactcctcagggatgaggagtaagagacacgggacagtatgaaaaagtgtatttaccattacagggataactttcatatttacaaaatgaagggggaaaccccatggttttcttaatacaaatcacatactgtaaaggtccacaaactcttctcagctggggatctacgcagaacacatgagggcatctgctctgggggtaacagggaaggaaagaaaacagtgagggttttttttgtttgttttttagcataggttttgcttttattttccttttatttatttttttgtagagacaaggtctcgatttattgccctggctggtcttgaattcctgggttccaacaattctccgcattggcctcccaatgtgcggggattataggcatgagccaccacacataggttttttgtttttgagacagagtctcgctctgttgcccaggctggagtgctcgcccaggctggagtgcagtggcacgatcttggctcactgcaagctccgccttccgggttcacaccattctcctgcctcagcctcccgagtagctgggactacaggcacccaccaccacacctggctaatttttttatatttttagtagagacggggtttcaccgtgttagctaggatggtcccgatctcctgacctcgtgatccgcccgccttggcctccaaagtgctgggattacaggcgtgagccaccgcgcccggcctcacacataggttttaagttacattatctgaccccagagctgtaagaagctgtagagatcatcccactaaaatacccctggtcccacccttctccattttacagctgaagtaaaccaaactgtagggcggggaggtaacctcacaaggctgcatggtaaattatggacaaaactgaagctaggccctacatctttggtttgtttttattgaccctatgctcagttgacaaaagaagccttagatcccttgactctcaggctggtgctctcttctccaacccaagctgccctacctccacacctctagcagaggtcacagcacactgagaacctagcacagcgctccgcaccaggagctatgttaagaatggaagaacaaaagcccacaaggagcagttaagcaacaaagtcttgtgtcattatcagccagacatcaggtacccagtgagtcccagcaggtgtgaggtccaaggctcattgttagccccagacctcgttccaccctagacacctcttagggtggtagtgtccgccacccctccccttgtcttccagtctccctctcttcccttttgacctcagcccccaaggccagaaatggctgctgggccaccagggttgggttggggcaggaagtggggggtttacctgcccgaacaaagtagcagtgcagggagtgcacgtggacgtcttcactcacagacttggctgcagccaccagggcctggcccacgatctgaccaccaaacagcctcttggccggtacccagtaatgccttcctctgtagggagagggggaaagagggaaagacttgggaactgggccaaattctactaccctcactaagactctaatgcatgatctcttcaccatattggggtttaagatccttttgagaatatggtaaaagccataggtcctttccccaggcaaatatccttatgcataaaaatcctctgggccgggcgcagtggcttacatctgtaatcccagcactttgggaggccgaggcaggtggatcatttgagatcaggagttcaagagcagcctggccaacatggtgaaactccatctctactaaaaatacaaaaattagctggacgtggtggcatgcacctgtaatcccagctactcaggaggctgaggcaggagaatcacttgaacccaggaggcagaggttgaggtgagccaagatcgcaccactgcactccagcctgggtgacagagcaagactccatctcaaaaaataaaattaaataaatgtataaatgaataaataacaagagccctcagacatcaagtctaactccttcagtgtacagatgagaaaactgcagcttggccccagagatgaaaatgcttgcccagaatgtaggcccattggaagctgaataattatgtctctagcctcccacgtcccagctgtttggcattttctgtaacaatgagttatgaacagccctccatgacctggcaggtggctctcgcctgtaatcaatcccagcactttgggaagccgaggtgggaggatcgcctgagcccatgagttcaaaaccagcctgggctccaaagtggggcctcatgtctactaaaaataaaaaagttagctggatgtggtggcaagcgcttatggtcccagctaaacgggagactgaggcagaagggtcacttgggcccaggaggtcgaggttgcagtgagccatgttcgtgccactgcactccagcctggacaacagggccagatcttgtcttcaaaaacaaaaatcaaatagccctccaagaagttatttacaattccttaagtggaaggaagggagctcaaagtaagataacttccagtaaagccaggagaagccttggaggtcaaagctgttagaagccttgctgcagggggctgggcgcggtggctcatgcctgtaatcctagcactttggcagaggtgggcagattacaaggtcaggagttcgagaccagcctggccaacacggtgaaaccccgtctctactaaaagaagttaaaaaattagctgggctgtggcgcgcctgtatgtcccagctaatcaggaggctgaggcaggagaaatgcttgaacccgggaggcggaggttgcactgagccgagatcgcaccactgcactccagcctgggcaacagagcaagactccgcctcaaagaaagaaagaaacccttgctgcagtcaagaacttcagcgatgctgggaaagaaaaaaacatgcttaggcctcagaataagtaatgagaaaccagacccaccaaatggtactgggggcgggatattgtgagaagaaaaggatactgaagacacaaggagctgcggcgtcggttttaaggctgatccatcagctgtgtgcccttgggcaaatcactgccctctctgggctagctcccccgtgaaggcttagggcaggctgccgagcagggtctctcaggtcaccactatatttgctcagctgtgcagacctcgcagcgcggagaggaagggaggaagccagagcagagaggacagctctgttgggggcgagttctctcctaatcgtggcagagggtgcatcccacgcagagccatactagtcccggagccaggggccccgggcggcggcagtcaagatcaagtttctgccctaaaggaggggatgctgggcaggagctgccggctacctgaagagatcctcgtccagcggctcgaggttgagcacggtcgtgaccaagacgctacggaggtccccagggggatcgccgcggtcgccacagccctgcccatcttctggggcctgcggggacgacatctagttcaatgctgcaggccctgcacacccgctccgcggaagacgcggagacatacacagaacctgactcttccggcagattgccctagtaaccggaagtctcctgcagaccccgggaaggaggaatctaggttatgattggtcaggactcctgtcagtccgctggtggctgtggccctctttctctagcaattggagaaaatgaatgccaatctgcgaatcctgtgtgtgactggatatgtcgctgaggaggcggaacctcgggactggataatatggactgagtgtcatttcccctgtcagatagcaaatacacccccttcctcttgtaacccggtcaggcctagggttcctccctgagttccagaataggccacccagttggggcggacccttaaggcattctgggcccacgcctgcctataaaccctcatagtgtgacctttgacccctggtgtgatcttgggcccgggctgggaccagcccctagtgtgggttgtgggggcggccatggagctgggcagctgcttcaagacctatgaggacttcaaggagtgcttcagcgcctacaaaagggagaacaggtgctccttcattctcagggactgcgtctccgtccgcttccacaacctcaaccatggcacctccatccgcgaagacatcctgtaagggcgggcggggcggggcgggccaagagggtggggaggaggctggacctccggagggctgcctggaggaggaggggtgcataggcacgcattgggctgcgtggccattcattcaacaggcactcattgagcacctgctgtgtgccttgtgaagagagctaagcctccacggccattggtttttgaccacccactccactttcactccattcacaggcttttctggaatttataactgcagtttctcccattgttttgagcagctgcagcaacccaaatacaaagtatggctttcataaacggataaaaacaccttggcgataatttccttcatcagtctcctctttacaaaacagtcacatggtcgttggaatgttcgttcattcattcattcagtttttagttcttatatatttgttgaaacagggtctcactctgtcccccaggctggagtgcagtggcacaatcagctcactgagccttcaactgctgggctcmagcgatcctcccacctcagcctctcaagtagttggaactggaggtgcacgccaccatgcctggctaattatttgattttgtacagactgggtcttgttatgttggctaggctgttcccagactcctggactaagcgatctttcggcgtctcaaagtgttaggattacaggcatgagccactatgcctggtctattcattcattttgtaaatggtttttgagctccttatattaaccgttttcaaacactttccatgtgccaggcagtgttctctatgcatgctttaccctgcagggctttttttcagaattatagataaatgttatttttttgcatttgacagatgagaagatttgacagatgagaagycaggcttagaggttaagacaggagttgaaaactcaaatgccttcagggattaggtgaaacaacccaatgtaagaaagttttaactttgaattttactttaagaaaaagaatgatgaaatagcaaccaacaccaggtctttgtgctagggacaacagaagtgtgaaatgggccaaatggagagtagatgccatctaatcagctccagctgatggctgccatatgaaaataaagatctagtgttgccagaattttgggcaagagttgtcagaaatscacactttatgtggattttcccatttaaaaaaattgaatcagttcaaattttaactcagagcatgcgggccaactcagagttaaagcatatccgagtttgagacttggattgagatgctcaaccaaagctcctcaattagacagccaggctatattctttccactgttctgaagtccagtgctatgctgggtataggtgacataaagatgaataagtgttcaaactatccccagagaactaggataaacttgaactcaagcaaactggtgtgtgataaatgctttaaaaggaatgtggaaaaaaaaaaaaaaagaagaaatgtacggagaaagaaatgaatgacaaatgcctgggaggtgggggaagtcttcacactggaattgatggtttccctgggctgtgaatgaatgtagagtgctagagtagatctgtggytaattactgagtaccatggaggcatttgaccagaagttgctgtgcagaaggacctacaggagcaaagacaaagatacatgaaagaaggttggcatgttagagtaacagtgagggataccatgtttggcaggagatgaagtcatttgcagtctaagggtctttagggaccattgtgaggtgtttggaccttgtcctttatgggtaggaccttgctaagcaatgagaggaatacaaaaaaaaaaaaaaaaaaaaaaaaccacagttgcccgtaaacacccttcaggaagaccatctcaggtggctagcacaaggtgtggcccatagcaggcattaaataattattgaatgagtgagttatcaagtactaaccatgtgattcagggaaataggtgctgcgggaactcagaagagaaaaatcactgcgagctagagacgtaagagtgaaagggaggcttgagctgggcccccaaagatggagarctgtcagaaggtgtattggttttctgtttgccactctagtgaattaccacaagtttaatggtgcaaagcaacacaaatttattatcttagagttatttaggttagaagtcaggcacaggtcttagcaggctaaatcaagatgtctgcagggctgtatttctttctggagtccctgggtaagaatccatttcccgccggstgcagtggctgatgcctgtaatcccagcactttgggaggccaaggtgggcagatcacttgaggtcagcagttcaagaccatcctggccaacatggtgaaaccccgtctctactaaaaatacaaaaattagctaggcgaggtggcacatgcccgtaatcccagctactcaggaggctgaggcagcagaattgcttgcagccgggaggtggaggttgcagtgagccaagatcgtgccattgcactccagcctcggcaacagagcgagactccatctcaaaaaaaaaaaaaaaaaaaaaaaaagaatccttttcctttccttttccacctcctagaggctgcccaacacaccttgggtcatggcccccttcctccatcttcaaagccagcagtagcaggttgagtcatcacatcactctgaccttgcttctgtcatcacgtctctgactccctcttctgcctccctcttccacttttaaggatccttgtgattatattgggcccacccagataatcccagataatttccctattttgaagtcagctgatagccaccttaattctatctgcaaccttaattctcctttgccatgtaacctaacrtattcacagagtctaggattaggacaaggacatcttcaagggaccattctgcctgccacaagaagattaataacctggaggtaaaaatggygtgagtcagtacagacgtaaacatgacgtgcttctattagaaaacagtgatgggctgggcacggtggctcacacttgtaatcctaatactttgggaggctaagacagggagattgcttgaaatgaagagtttgagaccagcccagactataatsctgggcaacaaaatgagatccccgtctccacaaaacaaaatttaaaattaggggccaggttgtggcagctcacacgtataattccagcactttggtaggctgaggcaggcagatggcttgaggccaggcattctagaccagcctgggcaacatgccaaaacctcatctgtacaaaaaatacaaaaagtagccaggcatagtggtgtgtgcctgtagtaccagctactctggaggctgcggcaggaggattgcttgatcccaggagtcagaggttgcagtgagctatgatcgcaccactgcacactacattttagcctgggcaacaacagagtaagatcctgtctctaaaaaaaaaaaaaaaagcaagcagtgatgtatgtttgcacgcacatacaaaagccatgaggagacctgcttagctagaaggaaggatttatgctggagcagcaggaaaggaaattggagggttgataagcaggttggtgggttgggatttgttttgtttgttttaggagacaaggtctcgctctattgcccaggctagagtacagtgggagggtcatagtttactgtaaccttgaaatcctggcctcaagtaatcttactacctcagcctcctaagtagctaggactacaggtatgcacccccatgccaggctaatttttttttttcaattttttgtgtagagacagggtcttgccatgttgcccaggctggtcttgaactcctaggctcaagctgtcctcctgcctcagcctcccaaagtgttgggattacagatatgaaccaccatgctggacctgtttttgtttttgaaggtgaacaattttaaaagtgtttttgggccaggcacaattcaatcacttgaacccaggaggcggaggttgcagtgagtcaagatcatgccactacactccagcctgggcgacacagcgagactctgtctcaaaataaataaataaaaagtgtttttgtgtttgagtggttaacataattaaaaatattttcaaaaagtacagaagggactaaaagggtcacctccactgcattagcttttggttttttttggttttttttttttttgagagatggagtttcgctctgtcgccaggctggagtgcagtggcgcgatcttggctccccgcaacctttgactccctggttcaagcgattctcctgcctcagcctcccaagtagctgagattacaggcacgcaccaccccacccagctaatttttgtatttttagtagagacagggtttcaccatgtttgcgaggaaggtctcaatctcctgacccggtgatccacccgcctcagcctcccctgctgggattacagatgtgagccaccgtgcccagtctgcattatcttttttatctatttatttatttcatttttatttatttacttacttacttacttattttgagatggagtcttgctctgtcacccaggctggagtgcagtggtgcaatcttggctcactgcaacctctgcctcccgggttcaagtgattctcctgtctcagcctcccaaggagctgagactacaggcatgcaccaccacgcctggctaattgttgtatttttagtagagacagggttttgccatgttggctaggctggtgttgaactcctgacctcaagttatacacccatctcagccttccaaagggctgcgattacagctgtgaggtgccacgcccagcctatgtatttatttatttttatttttgtagaggtgaggtctcactatgttgcccaaactgatattgaactcctaggctcaagtgatcctccctcctcggccttgsaaagtgctaggattacaggcatgagccactgtgcctggcccactgcattattatatagaggcaatcagcgttaccttcctgagagatactgaggctgaacaaacatgtcttgtatatgcatttgcatctttttgttgttttaacacaagtggcagcatgctatttagacatagccttctgtacctgctgtacctggctcttctcacttaccaatatatcttggaaattatgccaccgtatgggcaatttgatttgactttcattgatttccttgtttttttttttgtttgtttgtttgtttttttgtttgttttttgcagttgttaactaaaaagttactccatgctggtgtctggagatacgttgttgaaaaatataaattgaatctctgctcttgtggagacaaatactaatctataatcacagaaataataatttccttaaagtggtagtagagctccaaaggaaaaacccagggtgccctgtggaggggtgatggtgacacttattctgattgtcaggaacagggtgggggtgctggttgacaccctaaaccaatgcaggctcttgctcagaaaaaactgtcagccctgagattttgcagatactttacaaagcacattcacctttattacctgacctggttctctgaataaccttgtcagaggcaaattttgctgttcccactaaattagttaatacatgtaaagtgcttacagcagtgccttgtagatggaaaatagtccacaaatattgtattgttttacagatggggagacagagccaggagaagtcaaacattaagagacaaatagtttagggccaggcgcagtggctcatgcctgtaatcccagcactttgggagaccagggcagacagatcacctgaggtcaggagttcgagaccagccaggccaacatggtgaaaccctttctctactaaaaataaaaaaattagccaggcatggtggtacgtgcctgtaatcccagctactcaggaggctgaggcaggagaatcactttaacccaggaagaggaggctgcagtgagctgagatggcaccactgcactccagcctgagcagcagagcgagactctgtctcaaaacaacagcataaataactgaaaattagacccagcctatttactgacagagctcttaattgttgtacttagccactgggctctaatagttttctaatgtcacttgtccatttttccctcaacaaacttgtggtaagaggctaagtgtttaccatgggccaggagtacaaagatgagctggagtacaaagatgaggaaattgtaggctccacccctgaggacaatagcggactgagatagcttaggaggcggtgaattcatgagcagcacaggtctttagcagaaacaagttgactgctggttgtgatgttataaaggacattcttggatcatttattgcaaactggctctgtgcagagctcactgtcttgggctttttgagtgatacrtgggtgtcttgggggactggagggttggtgggggaaatgtttttaggaggtaatttagtacatgtttctgcagccaaatacacatattactgggtggtcaggtgagatgatattaatacttatgtgaaaatgtagacataaagttccttgataagcaaagtaaagcaagtgaactaatttaaagaaaaccatttacagctggatgttgctcacgcctataatcccaacactttgggaggtcgaggcgggcggatcacttaaagtcgggagtttgagaccagcctgcccgacatggtgaaaccaactctactaaaaatacataaattagccaggcacggtgatgggcatctataatcccagctactcagggggctgaggcaggaggatcccttgaacccgagaggcggaggctgcagtgagctgagatcacgccactgcactccagcctgggtgacagagtgagactccatctcaaaaaaatttttgaaaataatggtgcagggccgggcgtggtggctcacgcctgtaatcccagcactttgggaggcccaggtgggtggatcatgaggtcaggagatcaagaccatcctggctaacacggagaaaccctgtctctactaaaaatacaaaaaatttatccaggcatgtagccggggcgcagtggctcacacctgtaatcccagcaatttgggaggccgaggcgggcggatcacttgaggtcaggagttcaagaccagcctggccaacatggcgaaaccccatctctactaaaaatacaaagaatagctgggtgtggtggcgcacacctgcaatcccagctacttgggaggctgaggcaggagaatcgcttgaacctgggaggcagaggttgcagtgagccaagatcatgtcattgcactccagcctaggcaacaagagcaaaactctgtctcaaaaaaaaaaaaaaaaaaattatccaggcctggtggcgggcgcctgtagtcccagctactcagaaggctgaggcaggagaatggcgtgaacccgggaggcggagcttgcagtgagccaagatcgtgccactgtactccagcctgggtgacagagtgagactccatttcaaaaaataaaaagaaaagaatagtgcaaatattatatgggtggctatggcagatgtaaaggtgattggcaattctttttctggaaaagctggcccaagggttaaaaggaagagctctggagtgaaagagactgcctttgcccttgaccttgggtaaaacttaacctcttcacatagtttcatcctttacaaaatgagaagggtgtggcaatgattaagaaaaattcagggctgggcgtggtggctcatgcttgtaatcccagcactttgagaggccgaggcgggcagatcacgaggtcaggagattgagaccatcctagctaacacggtgaaaccccatctctactaaaaatacaattagctgggcgtggtggcagrcgcctgtaatcccagctactccggagggtgaggcaggagaattgctggaacctgggaggcagagrttgcagtgagccgagatcacgccattgcacttcagcctggatgacagagtgagactctgtctcaaaaaaaaaaaaaaaagaraaagaaaaaaaaaattcaggctagggggcatgcctgttatcccagcacttgggaggccaaagtgggaggattgcttgagcccaggagttcaagaccagcctggccaacatggtgaaaccgtctctactaaaaatacacaaattagtcgggtgtggtggtgggcacctataatcccagctactcagggggctgaggcaggaggatcatttgaacccggcagaggttgcagtgagctgagatctcaccactgcactccagtcttggtgacagagcgagactccatctcaaaaaataaaattgaaaataatagtgcaaatattatatgggtggctatggcagatgtaaaggtcattgggaattctttttctacaaaactggcctaacggttaaaaggaagagctctggagtaaaaaagacccccccttgcccttgaccttgggcaaaacttaacctcttgacacagtttcatcctttacaaaatgagaagggtgtggggatgattaaggaaattcaggctaggggcagtggctcatgcctgtaatcccagcacttgggagaccaaggtgggaggattgcttgagcccagaagttcaagaccggcctgggcaacatagcgagaccccatttctacaaaaaataaattaactggtcgtggtgacatgttcttgtggtcccagctactcaggaggctgaagccggaggatcacttgagcccaggagtttgaagctacagtgagccatgcttgcaccactgcactcctacctgagcaacagagaccctgtctcaaaaaaagagagaaagaagaaaaggaaaggaaaatgctcgtagcmcctaaaacagtgctcagtaaatgtttgctgaagctgtaactatagtatgtagtagaaagtggtagttatttgaaagagagtcaaagatacgtgctctgggaattaccactaaatgaccaaaagttcacgtcaaaaaaataaaatcagatcaagttagaawtttttttttttttttttttttgagacagaatctcactcttgtcacccaggctggagtgcagtgacgctatctctgctcactgcaacctccgccttccgagttcaagcaattctcgtgcctcagcctcctgagtagctgggattacaggtgcccgtcaccacgcccagctaatttttgtagttttagtagagacagggtttcaccatgttgggcaggctggtctcgaactcctgacctcaagtgatccacccacctcagcctcccaaagttctgggattacaggtgtgagccaccgcacctggccagaaaaaattttattatgcacacaaaagaacagttggagattrgtcagatgctccagtcactgtagtgagggcagtgttaataaagcctaaggaaggattttgaccttttttgtgattggctgttatacattaacaatctgtttacagycagtagagctgttcaaactgttttgtctatagttgattcctttaattttactgaattatgctgacaaggatgtaaagctttgtgttctgtttatgattgattagagctacatttcagggaatcaggatatcttaaattccggctatgtggctgtgggcagttggccttggagtatatctaaactgtggcctccactttcatttttcttgaaacattgctatcaactgggaagagtmtgtgactttatgcccagtttcccctctcagatttttatgacggttgtttttctttttgttatgccatttgagggattgatgtttcttaaactatgaagtacttggctgtctctctccattgctgttcaggttaacagccaccatttgtaaacactttgttggagctcattccttctctgctaggaactttacaagaattgtctcaatcctaccacacctttggcaggacccttgttatcagagttttcattatccatgtatccatagttacaaggctatatagaaaagcaaaagtcatcacacaagaatcttgctaacaaactacttataaaattagtcactacttaaccatccctctgcttatccctgccagtcccattaacatgtttggtagtcaatttctggctgatgaagagatacattaagcatcaaggtaatgcaaatgtaaataaaactgactgtagactgaaatggcacatctcccaaaagttgtaggactaggcgaaaatcccctgcaagtgatgatagaaaaccttcagccttataccagttaacaannnnnnnnnnnnnnnnnnnnnnnnnnnnnnnnnnnnnnnnnnnnnnnnnnnnnnnnnnnnnnnnnnnnnnnnnnnnnnnnnnnnnnnnnnnnnnnnnnnnnnnnnnnnnnnnnnnnnnnnnnnnnnnnnnnnnnnnnnnnnnnnnnnnnnnnnnnnnnnnnnnnnnnnnnnnnnnnnnnnnnnnnnnnnnnnnnnnnnnnnnnnnnnnnnnnnnnnnnnnnnnnnnnnnnnnnnnnnnnnnnnnnnnnnnnnnnnnnnnnnnnnnnnnnnnnnnnnnnnnnnnnnnnnnnnnnnnnnnnnnnnnnnnnnnnnnnnnnnnnnnnnnnnnnnnnnnnnnnnnnnnnnnnnnnnnnnnnnnnnnnnnnnnnnnnnnnnnnnnnnnnnnnnnnnnnnnnnnnnnnnnnnnnnnnnnnnnnnnnnnnnnnnnnnnnnnnnnnnnnnnnnnnnnnnnnnnnnnnnnnnnnnnnnnnnnnnnnnnnnnnnnnnnnnnnnnnnnnnnnnnnnnnnnnnnnnnnnnnnnnnnnnnnnnnnnnnnnnnnnnnnnnnnnnnnnnnnnnnnnnnnnnnnnnnnnnnnnnnnnnnnnnnnnnnnnnnnnnnnnnnnnnnnnnnnnnnnnnnnnnnnnnnnnnnnnnnnnnnnnnnnnnnnnnnnnnnnnnnnnnnnnnnnnnnnnnnnnnnnnnnnnnnnnnnnnnnnnnnnnnnnnnnnnnnnnnnnnnnnnnnnnnnnnnnnnnnnnnnnnnnnnnnnnnnnnnnnnnnnnnnnnnnnnnnnnnnnnnnnnnnnnnnnnnnnnnnnnnnnnnnnnnnnnnnnnnnnnnnnnnnnnnnnnnnnnnnnnnnnnnnnnnnnnnnnnnnnnnnnnnnnnnnnnnnnnnnnnnnnnnnnnnnnnnnnnnnnnnnnnnnnnnnnnnnnnnnnnnnnnnnnnnnnnnnnnnnnnnnnnnnnnnnnnnnnnnnnnnnnnnnnnnnnnnnnnnnnnnnnnnnnnnnnnnnnnnnnnnnnnnnnnnnnnnnnnnnnnnnnnnnnnnnnnnnnnnnnnnnnnnnnnnnnnnnnnnnnnnnnnnnnnnnnnnnnnnnnnnnnnnnnnnnnnnnnnnnnnnnnnnnnnnnnnnnnnnnnnnnnnnnnnnnnnnnnnnnnnnnnnnnnnnnnnnnnnnnnnnnnnnnnnnnnnnnnnnnnnnnnnnnnnnnnnnnnnnnnnnnnnnnnnnnnnnnnnnnnnnnnnnnnnnnnnnnnnnnnnnnnnnnnnnnnnnnnnnnnnnnnnnnnnnnnnnnnnnnnnnnnnnnnnnnnnnnnnnnnnnnnnnnnnnnnnnnnnnnnnnnnnnnnnnnnnnnnnnnnnnnnnnnnnnnnnnnnnnnnnnnnnnnnnnnnnnnnnnnnnnnnnnnnnnnnnnnnnnnnnnnnnnnnnnnnnnnnnnnnnnnnnnnnnnnnnnnnnnnnnnnnnnnnnnnnnnnnnnnnnnnnnnnnnnnnnnnnnnnnnnnnnnnnnnnnnnnnnnnnnnnnnnnnnnnnnnnnnnnnnnnnnnnnnnnnnnnnnnnnnnnnnnnnnnnnnnnnnnnnnnnnnnnnnnnnnnnnnnnnnnnnnnnnnnnnnnnnnnnnnnnnnnnnnnnnnnnnnnnnnnnnnnnnnnnnnnnnnnnnnnnnnnnnnnnnnnnnnnnnnnnnnnnnnnnnnnnnnnnnnnnnnnnnnnnnnnnnnnnnnnnnnnnnnnnnnnnnnnnnnnnnnnnnnnnnnnnnnnnnnnnnnnnnnnnnnnnnnnnnnnnnnnnnnnnnnnnnnnnnnnnnnnnnnnnnnnnnnnnnnnnnnnnnnnnnnnnnnnnnnnnnnnnnnnnnnnnnnnnnnnnnnnnnnnnnnnnnnnnnnnnnnnnnnnnnnnnnnnnnnnnnnnnnnnnnnnnnnnnnnnnnnnnnnnnnnnnnnnnnnnnnnnnnnnnnnnnnnnnnnnnnnnnnnnnnnnnnnnnnnnnnnnnnnnnnnnnnnnnnnnnnnnnnnnnnnnnnnnnnnnnnnnnnnnnnnnnnnnnnnnnnnnnnnnnnnnnnnnnnnnnnnnnnnnnnnnnnnnnnnnnnnnnnnnnnnnnnnnnnnnnnnnnnnnnnnnnnnnnnnnnnnnnnnnnnnnnnnnnnnnnnnnnnnnnnnnnnnnnnnnnnnnnnnnnnnnnnnnnnnnnnnnnnnnnnnnnnnnnnnnnnnnnnnnnnnnnnnnnnnnnnnnnnnnnnnnnnnnnnnnnnnnnnnnnnnnnnnnnnnnnnnnnnnnnnnnnnnnnnnnnnnnnnnnnnnnnnnnnnnnnnnnnnnnnnnnnnnnnnnnnnnnnnnnnnnnnnnnnnnnnnnnnnnnnnnnnnnnnnnnnnnnnnnnnnnnnnnnnnnnnnnnnnnnnnnnnnnnnnnnnnnnnnnnnnnnnnnnnnnnnnnnnnnnnnnnnnnnnnnnnnnnnnnnnnnnnnnnnnnnnnnnnnnnnnnnnnnnnnnnnnnnnnnnnnnnnnnnnnnnnnnnnnnnnnnnnnnnnnnnnnnnnnnnnnnnnnnnnnnnnnnnnnnnnnnnnnnnnnnnnnnnnnnnnnnnnnnnnnnnnnnnnnnnnnnnnnnnnnnnnnnnnnnnnnnnnnnnnnnnnnnnnnnnnnnnnnnnnnnnnnnnnnnnnnnnnnnnnnnnnnnnnnnnnnnnnnnnnnnnnnnnnnnnnnnnnnnnnnnnnnnnnnnnnnnnnnnnnnnnnnnnnnnnnnnnnnnnnnnnnnnnnnnnnnnnnnnnnnnnnnnnnnnnnnnnnnnnnnnnnnnnnnnnnnnnnnnnnnnnnnnnnnnnnnnnnnnnnnnnnnnnnnnnnnnnnnnnnnnnnnnnnnnnnnnnnnnnnnnnnnnnnnnnnnnnnnnnnnnnnnnnnnnnnnnnnnnnnnnnnnnnnnnnnnnnnnnnnnnnnnnnnnnnnnnnnnnnnnnnnnnnnnnnnnnnnnnnnnnnnnnnnnnnnnnnnnnnnnnnnnnnnnnnnnnnnnnnnnnnnnnnnnnnnnnnnnnnnnnnnnnnnnnnnnnnnnnnnnnnnnnnnnnnnnnnnnnnnnnnnnnnnnnnnnnnnnnnnnnnnnnnnnnnnnnnnnnnnnnnnnnnnnnnnnnnnnnnnnnnnnnnnnnnnnnnnnnnnnnnnnnnnnnnnnnnnnnnnnnnnnnnnnnnnnnnnnnnnnnnnnnnnnnnnnnnnnnnnnnnnnnnnnnnnnnnnnnnnnnnnnnnnnnnnnnnnnnnnnnnnnnnnnnnnnnnnnnnnnnnnnnnnnnnnnnnnnnnnnnnnnnnnnnnnnnnnnnnnnnnnnnnnnnnnnnnnnnnnnnnnnnnnnnnnnnnnnnnnnnnnnnnnnnnnnnnnnnnnnnnnnnnnnnnnnnnnnnnnnnnnnnnnnnnnnnnnnnnnnnnnnnnnnnnnnnnnnnnnnnnnnnnnnnnnnnnnnnnnnnnnnnnnnnnnnnnnnnnnnnnnnnnnnnnnnnnnnnnnnnnnnnnnnnnnnnnnnnnnnnnnnnnnnnnnnnnnnnnnnnnnnnnnnnnnnnnnnnnnnnnnnnnnnnnnnnnnnnnnnnnnnnnnnnnnnnnnnnnnnnnnnnnnnnnnnnnnnnnnnnnnnnnnnnnnnnnnnnnnnnnnnnnnnnnnnnnnnnnnnnnnnnnnnnnnnnnnnnnnnnnnnnnnnnnnnnnnnnnnnnnnnnnnnnnnnnnnnnnnnnnnnnnnnnnnnnnnnnnnnnnnnnnnnnnnnnnnnnnnnnnnnnnnnnnnnnnnnnnnnnnnnnnnnnnnnnnnnnnnnnnnnnnnnnnnnnnnnnnnnnnnnnnnnnnnnnnnnnnnnnnnnnnnnnnnnnnnnnnnnnnnnnnnnnnnnnnnnnnnnnnnnnnnnnnnnnnnnnnnnnnnnnnnnnnnnnnnnnnnnnnnnnnnnnnnnnnnnnnnnnnnnnnnnnnnnnnnnnnnnnnnnnnnnnnnnnnnnnnnnnnnnnnnnnnnnnnnnnnnnnnnnnnnnnnnnnnnnnnnnnnnnnnnnnnnnnnnnnnnnnnnnnnnnnnnnnnnnnnnnnnnnnnnnnnnnnnnnnnnnnnnnnnnnnnnnnnnnnnnnnnnnnnnnnnnnnnnnnnnnnnnnnnnnnnnnnnnnnnnnnnnnnnnnnnnnnnnnnnnnnnnnnnnnnnnnnnnnnnnnnnnnnnnnnnnnnnnnnnnnnnnnnnnnnnnnnnnnnnnnnnnnnnnnnnnnnnnnnnnnnnnnnnnnnnnnnnnnnnnnnnnnnnnnnnnnnnnnnnnnnnnnnnnnnnnnnnnnnnnnnnnnnnnnnnnnnnnnnnnnnnnnnnnnnnnnnnnnnnnnnnnnnnnnnnnnnnnnnnnnnnnnnnnnnnnnnnnnnnnnnnnnnnnnnnnnnnnnnnnnnnnnnnnnnnnnnnnnnnnnnnnnnnnnnnnnnnnnnnnnnnnnnnnnnnnnnnnnnnnnnnnnnnnnnnnnnnnnnnnnnnnnnnnnnnnnnnnnnnnnnnnnnnnnnnnnnnnnnnnnnnnnnnnnnnnnnnnnnnnnnnnnnnnnnnnnnnnnnnnnnnnnnnnnnnnnnnnnnnnnnnnnnnnnnnnnnnnnnnnnnnnnnnnnnnnnnnnnnnnnnnnnnnnnnnnnnnnnnnnnnnnnnnnnnnnnnnnnnnnnnnnnnnnnnnnnnnnnnnnnnnnnnnnnnnnnnnnnnnnnnnnnnnnnnnnnnnnnnnnnnnnnnnnnnnnnnnnnnnnnnnnnnnnnnnnnnnnnnnnnnnnnnnnnnnnnnnnnnnnnnnnnnnnnnnnnnnnnnnnnnnnnnnnnnnnnnnnnnnnnnnnnnnnnnnnnnnnnnnnnnnnnnnnnnnnnnnnnnnnnnnnnnnnnnnnnnnnnnnnnnnnnnnnnnnnnnnnnnnnnnnnnnnnnnnnnnnnnnnnnnnnnnnnnnnnnnnnnnnnnnnnnnnnnnnnnnnnnnnnnnnnnnnnnnnnnnnnnnnnnnnnnnnnnnnnnnnnnnnnnnnnnnnnnnnnnnnnnnnnnnnnnnnnnnnnnnnnnnnnnnnnnnnnnnnnnnnnnnnnnnnnnnnnnnnnnnnnnnnnnnnnnnnnnnnnnnnnnnnnnnnnnnnnnnnnnnnnnnnnnnnnnnnnnnnnnnnnnnnnnnnnnnnnnnnnnnnnnnnnnnnnnnnnnnnnnnnnnnnnnnnnnnnnnnnnnnnnnnnnnnnnnnnnnnnnnnnnnnnnnnnnnnnnnnnnnnnnnnnnnnnnnnnnnnnnnnnnnnnnnnnnnnnnnnnnnnnnnnnnnnnnnnnnnnnnnnnnnnnnnnnnnnnnnnnnnnnnnnnnnnnnnnnnnnnnnnnnnnnnnnnnnnnnnnnnnnnnnnnnnnnnnnnnnnnnnnnnnnnnnnnnnnnnnnnnnnnnnnnnnnnnnnnnnnnnnnnnnnnnnnnnnnnnnnnnnnnnnnnnnnnnnnnnnnnnnnnnnnnnnnnnnnnnnnnnnnnnnnnnnnnnnnnnnnnnnnnnnnnnnnnnnnnnnnnnnnnnnnnnnnnnnnnnnnnnnnnnnnnnnnnnnnnnnnnnnnnnnnnnnnnnnnnnnnnnnnnnnnnnnnnnnnnnnnnnnnnnnnnnnnnnnnnnnnnnnnnnnnnnnnnnnnnnnnnnnnnnnnnnnnnnnnnnnnnnnnnnnnnnnnnnnnnnnnnnnnnnnnnnnnnnnnnnnnnnnnnnnnnnnnnnnnnnnnnnnnnnnnnnnnnnnnnnnnnnnnnnnnnnnnnnnnnnnnnnnnnnnnnnnnnnnnnnnnnnnnnnnnnnnnnnnnnnnnnnnnnnnnnnnnnnnnnnnnnnnnnnnnnnnnnnnnnnnnnnnnnnnnnnnnnnnnnnnnnnnnnnnnnnnnnnnnnnnnnnnnnnnnnnnnnnnnnnnnnnnnnnnnnnnnnnnnnnnnnnnnnnnnnnnnnnnnnnnnnnnnnnnnnnnnnnnnnnnnnnnnnnnnnnnnnnnnnnnnnnnnnnnnnnnnnnnnnnnnnnnnnnnnnnnnnnnnnnnnnnnnnnnnnnnnnnnnnnnnnnnnnnnnnnnnnnnnnnnnnnnnnnnnnnnnnnnnnnnnnnnnnnnnnnnnnnnnnnnnnnnnnnnnnnnnnnnnnnnnnnnnnnnnnnnnnnnnnnnnnnnnnnnnnnnnnnnnnnnnnnnnnnnnnnnnnnnnnnnnnnnnnnnnnnnnnnnnnnnnnnnnnnnnnnnnnnnnnnnnnnnnnnnnnnnnnnnnnnnnnnnnnnnnnnnnnnnnnnnnnnnnnnnnnnnnnnnnnnnnnnnnnnnnnnnnnnnnnnnnnnnnnnnnnnnnnnnnnnnnnnnnnnnnnnnnnnnnnnnnnnnnnnnnnnnnnnnnnnnnnnnnnnnnnnnnnnnnnnnnnnnnnnnnnnnnnnnnnnnnnnnnnnnnnnnnnnnnnnnnnnnnnnnnnnnnnnnnnnnnnnnnnnnnnnnnnnnnnnnnnnnnnnnnnnnnnnnnnnnnnnnnnnnnnnnnnnnnnnnnnnnnnnnnnnnnnnnnnnnnnnnnnnnnnnnnnnnnnnnnnnnnnnnnnnnnnnnnnnnnnnnnnnnnnnnnnnnnnnnnnnnnnnnnnnnnnnnnnnnnnnnnnnnnnnnnnnnnnnnnnnnnnnnnnnnnnnnnnnnnnnnnnnnnnnnnnnnnnnnnnnnnnnnnnnnnnnnnnnnnnnnnnnnnnnnnnnnnnnnnnnnnnnnnnnnnnnnnnnnnnnnnnnnnnnnnnnnnnnnnnnnnnnnnnnnnnnnnnnnnnnnnnnnnnnnnnnnnnnnnnnnnnnnnnnnnnnnnnnnnnnnnnnnnnnnnnnnnnnnnnnnnnnnnnnnnnnnnnnnnnnnnnnnnnnnnnnnnnnnnnnnnnnnnnnnnnnnnnnnnnnnnnnnnnnnnnnnnnnnnnnnnnnnnnnnnnnnnnnnnnnnnnnnnnnnnnnnnnnnnnnnnnnnnnnnnnnnnnnnnnnnnnnnnnnnnnnnnnnnnnnnnnnnnnnnnnnnnnnnnnnnnnnnnnnnnnnnnnnnnnnnnnnnnnnnnnnnnnnnnnnnnnnnnnnnnnnnnnnnnnnnnnnnnnnnnnnnnnnnnnnnnnnnnnnnnnnnnnnnnnnnnnnnnnnnnnnnnnnnnnnnnnnnnnnnnnnnnnnnnnnnnnnnnnnnnnnnnnnnnnnnnnnnnnnnnnnnnnnnnnnnnnnnnnnnnnnnnnnnnnnnnnnnnnnnnnnnnnnnnnnnnnnnnnnnnnnnnnnnnnnnnnnnnnnnnnnnnnnnnnnnnnnnnnnnnnnnnnnnnnnnnnnnnnnnnnnnnnnnnnnnnnnnnnnnnnnnnnnnnnnnnnnnnnnnnnnnnnnnnnnnnnnnnnnnnnnnnnnnnnnnnnnnnnnnnnnnnnnnnnnnnnnnnnnnnnnnnnnnnnnnnnnnnnnnnnnnnnnnnnnnnnnnnnnnnnnnnnnnnnnnnnnnnnnnnnnnnnnnnnnnnnnnnnnnnnnnnnnnnnnnnnnnnnnnnnnnnnnnnnnnnnnnnnnnnnnnnnnnnnnnnnnnnnnnnnnnnnnnnnnnnnnnnnnnnnnnnnnnnnnnnnnnnnnnnnnnnnnnnnnnnnnnnnnnnnnnnnnnnnnnnnnnnnnnnnnnnnnnnnnnnnnnnnnnnnnnnnnnnnnnnnnnnnnnnnnnnnnnnnnnnnnnnnnnnnnnnnnnnnnnnnnnnnnnnnnnnnnnnnnnnnnnnnnnnnnnnnnnnnnnnnnnnnnnnnnnnnnnnnnnnnnnnnnnnnnnnnnnnnnnnnnnnnnnnnnnnnnnnnnnnnnnnnnnnnnnnnnnnnnnnnnnnnnnnnnnnnnnnnnnnnnnnnnnnnnnnnnnnnnnnnnnnnnnnnnnnnnnnnnnnnnnnnnnnnnnnnnnnnnnnnnnnnnnnnnnnnnnnnnnnnnnnnnnnnnnnnnnnnnnnnnnnnnnnnnnnnnnnnnnnnnnnnnnnnnnnnnnnnnnnnnnnnnnnnnnnnnnnnnnnnnnnnnnnnnnnnnnnnnnnnnnnnnnnnnnnnnnnnnnnnnnnnnnnnnnnnnnnnnnnnnnnnnnnnnnnnnnnnnnnnnnnnnnnnnnnnnnnnnnnnnnnnnnnnnnnnnnnnnnnnnnnnnnnnnnnnnnnnnnnnnnnnnnnnnnnnnnnnnnnnnnnnnnnnnnnnnnnnnnnnnnnnnnnnnnnnnnnnnnnnnnnnnnnnnnnnnnnnnnnnnnnnnnnnnnnnnnnnnnnnnnnnnnnnnnnnnnnnnnnnnnnnnnnnnnnnnnnnnnnnnnnnnnnnnnnnnnnnnnnnnnnnnnnnnnnnnnnnnnnnnnnnnnnnnnnnnnnnnnnnnnnnnnnnnnnnnnnnnnnnnnnnnnnnnnnnnnnnnnnnnnnnnnnnnnnnnnnnnnnnnnnnnnnnnnnnnnnnnnnnnnnnnnnnnnnnnnnnnnnnnnnnnnnnnnnnnnnnnnnnnnnnnnnnnnnnnnnnnnnnnnnnnnnnnnnnnnnnnnnnnnnnnnnnnnnnnnnnnnnnnnnnnnnnnnnnnnnnnnnnnnnnnnnnnnnnnnnnnnnnnnnnnnnnnnnnnnnnnnnnnnnnnnnnnnnnnnnnnnnnnnnnnnnnnnnnnnnnnnnnnnnnnnnnnnnnnnnnnnnnnnnnnnnnnnnnnnnnnnnnnnnnnnnnnnnnnnnnnnnnnnnnnnnnnnnnnnnnnnnnnnnnnnnnnnnnnnnnnnnnnnnnnnnnnnnnnnnnnnnnnnnnnnnnnnnnnnnnnnnnnnnnnnnnnnnnnnnnnnnnnnnnnnnnnnnnnnnnnnnnnnnnnnnnnnnnnnnnnnnnnnnnnnnnnnnnnnnnnnnnnnnnnnnnnnnnnnnnnnnnnnnnnnnnnnnnnnnnnnnnnnnnnnnnnnnnnnnnnnnnnnnnnnnnnnnnnnnnnnnnnnnnnnnnnnnnnnnnnnnnnnnnnnnnnnnnnnnnnnnnnnnnnnnnnnnnnnnnnnnnnnnnnnnnnnnnnnnnnnnnnnnnnnnnnnnnnnnnnnnnnnnnnnnnnnnnnnnnnnnnnnnnnnnnnnnnnnnnnnnnnnnnnnnnnnnnnnnnnnnnnnnnnnnnnnnnnnnnnnnnnnnnnnnnnnnnnnnnnnnnnnnnnnnnnnnnnnnnnnnnnnnnnnnnnnnnnnnnnnnnnnnnnnnnnnnnnnnnnnnnnnnnnnnnnnnnnnnnnnnnnnnnnnnnnnnnnnnnnnnnnnnnnnnnnnnnnnnnnnnnnnnnnnnnnnnnnnnnnnnnnnnnnnnnnnnnnnnnnnnnnnnnnnnnnnnnnnnnnnnnnnnnnnnnnnnnnnnnnnnnnnnnnnnnnnnnnnnnnnnnnnnnnnnnnnnnnnnnnnnnnnnnnnnnnnnnnnnnnnnnnnnnnnnnnnnnnnnnnnnnnnnnnnnnnnnnnnnnnnnnnnnnnnnnnnnnnnnnnnnnnnnnnnnnnnnnnnnnnnnnnnnnnnnnnnnnnnnnnnnnnnnnnnnnnnnnnnnnnnnnnnnnnnnnnnnnnnnnnnnnnnnnnnnnnnnnnnnnnnnnnnnnnnnnnnnnnnnnnnnnnnnnnnnnnnnnnnnnnnnnnnnnnnnnnnnnnnnnnnnnnnnnnnnnnnnnnnnnnnnnnnnnnnnnnnnnnnnnnnnnnnnnnnnnnnnnnnnnnnnnnnnnnnnnnnnnnnnnnnnnnnnnnnnnnnnnnnnnnnnnnnnnnnnnnnnnnnnnnnnnnnnnnnnnnnnnnnnnnnnnnnnnnnnnnnnnnnnnnnnnnnnnnnnnnnnnnnnnnnnnnnnnnnnnnnnnnnnnnnnnnnnnnnnnnnnnnnnnnnnnnnnnnnnnnnnnnnnnnnnnnnnnnnnnnnnnnnnnnnnnnnnnnnnnnnnnnnnnnnnnnnnnnnnnnnnnnnnnnnnnnnnnnnnnnnnnnnnnnnnnnnnnnnnnnnnnnnnnnnnnnnnnnnnnnnnnnnnnnnnnnnnnnnnnnnnnnnnnnnnnnnnnnnnnnnnnnnnnnnnnnnnnnnnnnnnnnnnnnnnnnnnnnnnnnnnnnnnnnnnnnnnnnnnnnnnnnnnnnnnnnnnnnnnnnnnnnnnnnnnnnnnnnnnnnnnnnnnnnnnnnnnnnnnnnnnnnnnnnnnnnnnnnnnnnnnnnnnnnnnnnnnnnnnnnnnnnnnnnnnnnnnnnnnnnnnnnnnnnnnnnnnnnnnnnnnnnnnnnnnnnnnnnnnnnnnnnnnnnnnnnnnnnnnnnnnnnnnnnnnnnnnnnnnnnnnnnnnnnnnnnnnnnnnnnnnnnnnnnnnnnnnnnnnnnnnnnnnnnnnnnnnnnnnnnnnnnnnnnnnnnnnnnnnnnnnnnnnnnnnnnnnnnnnnnnnnnnnnnnnnnnnnnnnnnnnnnnnnnnnnnnnnnnnnnnnnnnnnnnnnnnnnnnnnnnnnnnnnnnnnnnnnnnnnnnnnnnnnnnnnnnnnnnnnnnnnnnnnnnnnnnnnnnnnnnnnnnnnnnnnnnnnnnnnnnnnnnnnnnnnnnnnnnnnnnnnnnnnnnnnnnnnnnnnnnnnnnnnnnnnnnnnnnnnnnnnnnnnnnnnnnnnnnnnnnnnnnnnnnnnnnnnnnnnnnnnnnnnnnnnnnnnnnnnnnnnnnnnnnnnnnnnnnnnnnnnnnnnnnnnnnnnnnnnnnnnnnnnnnnnnnnnnnnnnnnnnnnnnnnnnnnnnnnnnnnnnnnnnnnnnnnnnnnnnnnnnnnnnnnnnnnnnnnnnnnnnnnnnnnnnnnnnnnnnnnnnnnnnnnnnnnnnnnnnnnnnnnnnnnnnnnnnnnnnnnnnnnnnnnnnnnnnnnnnnnnnnnnnnnnnnnnnnnnnnnnnnnnnnnnnnnnnnnnnnnnnnnnnnnnnnnnnnnnnnnnnnnnnnnnnnnnnnnnnnnnnnnnnnnnnnnnnnnnnnnnnnnnnnnnnnnnnnnnnnnnnnnnnnnnnnnnnnnnnnnnnnnnnnnnnnnnnnnnnnnnnnnnnnnnnnnnnnnnnnnnnnnnnnnnnnnnnnnnnnnnnnnnnnnnnnnnnnnnnnnnnnnnnnnnnnnnnnnnnnnnnnnnnnnnnnnnnnnnnnnnnnnnnnnnnnnnnnnnnnnnnnnnnnnnnnnnnnnnnnnnnnnnnnnnnnnnnnnnnnnnnnnnnnnnnnnnnnnnnnnnnnnnnnnnnnnnnnnnnnnnnnnnnnnnnnnnnnnnnnnnnnnnnnnnnnnnnnnnnnnnnnnnnnnnnnnnnnnnnnnnnnnnnnnnnnnnnnnnnnnnnnnnnnnnnnnnnnnnnnnnnnnnnnnnnnnnnnnnnnnnnnnnnnnnnnnnnnnnnnnnnnnnnnnnnnnnnnnnnnnnnnnnnnnnnnnnnnnnnnnnnnnnnnnnnnnnnnnnnnnnnnnnnnnnnnnnnnnnnnnnnnnnnnnnnnnnnnnnnnnnnnnnnnnnnnnnnnnnnnnnnnnnnnnnnnnnnnnnnnnnnnnnnnnnnnnnnnnnnnnnnnnnnnnnnnnnnnnnnnnnnnnnnnnnnnnnnnnnnnnnnnnnnnnnnnnnnnnnnnnnnnnnnnnnnnnnnnnnnnnnnnnnnnnnnnnnnnnnnnnnnnnnnnnnnnnnnnnnnnnnnnnnnnnnnnnnnnnnnnnnnnnnnnnnnnnnnnnnnnnnnnnnnnnnnnnnnnnnnnnnnnnnnnnnnnnnnnnnnnnnnnnnnnnnnnnnnnnnnnnnnnnnnnnnnnnnnnnnnnnnnnnnnnnnnnnnnnnnnnnnnnnnnnnnnnnnnnnnnnnnnnnnnnnnnnnnnnnnnnnnnnnnnnnnnnnnnnnnnnnnnnnnnnnnnnnnnnnnnnnnnnnnnnnnnnnnnnnnnnnnnnnnnnnnnnnnnnnnnnnnnnnnnnnnnnnnnnnnnnnnnnnnnnnnnnnnnnnnnnnnnnnnnnnnnnnnnnnnnnnnnnnnnnnnnnnnnnnnnnnnnnnnnnnnnnnnnnnnnnnnnnnnnnnnnnnnnnnnnnnnnnnnnnnnnnnnnnnnnnnnnnnnnnnnnnnnnnnnnnnnnnnnnnnnnnnnnnnnnnnnnnnnnnnnnnnnnnnnnnnnnnnnnnnnnnnnnnnnnnnnnnnnnnnnnnnnnnnnnnnnnnnnnnnnnnnnnnnnnnnnnnnnnnnnnnnnnnnnnnnnnnnnnnntctactaaaaaacaaacattagccaggcgtggtggcgcacctgtaatcccagcttcttgggaggctgaggcaggagaatcgcttgaacccaggaggcggaggttgcagtgagcctagatcgtgccaccgcactccagcctgggtgacagagtgagactctatctcaagcaaaaaacaacaacaaaaaaaaaagaaaagaaaattaagtattaacaacctaatggggttgtggagccaaatagaacctgatgcctcacattcaaggatttggcaatctgcgtcttaatttgcctccttcctacaactaagccttcaaggttgatttcaggtttccttatattctagcgggaagaggccaaatagactggagggtgtgggggaaaaacctgaatcttagacttgactgccagcaacttgctggggaactgtgggcaatttctttgacctcagtttcctctgtaaaaattagcatgttggcctgttctaatcccagatttcccctctaggtttacataagcacctttttgttttttgttttttgttttgagatggagtttcgctcttgttgcttgttgcccaggctagagtgcaatggcagaatctcggctcactgcaacctctgcctactgggttcaagcgattctgcctcagcctcttgagtagctgggattataagcatgtgccaccacgcctgcctaattttttgtatttagagatggggtttcaccatgttggtcgggctggtcttaaactcccgatctcaggcaatccacctgcctcagcctctcaaagtgctgggattaaagggatgacctactgcacccagcccaataacattttcgatgcgtaagtaccaacactgatttgatgttgctagttggtmatcttaatcctccaaggcctggtaaacacccagttttctaagtctgccatcttcaagggaactgaggacaagagaccagttagtaggcccttgcactactgtagtaggaccctaaataagtcatggcatcattctgtagaatactggagggggttgggctagagaatgccaagttttggcttgtttaaggggatctggatttcctcagctctaaaagttgggctcctgatccccgaaggaggagtagaatttgagacctggaactcagtttccccataaggtagaatatgcgttatgactatatatgcactgtttcctaaattccaggggctttagagtttcacacacacacacacaacaaaacaaaacccgcggtggctcacgcctgtaatcccagcactttgggaggctgaggtgggcgaatcacgaggccaggagttcgagaccagcctggccaacagggtgaaaccccgtctctactaaaaatacaaaaaattaactgggcgtggtggcgggtgcctgtaatcccagctactcaggaggctgaggcaggagaatcatcgcttgaacctgggaggcggaggttgctgtgagtcgagatcttgccactgcactccatcccaggcgacagtgcgagactccatctcaaaaaaagaaaaagaaaaaaaatatatataactgctatttattttccttttcattttctgcttttgagggagtttccatagtaacgtgtccttccagtcgcctagcctgaagggaagccccggagctccagcttcaaggctcagctctcccagatgcaagtatctttacctccagccagctccttgtaaccytggcaacacggcccgcccrcgaatygtcacgctacgattggtccgtggygctaaagcctgaaagcgaattcctcagacattggtccgagtcactgcgatgctgacgctgtggttggtgagtttggatgtcagtcagagtcggaggcagggtcaaatagggagaaatggcgacggagcctggctgtgggtgagtgcttcctgaaggggtgaaagtgtgagacagcggatcaccgcagttagccgtcacacagctcccaaagggatgggagggaggttttcttctcatccggctccagctggactctgggaatgtcagacatccacatctcccacccaggttagaggtgagaggtcaaaggccgtattccctctgttggtttttggaccccaggtactgtggacagcagtcaggatcccgaaccaaagactcaactttcagctacttacagagtaatggtgggcaagtcacttagcttctttgagccttagtttatcatctgtaaaatgaggacagtaactcggtctggggccaaatagaggaaacaatggaatagagtattgctgctaaaagagggatatagtagaggcaggagaagctatgcacatttgttagccatattttatggtggaagggattgaggctcagagagggtcattgacttgcccaagataacacagcaagtttggagcaattgcagttctcttatacataccaggaccaaaggaaagaatggatgccaatcagtcatttataaatataaaatcgtatttttattttattttattttttgagacagagtttcactctgtcacccagagctggagtgcagtggcgcaatctcggctcactgcaacctcagcctcctgggttcaagcaggtctcctgcctcagcctcccgagtagctgagactacaggcatgggccaccatacccggctaattctttttgtatttttagtagagacgggttttcaccatgttggccaggctggtctcgaactcccaacctcaagttatctgcccaccttggcctcccaaagtactgggattacaggtgtgagccactgcacctggctagaatgctatttttttaaaaggccrtatgcagctctggccatacctatttaaatcccctggaaccatatctttccatagctaacttcttatcatttagatttcagctccaatgtcatccttctcccctgagaggccttccattaccactttaactaaagtatccctcccttccccagcttactctctgacatgttactcaggtttatggtctttgtaagcttcattattggatatatatttgcttatttgtttacatgtttattgtgtatcttcccctagaacagtgctgacatatagtaagtgttcaacaaataytgtgtggatgaataattgaagagccaggtccctgctgtctccttaaacctctgttactctccataggcccatctttggaaaaaagatctgggaatgattgtctagcctccagcctcaacttacttgatgcttgagagactcaaagcccygtrgtcagctgccctgcaaagaaagtattttgaccttggcatttggacagctcccatctctcccatggccctgacaatgctgaatgggctcctgattaaggactcaagcccacctatgctgctgcaccaggttaacaagactgcccagttagataccttcaactaccagagctgctttatgcaaagtgtctttgaccatttccctgagatcttatttatccaccggacctataacccaaggggtaaggtcttatataccttcctggtggatggacctcrggtgcagctggagggtcatcttgcccgagcagtctactttgccatccctgccaaggaggacactgaaggcctggcccagatgttccaagtattyaagaagtttaatccagcatgggagagagtctgtaccatcctggtggatcctcatttccttccactgcctatcctagctatggagttccccacagctgaggtccttctctcagccttccacatttgtaagttcctccaggccaagttctatcagctgtcccttgaacrgcccgtggaaaggctgctcctgacctccctgcagagcacaatgtgctcagccacagcaggcaacctgagaaagttgtatacactcctgagcaactgcatccctccagccaagctgcccgagcttcactcacactggctgctcaacgaccgcatctggctggctcaccgctggagaagccgagctgagagcagccactacttccagagcctcgaggtcaccacccacatcctcagccagttctttggtaccaccccatctgagaaacaaggtatggcttctctgttccgttacatgcagcagaactctgcagacaaggcaaacttcaaccagggcctgtgtgcccagaacaatcatgctccctcagacaccatccccgaaagccccaaactggagcagctggtagaatcccacatccagcactccctcaatgccatctgcacagggccagcagcccaactgtgcctgggcgagcttgctgtggtccagaaatccacacacctcattggctctggctcagaaaagatgaacatacagatcctggaagatacccataaggtgcagccccagccccctgccagctgcagctgctactttaaccaggccttccacctgccctgccgccacatcctagccatgctcagtgcccgccgccaggtgctccagcccgacatgctgccggctcagtggacggcaggctgtgctaccagtctagacagcatcctgggcagcaagtggagtgagaccctggataagcacctggcagtgactcacctcaccgaggaggtgggtcagctgttgcagcactgcaccaaggaggagtttgagcggaggtatagcaccctkcgggaactggccgacagctggattgggccttatgagcaggtccaactctgattattctcgatgcccagagatgctcatgcacctgtgcacactcacatccacccatacacacacacacacacacacacacacacacacactcccttacacttgtacttccgtgggccctccttccagaacaaggacaacaaggacaaggttgaagggtcttctcatctaccatggcctgctacctagcatgtgtctagctcaatgagacaggagtcagcaaatcttaatctgtttagtttactcaggtggccacatacagtctctgttgtatattcttggttttgttttaatattttttttcttttttctttttttttttttttttgagaaggagtctgtctccgtcacccaggctggagtgcagtggcgcaatctctgctcactgcaagctccacctcctgggttcacaccattctcctgcctcagcctcccgagtatctgggactacaggcgcccgccacaatgccgggctaattttttgtatttttagtagagacggggtttcaccgtgttagccaggatggtctcgatctcctgacttcgtgatctgcccgcctcggcctcccaaagtgctgggattacaggcgtgagccatcgcacccggcctgttttaacattttcataaggtaaaaacctttcttagctcaaaggtctttaaaaaagcaggcaatccagctgggcatggtggctcacgcctgtaatcccagcattttgggaggctgaggtggacagatgacttgaggtcaggagttcaagaccagcctggccaacatagtgaaaccctgtctctactaaaaatacacaaattagccaggtgtggtggcgggggccctgtaatcccagctactcgggaggctgaggcaggagaatcgcttgaacctgggaggcagaggttgcagtaggccaagatcctgctgccactgcactccagcctgggagggtgagactccatctaaaaaaaataaaataaatggcaacccctggtctaagataagagataaaacatcaggtggtgaggttgaggtttggggcttggtagcagttgccccagtcatgagatgactcacttaacccgtctcctttaagtgagctgggctgggaggcttcctacaggggaagaggcccctctggggagctgactcagccaggctccctgaacttttttccttgtcccatcctggggtcaataaaactgaatgttgcatattctagcacttgtctagttttttttttgttccatagaaggcagtttagggtatatcatggagagaatagactttagagtgttatacaacatgtgaatcctggttggttccttccctgcttgatttttgtgcctggttctgccttttactagctatgagacttattaggataagttacccctctaaacctcaacctgattatctgtaaaaatggggatctccacagggtatgttcacagagcaggcatacctagtgggtgctcaattaagtattaattttccttccttgcctatggtcctatgacctgccttcaacatgctgggaaatttaaggcaagaggagaattcaaatacctaggacttaatataagaaattctggccaggcatggtggctcacacctgtaatcccagcactttgggaggccgaggcaggcggatcacctgaggtcgggagtttgagaccagcctgaccaacatggtgaaaccgtgtctctactaaaaatacaaaaattagccgggcgtagtggcaggcacctgtaatcccagctattcgggaagctgaggcaggagaatcacttgaacctgggagacggaggttgcagtgagccaagatcatgccattgcactccagcctaggtgacagagcaagactctgtctaaaagataaaaattaaaaaaaaaaaattctgggtaggccaggtacggcgtctcacgcctctaatcccaacaccttgggaggccaaaacaggcagattggagcagcctgggcaacatggcaaaaccccttctgtacaaaaaatacaaaaattagctggatgtagcacgtgcctgtagtcccagctactcaggaaggctgaggtaggaagatcacttgaccccaggaggttgaggctgcagtgagctgtgattgtgccactgcactccagcattggtgacacagtgagaccctatctcaaaaaaaaaaaaaattctgatcaagtcttcaaaacaacataaaagcagccttaactctccaagcaggggcccctacctcagataatttccattgtatctacctgacaaaacctatctcctgtcttagtggtatctggagaaactttagggtctggaagtccctgatgaaggactggaatttgtcagaatggctcaaccaccagccctatccccatccctgccataggccctcctcccaaccctgtctgcccaagaaccatacggagaaaccaccctacatatctggtgctatttcatccatctacaagcaggagccaggaggctggccccttttagatctcactaggggcatcttcccagaggctgtgtgggcatgtgcctgctcccaccgcgccccctccacagcaccctctggctccggatgggccatcatgaaagcttgagcggcccagatcaggtcctcttcccgaactcctgggacgggcacggtggggatgccagcgatcatcatggcgagggtgaggatgcagatatcaggctgggagctggcctccttccccactgcctcagagggtaccggtagaacccgtggtgacagcccacacagcatcaggggcctaggcctgctggggccacccaggtcaggggctctgcttctggagtagccattgtcccagcccaagctctccagctgcctcacatgcgggaatttgtggcagtttcggctgtattccttccgtagtgtctcccagctagtccccccagggcagcccctggcttgtggcattgccagggctgggccccaggcctgggcagcaggtgccacctgctcagctttctggctcagtgggcctgttccaccagaggccaccaccactggctctacaggactacagaggccaagggacaagcctggagaagcagccccacctgcagagacaggaatgaaatggaacgttattctcagttctttgaggagggggccctgaggggcagggcatgggagcagagcttgggggcgtaactaagaccagccccagcggactgtctagaggttgggaactaggtgttactcatatccacactcccagtccccaacacggagtaggtgatggagaagcgtttgttgaattaatgaatagtgagcaagcgggtagttattgattggcaaggatgtttggaatggcttttcttctaaaagaattgattctagggccagcccccaaatgcccagcagaaccgccacctccccagagccagaaagcaacttctcaggggaagctgccgcactccctccaattgcaggtgccccccgctcaccttggccggaaggcagaggacctggatgagtttgtggagtcctgaagtaggacatggcttccccaaagccccggtttgtgagggaatagtgatctgccgcctgtcctcccttcttcacccttctagaatgtcacctcatagaccctccccttcacacttggaatccactttacagcgttgacctattcattctagaacctggacatgacaataggatgaggttaaaagagcaccagaccaggagctgggtgttctaggttcttgccctaaccttgaacgagtcacccagatagttttgttccttgatatccttatctgtaaagtgtgtctgatgactgcccactacctcattaggagttttgaggatgaaatgagatcatttgtatggaagcagatgaccagagatggaaacacaggagccaagtgcttcgtgccttgtagagtaagacttcgggtcagacccagtattggtatttttctttttctttttttgagacagagtctcactttgtcgccatgactggaaggctggagtgcaggagcaagacctcagctcactgcaacctctgcctcctgggttcatgcaattctcctgcctcagcctcccgagtagctgggactacaggaacctgccaccacacctggctaacttttgtatttttagtagagacagggtttcaccatgttggccaggctggtctcaaactcctgacctcaagtgatctgcccacctcggcctcccaaagtgctgggattacaggccaggtattggtatttttcaaaattcctcaagtgattataatatatgacaaagttggaaccttttttctagggacatacttctcaaccctggctgtacatgagaatctcttgagaagcttttacaaaacacaatgtctaggcctaatttcccaacaaatcaaatacgaatccctagggatgggatgtgggacaccagcactctttacatatcctaagatgactctaacaagcagccagcctagggacccctgctcttttgctccgacctgctgacctgcagtgattctaaacgaagtgactctcataggctgtaggggcaaggagaccttccagtgatcaagatgtcagcatcggctgtttatttctggtcttggctggcagcaatgtggccaacttcggaccagccagccacaggtctggggccccaggatgcagctgtgctctggtgcactgtgggtcttcactcatacttgcagaaatccttaagttctttgggcaggtggagcccatcaatggccagccggtgcaccatgctcctttgtatcactaggcggcacagagtctgcagggatggcactgtgggaagaagactgtgaaaggcaaactgaactggagggtgggtctgaggccaagatccagaaggtctaggtcatggtccccactttgtcattaaatgtgggcaagtccttactgctctctgggcccagcctgcttcatggggctgagagaagcacctcttcctgagagctgccacaaagctgcagccctgtttatatcataacacttagcacaatcccttccccattcacttagcagcttctgggggcaggggtagtgtctgatttgcctgtgcaactgaagcctccagcacaggcctggcacaaagagggttctggtgcattgagttcatgaaatgtgatgagaggtataactgcaatgcttaccagggctataatgaatcatactcagcattaagaagctctcagtctggggtttgttatgcctcgaagccaatagccaatatgcccaagtctatgagcatgtttctttcttttctttctttttttttttttatttaaagagagagggtcttgctctgtcacccaggctgaagtgcagtgctcagtgaactgcagccttcaattcttgggctcaagcgatcctcctgccttagcctcccaaatagctgggactacaggcatgcaccaccatgcccagataattatttaattttttgtacagatggggtctcactttgttgcccaggcttgagctagctagcttgcttgcttgcttgctttctctctcttcctctctctctctctttctttcttttttttttcagagtcttgctctgttgcctaggctggagtgcactggtgagatctcggctcattgcaacctccacctctcgggttcaagtgactctcctgcctcagccttctgaatagctgggattattggcacatgccaccacacccagctactttttgtatttttagtagagacaggctttcaccatgttggccaggctggtctcgaactcctggcctcaagtgatctgcctgcctccccctcccaaagtgctgggattacaggtgtgagccactgtgcccggccaagcatgtttctaagaaaagggcaaacaattctcaaagaggcccctaatatctaaaattggtttagaatccctgccctaggtgaatacaggaaacactatcaaaactaaaagggaacttgtagggcatcttaatcaatcaaccaagataggtaccaaggcccaaaaccatgtagaggcttgtgcaagatcacaagcagaggtgcaatttgaagctagattctcccactcttaaactagtgccggacagacgaaggcctagcacatgggctacggagccctagtagattccagtccccacactgagccaggaggggtcgctgcccagggatacctacagccatactcgagctggacaaggcgcacgctctttgtggaagcaaacacgtccaccaccgcgtagaggggctgcgcagctggcagtccccgggcgctcgggcccatgtcctcgccgttgatgatgatgtgcatgtcggccgtgccatcggggcgcgggcaaaagaggacacccaggcggctacggcgcgcggtcggaggcagcacgttcagctcatagagctggtccaagagatggctgtagagccctggccggctgcggcccaccaggcggtcccggggaatgcgaaactgctcaatgcgcagatatggttccacgaggagggttggaggtcggctgggggccgctgcctccgcctccgggcggccctcccggggcacgcggttgtggtggcgcgtgatggcgaagacccaggtgtggcccaggttgaccagatcgggcagagaaaactcgggaacgggggccagactggcggggtccagcgcggtcagaccgagacgcagatgtccgcaccagcccagctctttctcctcgatctcgaccaggaagacctggcccggggccagcggctcgcggctgaagcacacgccgtgggcgaagctctccacgcgtgtggcccgcgtcccagaggggtccacgcggatgttggcaccgtgcacccgatggaagcgggtgggagggggctccgggcgctcgagtccccagagtgcacccgaatccacgggctcggaggcagcagccatctctcggccataaggcaggccagctggcgccgggggctattttgggcggcgggcaatgatggtgaccgcaaggcgaccttgtaaggcatttcccccctgactcccttccccgagcctctgcccgggggtcctagcgccgctttctcagccatcccgcctacaacttagccgtccacaacaggatcatctgatcgcgtgcgcccgggctacgatctgcgaggcccgcggaccttgacccggcattgaccgccaccgccccccaggtccgtagggaccaaagaaggggcgggaggaagactgtcacgtggcgccggagttcacgtgactcgtacacatgacttccagtccccgggcgcctcctggagagcaaggacgcgggggagcagaggtgagctggcaccggaggctggaggggatccccgagcccgggatcggtgcgcggcagaggaggctcgcgggtgggagctggcgctggggccggggcttccctcgcggaggcgccgccagcaactccccgggggctgctgcacggaagcgctgaggagcgagtcaacagcccctctgctgcctcccgtagatgatccgagccgcgccgccgccgctgttcctgctgctgctgctgctgctgctagtgtcctgggcgtcccgaggcgaggcagcccccgaccaggacgagatccagcgcctccccgggctggccaagcagccgtctttcc

SEQ ID NO: 97209 - DNA, 27759 bp, Homo sapiens
ctgctctgggtgagcgcccctggcctggggcagtctgggggagggaaaaggtgctgccagccacgtgcgcaggagtttcaggtcacgctcccagaagcctcacataactcctggactgggctgcaccctctcttgtgtctgacattaaagctgagaatggtcagtcatggtggcttacacctgtaatcccagcactttgggaggctgaggtgggcaaattgcttgagcccaggagttcgagaccagcctggtttcatggtgaaaccctgactctatgaaaaattaaaaaaaaattatgtgggcatggtggcatgtgcctctagtcccagctactctggaggctgaggtgggagaattccttgaaccggggaggtgaggttgcagtgagccgagattgcaccactgcactccagcctgggtgacagagcaagaccctgtctgagaataataataataatcaataaagttgagaatagcatcttcagaggcccctatgaaaaatgaacagaggtcacctgggaatggccttcatcttctttcatcagcccctcagctggttgaccctggagggtcctgaggaagtgagatataagagtaagaaatatccatggggaggcttggtgagaattagcacatggtagacacagctgtgagggggcagctggggttctcctcactttcctagttctctccatctacatcgttggttcagtggcctgcagggttcagcaggtaaagtcctcaaacatgcctcaggctggatggtgaggtaggatgttggcagagtttagcatccaggcagggtgaagggcaggtcacggaaagagaaaggggcccagagtttctctgggcagagctaggatgtgcatgtgggaaggtgctggcagaagggcaccactcaactgggacctctcacctggctgagtgcagacttcctggtggagaaggaccaggagtactgcgtgtgtgaaatgccttgcaacctgacccgctatggcaaagagctgtccatggtcaagatccccagcaaagcctcagccaagtacctggccaagaagttcaacaaatctgagcaatacatagggtaagggctctggctgggtagagcaaggcccttgggttgggactgtggaatggatgagtggggtttgatgggggcgggggctggcaggcagggggaacttgagataacacggggaaggtccaaaaggcaagcaaagagtctagggtgggtatgcagggaagatcaagccagaataagcagggaagcacccctttctcctccctcttcatcctcattgttgtaaccggagtcactttatacttgatgcatactgcatatggtacagaacattttttcatatatgccatctcatttaatcctaaaaggcaggtatctccatcagcatctcattttatggatatggaaactgagattcagagaggctgccttgccaaggtcacctggttagtaagagatagagatatgacttgaacctaggtctcctcccccaatccctgtgcagggagaacatcctggtgctggacattttctttgaagtcctcaactatgagaccattgaacagaagaaggcctatgagattgcagggctcctgggtgagctgctgatgacacctgtccccttctcatgccatgggcatggcgtggctccctatcatccaaaagcagggtgctcacttctgtcccatgagggtcctccaccccagaggcccttccccaaaccctgttgtcttggtaagtggtgagggaagggaactgagccttctcttagggcaaagtggaaaagagaaaagacaggcctgtgggcatgagggaggggtaggcatggaagtggagactatttcatatgcccctaaactaagagggttgtggtattttgtaaacgattatttttcttgaaaaacacctgcttgttttagaaaggtagaaaaacgcagaaaagcatagagaagaaaacaaaaattccacctgaatctggctttgcgatccttctgtgcgaaggctaccaatccctttgagaatacaacttgcctgccccagtcccagtaaaccctgctgcccccacgatgtcctgaccccactgacccccctggcgcctgcccccgcaggtgacatcgggggccagatggggctgttcatcggggccagcatcctcacggtgctggagctctttgactacgcctacgaggtaagcgggggcgaggcccggcacggggccacgtgggggcggggtccagcccgcccacctgccccgtccccgtcctaggtcattaagcacaagctgtgccgacgaggaaaatgccagaaggaggccaaaaggagcagtgcggacaagggcgtggccctcagcctggacgacgtcaaaagacacgtgagggagcgagcgagggcgccctccagcccgcctgtgcctccaccgccccaggaaccccgtccacccccgcccacccgcctctgccaccaccttctctcctttgcctcccgaatgccccagcactacctgaagcccttccgagggataacccgtccctgtcctgtccccttcccccagaacccgtgcgagagccttcggggccaccctgccgggatgacatacgctgccaacatcctacctcaccatccggcccgaggcacgttcgaggactttacctgctgagccccgcaggccgctgaaccaaaggcctagatggggaggactaggagagcgagggggcccccagctgcctcctcacatctgccctggggactccccacactccggggcagatctttcctcttgtctgtggtaaggaaggagtcttgaccatagagtcctctctctgcctctatcccattctttttacatttaacaaaactaatctaaaaaagaactaaaaagggagaacggggcaagggacctcaggctgcccctctctcctccatgctgcctcccctagctcccagcctgaattctgtctatctagctgtctgccatctgagtgtccatctacattctgctgccaccagtcaccaaaggcccttcccagtgaggggtggaagggatctctggggtctggaatttggccccaaaccagagaatgtaccttaagggggagggctagtgtgggggagggaggcttccccagccttaagagaccctctcagcccagtgactgtccccaaacccaagtctcctggcaggaactaaaacctcagccccactctctcacaccatgtggaatctcgtgggggtcggggatccccttaagaagtggtaatggggacaagatgcggccctggtgctgtaggctacatcctgatacctataagttcacccccaccccacagctgctggagagaaatcccaagaggcagcccttcctcaccatcccattaaagacctggctggttagcgtccagctcagggagaagggcgctagtgcctaacctcactggtccctctcccggaggcccttgtagagggccacgtccataaattttcttatggaactctcccacatcctcttccccaacttcatttgcttctctcaacaacctcatctgcattttctatttctatatgatacagactctatattgctatatctctgtatatactttcccagccctgtctgtctccaccccatcccctcttgtctctgagaaccattctcccaccccaagttccaccttctatgtttctactccctccctggtctctgaatgccttcgcctgtataaagagttggactctctcccctggtgtctgtactgtgtacacacatccctctgagaagcacaaggagacgacacgcgcattgtaacctttgcactgtctcagtggcgacaaaggaagctgtgaatcacaagctctgcctctttctggcctcaccctctcccccaacccgggcaccctcggccctccctgcagccttaacattctcttcccctgctcctcctatcccattgccctctgcccagctgacagtggcatccccagggaaggggttgctgtagagatagcccccacccaggggatggaggtctaccctggacactaagccaagtgtgtcagagacagaagggagctggggattggcgactcctgaagttggggcagtgggatgctgacaggcagaagctgaggtcctcagtcagtggcctttcctccttctgggtgcccagccccctttcctcacctgatacccaagcccaccacttttattttctggtgaggtgggtttgggaggaaagagaggcctagaggaggagttgaaagctctgctgttgtctcaccctatcttaatgagagacaagtgaggtggagggcctgccccccctccctccaccagacactccttccaggcctgagccccaacccctcttcaggccttccttccctagctgtgtcttggtcttcaatcccagaacaggacctgtgagcagctgcattggcctggagctggagagtaaggctgtaggatctttggaatctcttggttcctaagagtttcctcagagatcatacctccccagagggaagcaggaatgaggccaaaaagtgtgcattggataggggaacagcaggcagggctctgggtgacgcatgcctctggtctaataaactgggtttcaaccatctcctcttcagtgttgttctcttatttgaaaaagtatttagatattctcactaagtgcctaaagctgagcttggtttggggccaattaggggatgagtaaggagaaggtttgagtagggacactgtggtccccctgggatgggacaggctgaccattatatcaggaatagtttgaaccactgggcagggaaagagggagaagtcaaaggcaacaaagttccaaaacagaatccccaatacaaaggatgctttagagagagagagcagagtcaaaattcaagataaactggaacttatcataaaatctggaagcaggctggcacggtggctcatgcccgtaatcccaacactttgggaggctgagacaggtggatcacttgcggccaggagttcgagatcagcctatgcaacatagtgaaacccccatccctattttttttttcttttttgagatggagtctcgctctgtcgcccaggctggagtgcagtggcgcgatctcggctcactgcaagctccgcctcccgggttcacaccattcccctgcctcagcctcccgagtagctgggactacaggcgcccgccaccacgcccggctaatttttttgtgtttttagtagagacggggtttcaccgtgttagccaggatggtctcgatctcctgacctcatgatccacccgcctgggcctcccaagtgctgggattacaggcatgagccaccgtgcccagccccccatccctattttttaatattaaaaaaaaaaaaaatctgaggccaggcacaatggctcacacctgtaatcccagcattttgggaggctgaggagcacagatcgcttgagctcaggagttcgagaccaacctgggcaacatggcgaaaccccatccctaccaaaaatacaaaacagtctggcatggtggtgcatgcctgtggtcccagctacttggtaggctgaggtgggaggatcacttgagcctgggaggcggaggttgcagtgagctgagatggtgccactgcactccagcttgggcgagagagagacagacctcatctcaaaaaaaataaaaaataaaaaataataatccggaagcaggttaggtcagagagaaagttaggatgaagttcccacgtgaggtacttattgaggcactttatctgtggaatgagtcccgggctatgagcaagggtatctggaatcttggcttcggctttatggctaacttgctggttgacctttgccaagtcattcacctgtgagttcagctttcccatttgtaaaatggaataaactgtgtttccctcctcagcccctgatagttatagcagtaagaaaacgaaacgaaaagcagtcaaagcgttttggaaagttaacgccatgcgccaagatgaagctattactccaagcccctcttcatcagagggctcgagttggggttgagactggggctgaggctgtggtccgtccccctttccaggtccttgtcttcctcccgtcggcctgggggcgcccgctcacgcggcctctctattgcagagctcttctctatggttttccctcccggaccgtgaaggcgggagggcgtggccagcacgccttttccgctagtcgccccgctctatcccatagtctcgctgccctgagcctcccgtgccggccggccggccgggggaacaggcgggcgctcggggggcgctcggggggcggggggagttccggttccggttctttgtgcggctgcatcggcggctccgggaagatggcggcccgggcgggtttccagtctgtggctccaagcggcggcgccggagcctcaggaggggcgggcgcggctgctgccttgggcccgggcggaactccggggcctcctgtgcgaatgggcccggctccgggtcaagggctgtaccgctccccgatgcccggagcggcctatccggtgagtggggcaggaggaggggcgcgcgggccgggggcggggccgagcggggacatgggagtgacaggggtggggggagaagtaggagggactcccttgggaggggttcgggctctgggtgggggttgggggaggcagtgcgcagaaagagagggggaggcagttacacacctgctcctaggggcattgtttccctggggagtcggtagagaacctgggtgggtgaagtgggtccagggatacctgtatgagggccggagtgcaaaggggcttgagcagctccagtgatcagaggaacacagaacgtgtagctgacaaattgaggtcagcttctaaagagatagtagctagcagagtaaatgtggaactggcgatgtccgatgtgtcccatccaaaatagactgagaatttgagtataatctggctctcgcttagcttttggactctgtttttctatggagtcactactggagcaaagggttctcctctcattgtcctcyattccatccctaaaccttacttcattcaaagatctcaggcgttccctgcttttctttcttgatggggtttagcaggtgaaaccatgacatctctgggtcctctccyctctgtagagaccaggtatgttgccaggcagccgaatgacacctcagggaccttccatgggaccccctggctatggggggaacccttcagtccgacctggcctggcccagtcagggatggatcagtcccgcaagagacctgcccctcagcagatccagcaggtccagcagcaggcggtccaaaatcgaaaccacaagtaagatgatcctggggcagagggagggagggagggagcctgggaggacacaggtggtgggagtacctgaaccaagaagtggtggtgctgtgtcagcagatggtgctacagaactcatccttgagaatgcttggtggtggtggtggtggtggtggtggtggtggtggtggtggtrgttctttgagagaagctttgcagtcccttcacattactataaatggacgtgctgacagcttattttcacgttctgactagttctgtcccaacctgataatagtatttattcccaacagtgcaaagaaaaagaagatggctgacaaaattctacctcaaagggtgagtccaggctatatgtcttctggaaagtgtggtgagtttgagtatagagatgatcatcctagatttcaaytaatttttctgttcctaagattcgtgaactggtrccagaatcccaggcctatatggatctcttggcttttgaaaggaaactggaccagactatcatgaggaaacggctagatatccaagaggccttgaaacgtcccatcaaggtaacacaggaaagtactaggcagagagccaaaggagaggacccaggaaccttcagcagaattaggatgagaaatcaaaggcacagcacaactctccttggcatttaaattgcatctctcccttccgcctacaaactgagaattacattaggaggataagaacagaatggcaaagggggaggggctcttgatgtctcttgcactacaaatatacccttgtccatgttttcgctgtaactgctctgctaccttgggaacctggcaccttgcatgactttgtccacctggcatcccactatatgcacttgtacttaggctgatggccagtactcctcttctaaatggaatcttcatccacccacccaagggactgggtagacagtaagccagtctgttaggagtaattttggggtttggggagaccgttgtcttcaacatcagaccactgaagccccacgatcaatcctgtttctgccttcctcagcaaaaacggaagctgcgaattttcatttctaacactttcaatccggctaagtcagatgccgaggatggggaagggacggtggcttcctgggagcttcgggtagaaggacggctcctggaggatgtgagttcaaggtccacaatggttggcatctagggtgggagctgctgggaatgaacagtgttgtctggtcagcaggaagcctaactggtgctcacagctccttttgggagcagtaaggagagggacactgttccctgcactgaaagacagtggtcctttgtgtttgcccccacacctttggccctcactggtatcatatggagaaccttattgtcctgggatctgatttgtggtttaccttcctcttggtgctgctggccattggatttagccatatctgtagattatttagttttttttttttaatcgagtttgcacttaatttgaggctgtgtttcctctctgagtccttgtggtatctccatcttctcaactttcactggaggcaccccacagtttaagtaggatagatttctcttgacaggctctttgttgcttcctggggagcatcagctgacaggtgatagtccccaaacttcccaccccagaagctcctcggggaagctcacctttctctcattcccttacattctctggctcttatttttagctgctcgcaggcaagctagttggaatgcacttttgcaggagaaccagggctcagtgtcagagcctccttctctatataggtccggtccatctgctggtggtgtcattctgtccaaataaagctgtttttgttctggctgcttattgcctgtgattcatttcccctctagagtcagacttttctctgttcaaactcgcttagttatgtgcaatggtttgcttaacttgcctcatttcccttgggcaaatgagatgggtaaaacagtgaccctctatgtgttctaggctgcttcttcagggttctgttgctactatgattggtttaatacctgcagatgcctactttgcctatctctcttaagagatattcagaagatattttttgagttttttyccattgttgttggggttcctttttcataggattttgtcttgggaagtttcttctggcctttcctaatgtgatttttattttctctcctctagtcagccttgtccaaatatgatgccactaaacaaaagaggaagttctcttccttytttaagtccttggtgattgaactggacaaagacctgtatgggccagacaaccatctggtagaagtgagtagctctgccttctaggctttgactctgattggaggatgatggacttgggagccgtattttaatgtctaaggagatggggaggtataaagtagtcactctaggtgtacacagtaccgctccaggtgtacagtttgcacattgacctctaggtggcactagcatgtttagttaggaccaagggctcttgtaacctaacttgtcccatctttttaatgttactatcctggtcactgccacctctttcaagggaaagtctactggtggcctcttgtatgtgccaggccatctctgtatcttgcttgttaataatggtgagatgtagttatccatttttcctggcagcagttgctgtaattagagtgattgactgatagggtactagtacttgccaaggttaccattatagatctgggacttcctcttggtctctgctctgtttacatttacattccaattcaccaaaaatcctttattatgatgcctgattgcacaacrttttgaagcccatgttagcaacagtattctttgggaaacaggcaaaaccagaatgacagtccagccagcactccaagtgaacctaacctgctcctttctttgccagtgtagctgcagccccttaacctcaaccactaagagacatggggaggtctttaccatctaataagggaagtaagtcatagaatcaatagaaacttgtaaatatatttaattttatagcagtagagtatagtggctaagaatgtggactgtagaatcagacacatcagagctcaaatggtggctccgccacttactggctgtttgacctaggcaagttactttattatgctgagcattagttttctcatctgtaaaataagtataattgtgcctatcttgtatagatgttcgggaagtgagataatccaggtaaatgtcttagaatactgtcacacatagtaagtactcagtaaatgatagctatgttactgttcacatgtgtattatccattttgtggataaaattatcactggacattgaggcttatttaaatcaaccacaaacaattaaaaggttaatctacttatacacagacagtaatcccaaagccatatgcagttttttaaaatgcctcatgctattactcttctccagtagcctcagtaatcaaagttgaatattcagtcattacagaagctcttccctcccaccccagctcttcctctgggagagcaccccctgacatcttcctctctgtagtggcacaggaccgccactacccaggagaccgatggctttcaggtgaagcggccrggagaygtgaatgtacggtgtactgtcctactgatgctggattaccaggtattctgtggtggtgtgagggggtccagctttcacagccacataccgtcagcagtctcactttaaagagtttatgtctagttgtgaataatttgccactttggcacagagatagagtcttagtcatctctgagttcttcctagaatttttctgtcccagaaaaagcactacattatttgttgaatagcttgaatgtattgctgcatatagacgcagctaactagcttcatcccctatactttggttccctgcagcctccccagtttaaattagacccccgcctagctcgactcctgggcatccatacccagactcgtccagtgatcatccaagcactgtggcaatatattaagacacataagctccaggaccctcacgagcgggagtttgtcatctgtgacaagtacctgcagcaggtaagtaatggacccattcttttgctagaatccattagaacactagttatgctcaaactgctaacctcgtgcttctcccctttgctacagatctttgagtctcaacgtatgaagttttcagagatccctcagcggctccatgccttgcttatgccaccagaacctatcatcattaatcatgtcatcaggtaggcctgtgtgtgggaggcagtgctgtgccggagctgccttgtgccgatttgcacaagccagttgtcaaattttcaggaattttgcaaacaggttgttaaacacaactgttacactgttacttacaattaaattacataaacttataattaaatatattagactaaaagtgggtaacatatattcaaaatgtataacttcctaattattacattttattgtatttgtrcttttttttttttttttttttttggagacagagtctcactctgtygcccaggctggagtccagtggcgcgatctcggctcactgcaagctccgcctcctgggttcacgccattctcctgcctcagcctcccgagtagccgggactacaggcacccgtcaccacacctggctaattttttgtatttttagtagagatggggtttcaccatgttagccaggatggtctcaatctgacctcgtgatctgcccgccgagcctcgtgatctgcccgcctcggcctcccaaagtgctcggattacaggcatgagccaccgcgcccagcctgtatttgtgctcttgaggttatttttgcctgttgtatccatctggcggaaatatgatataatgatgtgcttatgtgttactgtgcatctcttcccatgaacagtaatgtaatgttggtagcttgaaatcagaatttttttttttttttttgggatggagtttcactcttgttatgcaggctggagtgcaatggcacaatgttggctcaccgtaacctctgcctactgggttcaagtgattctcctgccgtagcctcccacatagctgggattacaggcatgtgccaccatgcctggctaattttgtatttttagtagagacaaggtttctccatgttggtcaggctggtcttgaactcccgacctcaggtgatccacccgccttggcttcccaaagtgctgggactacaggcgtgagccaccgcgcccggccttttgttttgttttgttttgagatgtagttttgctcttgttgcccaggctggtgtgcaatggcatgatctcagctcactgaaacctccgccacctgagttcaagcaattctccctccccagcctcccacgtcgctgggattacaggcacctgctaccatgcccagctaatttttttatatttttagtagagacggggcttcaccatgtttgccaggctgatctcaaactcctgacctcaggtgatccgcccacctggcctcccaaagtgctgggattacaggtgtgagccactgcgcccggctgaaatcagaatatttaaagcccaaagatcagcaaatgccacacatctgggcacttcctcccactctcctttggaagatcagttgttaaacatctaccagctcttcactcatggaagggctcagcagccatcttttctctggatggtacagcattctagtccgagcctcccaattccattacctctgttcacttttttgtttagaagctggagagcaaggcatctctagatagggggtgaagaaaatttccttctcaaagcagcgtgtctctgtagttggatatagtctctttgtcttccttcctttattccatattaattctggtaagggctttcttttcttttcttttctttctttcytttttttttttttttttttttgagacagacagaatctcactctgttgcacaatctcggctcactgcaacctctgcctcctgggttcaagcgattctcctgcctcagcctcccaagtagttgggattacaggcgcatgccaccacgcccagctaattttttgtattttagtagagacggggttttaccatgttggccaggatggtctcgatctcttggtcacgtgatccacccgcctcggcctcccaaagtgctgggattacaggtgtgagccaccacacccggtgggctttttttttttttttcttttgaccctgaacctacaagatgacagagagggaggggaaaaaaagaaaaaagataagaccctgaaccttcacttacacagtagtaactcctcaacctataaattaggtcagtagaagttggtctgtcctatattcctatgcttaaagttagaccacttttaattttgtgtttgactttatttttggggtcaattttagtttaaaagggagaaagccaggcacggtggcacattcctgtagacccagctactccagaggctgaggtgggtagatcacttgagtcctggagttcgagtccagcctgggcaacagagtaaaatcctgtctctgaaacaataaaaaaagatttgtttggctgggcgcagtggctcacgtctgtaatcccagcactttgggaggccaaggtgggtggatcacaaggtcaggagttcaagaccagtctggctaatatggtgaaaccccatctctactaaaaatacaaaaattagctgggcatggtggtgggcgcctgtagtcccagctacttgggaggctgaggcaggagaatcacttgaaccggggaggcagaggttgcagtgagccaagactgcgccactgcactccagcatagacaacagagcaagactccatctaaaaaaaaaaagaaaggcttcgtttgtttaaacatacagagtcttgctctgtcatccaggctggagtgcagtggcatgatcttcgctctctgcaaccgctgcctcccaggttcaagcaattctcgtgcctcagcctcccaagtagttgtaattacaggcgtgcaccactttttgtattgaggtttcgccatgttggccacactagcgttgaattcctggccttgagtgatctgcccgtgttggcttcccagartgctgggattacaggtgtgagccaccgcacctggccaaaaaagttttaaaaattattattattatttcttttttgagacagagtctctctctgttgcccaggctggagtgcagtggtgtaatcatggctcactgcatcctcgacctcctgggctcaagtgatcctcccacctcgcctcctgagcagctgggaccacagatgtgtgccaccacgcccaggaattgttttgaaattttttgtagaaactggggtctgtgtggtgtaggctggtctcaaactcgtgggctcaagcagtcctcttacctgagcctcccaaagtgttaggattacaggcatgagccaccatggctcgccgaattttttttatttttagagatcgtctcactctgtcacccaggctgaagtatagtggcatgaacttggctcactatatcctctgcctcccgggttcaagagattctcctgcctcagcttccccagtagctgggattacaggcgtgagctaccacgtccggctagtttttagtagaaatggggtttcaccatgttcctgacctcaggtgatcgcccaccttggcctcccaaagtgctgggattacaggcataagccaccacgcctggctgccaaatattttttttaaagggagaaagatatataggagactgtagcagtgatttcctctggagagaaaggaactacttttcacaggataccttttgtactgcttgaatttttaccattgactttttaaataaatcaactttattgaagtataatttatatataacaaattataccaattgaaagtgtagtttgaagatttttgccagatctgtacaccatgtagctgccacaataaagtgtagaacatttctgtcacacccgaaagttctcgggcccttttacagttagccccttttctcttcatcctgggtcatctttttgaccctgtgtaattaggtcttaggggacaagctctttaccaggctcctttggtttcctgtccagtgttgacccgaatgatcagaaaaagacagcttgttatgacattgatgttgaagtggatgacaccttgaagacccagatgaattcttttctgctgtccactgccagccaacaggagattgctactctagacaacaaggtaggggtctgtgccctggatagttgggtaccaccagcccctatcacagcttcaaggcctccttttgattcttagtgttcattcaaaatacggtgacacccagtatatgtcaggtactgtgcttggtgctggtttgagccagactcaaatgaattctgattgtggggatactctcaacagcactgagcctcggtttctgatttgtggaatagagaccatagtaccttttttttccttttttcttttcaggagtctcgctctctcgcccaggctggagtgcagtggtgcaatcccgcctcacggcaacctccacttcctgggttcaagcgattctcctgcctcagcctcccaagtagctgggattacagtcacccaccatcacacccggctgatttttgtatttttagtagagacgaggtttcaccatgttggccaggctggtctccaactcctgacctcaagtgatctgcccgcctcagcctcccaaagtactgggattacaggcgtgagccaccacgcccagcccatagtacctattttaatcaggttgctatgacgattaaatgagggagtgtgtgtaaagacttgagactgtatctggcacataaaaacaacaaatggtaacttctgctactattattgttatctgggttgttattactagacgcagtccttgcaaataaagccaaaagtgctttgggaacatgaaggagaaagggaggctttgctggaagagttgatgccccaactaaatcttttcttttttttttttgagatggagtcttgctctgccgctcaggctggagtgcaatggcatgatcttggctcactacgacctccgcctcctgggttcaagcaattctcctgtctcagcctcctgagtagctgggactacaggcacctgccactacgcccggctaatttttgtatttttagtagagacggggtttcaccatattggtcaggctggtcttgaactcctgacctcaggtgatccacccgcttcggcctcccaaagtgctgggatcacaggcgtgagccaccgcgcccggccccaactaaatcttgaaggacaaagtgggtgttaatgaaagggcaaaaaggatagtagtgctgggggcataggaggcagaagacgttccagaaagagggaatagggcatgtaaaggtccagagaagagagagagagcctggtgtcttaaagaagtacgagccatttagtatgctagatgcagcatagagtgccgaggacgggatgttttgggaaggaaagctagatagggagccagatgcctaattatgaagaacctttgattcagggaaaactggtttatgtttcatcccgaagactgtgtaagacagctggttgagagatcattaccagtggagggactgatgctatttgtatatagaatgatcacttgcaggaaggtggatggagaataatttgtcaagagggcagggctggaggcaggaagcccagttaggaggctggtgcagtaatccatgtgagacgtgttgaggccctaaatttacagtcccgacagtgagggtggagataagtagatagatttgagaggtgtcaaggtggaattgaaggaatttggccactgtttggattattagagtgagggatgaatgagaaggaaatgttatgatgcctcccaggtctctagcttgggtggacagtagtatttactatgactgggaagaggggaggaggaggagcaggtattggagaaasggtagtgagtttaatgtcaagtttaagcagttggattggttggagtatagaagatagactctgggctgcagactggggactcattaccctgtcactggtaatggaagatatacaagtcaaagaaattgccgggaggagtatgcagaatgagaagagagttgagaacaaaacccagagatgagagcttatgagacagccccatatgccagtccttttcttcctgagaacacttttggacccatttgtgctgtggagtaagtattcatcatgtagctttgcccatagtgggcaatgtggagaccaaaaggaaagctttcctcacatggggtatacagagagacagaaacaagggcaaattacttgctgaaagaatgccaagggtcggagcagttggagctctatatgatggtgccagctgtgggcagyatggtgactaggttggaagtgkcatgtggagttgtcaggcaccacctgccatttaacttctcatttttctagtttgaaaatggtatgagcttcgttcttcctttcagatccatgagacaatagaaaccatcaaccagctgaagactcagcgggagttcatgctgagctttgccagagaccctcagggtttcatcaatgactggcttcagtcccagtgcagggacctcaaggtaaagaacctaggagaggtctgaagggacttaggtcagtgaggtgcacagctgctttattcatgtagcagctggtaggagacccagaggaaggagtgaggggccagatttttctttagcatgttccagggtccattttgcaattaagcagggaaatgggggcagagccatcaagtgttgatttagtgcttactttgtctgtcactgtgcttcatcttgtcagggatacagagtggaagacctgatctctgctttcaaagcagcctacattctgtctgaagaaactaggctagtatagccgggcatggtggctcacacctgtaatcccagcactttgggaggccgaggccgacggatcgcttgaggtcaggagtttgagaccagcytggccaacatggcgaaaccccgtctccactaaaaatacaaaaacttagctgggcgtggtggtgcgcgcctgtaatcccagctacttgrgaggctaaggcaggagaattgcttgaacccaggaagcagaggttgcagtgagccaagatcgtgccgctgcactccagcctgggtgacagagcgaaactctgtctcaaaaaaaagaaactaggctagtatgatacaaagtagtaaaccacataagacattatcaggccaggtgcggtggctcacgcctgtaatcccagcactttgggaggctgaggagggcagatcacctgaggtcaggagtttgagactagcctggccaacatggtgaaaccccatctctactaaaataaaaaaatcagccaggcgtggtggcgggtgcctgtaatcccagctacccrggaggctgaggcaggagaatcgcttgaacctgggaggtagaggctgcagtgagccgagattgygccactgcactcccagcctggctgacagagtgagactccatctcaaaaaaaaaaaaaaaaaaaaagacattattagactgaccaggaccaataagatgattcagataagggagatcagtgagactagaatctctggggaaggcttcatggaaaatttgggatttgaagacgttcccagaaaggggagcacrgtaagctcagacaagaagataggaatgggcacagagtatgaactcatccgttgtcacccctcctgtgctgactgtgacgagttagagaggctgagcagaggagcaaggaaaaagggatgccaggaaagatccctgaacaaggcaacgacttgttgattgcagaggtgactgggtgttgtatcagtttgctgaggctgctgtagcaaactaccacaaactgggcagtttcaaacaacaggcttgtctcacagttgtggaggctggaagtccaaaatcagtgtgggcagcactgcttccttccgcgagctgggagggagactctgttctgtgcatctctcagcttctggtacctcaggcattccttggcttgtaggtggtggtctctgtgtgacttcacgttgtcttccttctgtatgtgtctgtctccatgtctaaatttcccctctttataagggaacctaccggtcatattagggggtactctaatgacctcatcttaacttgagcatctgtagagaccctatttccaaataaggtcacattcacaggtactaggggttggttagacttcaacattttggggaaggatacaatttacccaataatgggtgtgaaggaaggaaacaagccttttctcctctctcttcctccaccctgcatctccatttccctcagacaatgactgatgtggtgggtaacccagaggaggagcgccgagctgagttctacttccagccctgggctcaggaggctgtgtgccgatacttctactccaaggtaagtacatggggtgcacgggggaaattgacaaaaggcacggggttttcacccctgatgggggtcagtggtgttagataccaacttctggtttgtctcatcttccactcccttcactattttctccttaggtgcagcagagacgacaagaattagagcaagccctgggaatccggaatacatagggcctctcccacagccctgattcgactgcaccrattcttgatttgggccctgtgctgcctgcctcatagtatctgccttggtcttgcttggggcgttccaggggatgctgttggttcaaggacaasaccagaatgaagagggtctcacaagacacctgttatcctcttctttcaccctatctcttcccacccccagcttccctttgccccacaaagttcccatgtgcctgtaccctcccctggtctacataggacctctagatagtgttagagagagaacatgtagtggtaatgagtgcttggaatggattgggcctcaggccaggtggtcttcaaggggaccagctaactgatcctrcccttcagagacccaggagttgggagctttcgctccttctccaagactcaggcctgtgggcactctataagctagttgatcttggctctcctgataacagaatccaatttccttccttccctccacaggtttggaacaaactctcccttcacttgttgccctgtagcactacagaaaccctggttcttgggctccactgagccccaggtcagtccccagccctctgggttggcctgctgtcagtgcttctctcactccttagttggggtccacatcagtattggagttttgttctttattgctccctcccagacactccctgtggctgccctttgtgattccctcagatctgccctaatcccgggcatttgggtgggggaatcttgcctttccctttcagagccccagggatctcatctggggaactgtcattgccagcagaggctgttccttcctgcwgtttggagatgtgactcattcattcactcactccaccctgcctctgcatcccttaatggagaaacgggcctaaaaccaaacgggtaaaaagccctgggccatccctgtcttcctgtcccttgtctgcccagttgacacctactggtgacttctagggcactgaggagtgaaagcgcctagggctggagaatagcgctgagttgggtttgtgactcttccctctccctgcctcacaggattgtgactccccagcccctgccctcaaagcttcagacccctcaggtagcagcaggaccttgtgatcttggccccttggatctgagatggtttttgcatctttccaggagagcctcacattcttcttccaggttgtatcacccccgagttagcatatcccaggctcgcagactcaacacagcaagggtgggagacagctgggcacaaagggggaattccgttcagcatgggctctaaacccacagaactgacaaagcccctgcttccccaccccctcctcaggctcctgcgagcacacccccacccccaaatccctccctgttctacactggggacagcagaattttctccccgtcttccccttcctgccattttccctcccttgaaaggttgacactggacaaccttggggcagctgagccctggccgcctcctggctggaaccatgagaaggaagctcagtacttcccacagtgtccctgttgataactgtttttattaactgaattgtttttttcatggaccaaacttttttttgtactgtccccttattgatgttacccagttttaataaaagaatcttctgaaggatgggtcctcctacctactgtgagagagctcttccctgagctcttcttccttcaataccattagccacgcttgtagtgtttgttcattttatttgacaagtatttattgagcacctgctatgtgctagttgtgatgctagacacgggagataaagtggaaaatgagatttctacttttgtggacctcagggtcttaccttaagagattgctgtctgccccagtggtccaagcagcctagttgctggttgggattattgggcttcaccactggatcttaagagccctttcccgacttgctaggcaggtactaacaggttggtggcagtcattttcccccttgtccatctgagctccccagagcacttgttggctggagtgagccatagatgcccgtgatcccttaggtttgacgaacctgagccgcctttggaggagtttcacttcttccccagggcttctgtttagatgtgggcaggatctggacgaccaaagacatttttgctttttgtgcctgctactctttttttttttttttttttagacggagtctcactgttgcccaggctggagtgcagtagcgcgatcttggctcactgcaagctctgcctcctgggttcacgccattctcctgcctcagcctcccgagtagctgggactacaggcgcctgccaccatgcccggctaattttttgtattttttagtagagacagggtttcaccgtgttagccaggatggtctcgatctcctgacctcgtgatccgcccgcctcggtctcccaaagtgctgggattacaggtgtgaaccaccgtgcccagcctgtgcctgctactctaaggttccgctttcatggttcaaataagagttcagtttttgtttgcctgttttgagatggagttgtgttcttgttccccaggctggagtgcaatggcgcgttctcggcttactgcaacctccgcctcccaggttcaagtgattttcctgcctcagcctcctgagtagctggttcttaagagcaccatggaagttctgtgttgtcatcctcatactgtagacaactagcccctccttggcagagtttggaagacagctcaggagggattcccattagcaatcacttgaaactcgcctgcagttctgcctgcttcccacttggaggctcatgacttttttcctttgtcattatgcaagaatggggtttggaatataggatcagagtacaaccactttccaaagttgtagtttaaaaattatcctttgcctgtttggatgggaacattctagtattgcctgttcaatatatgtaatcaaacccaccaaaaaatccaaccactgttcctactccggaacttggggtttatcagacttgagaagggaaagcagagaggagtggttgggccgataactaggagtggagaaaattgatgtcaaggacattgaaatggcatctgtttttacccaggctaattacatgtgtaatgaatggctgatgaaccattattaatttcaagcaaatctacagtttgctcttgggaaaagagctctagtgatacagataacttcctgtgatgagccgattctgaatctctgcaccctctttattcccatgtaaatgagcacattcttagtctccacactatctaaaatgattgtaggggcaaaatgagagagggaagcatttaggcaaaaacaagggggttattttatgcataaacatccattctttggggctcccatcatttgtgccagggacagaagcatcctttctcttccatcacccgtaatcagtgctcccagctggcagcctggcactggagccttcatctcagtgccagtgcaataaaggagtggtctgtgggaggctgtttctgtattaggtataacattgtgctaagaaaaacagccaactactgatttcatgtccgtttccctatgggaaattactggccatggaaggagaatatggttggtttttcctgggcagtccccggaacttagaaagccatttctccccagtcttgacctcctgcctgcttactcctacccatgggttgcacacagactcccctgtagcccagtgcttgttaccagttgctggccagcaacagcccagggggatggcaacacccacctagccgtctgccaagccaggaggtcagcacatgagcacacagtggtgtctgccctctaggccaaggtgcacagtgttaggagcctcttgctccactctccagatcagcctggaaaccagagcttccctcgtcttagacaaacagatggccgtgggcgatgcagagccctgaactgctgagggtgctccttccattctcgcccttccccaaaaaacatacaccaaacttacccccaatcacagcatctgagaccacaaagccccacggacacagctgccccgggtactgcctgccttccccttttctggcctctgcaaactagccattcacctgatgaagcccctggggcagtaccttggaaacccctgagaggaggagttgaaggaggctcaaagcctttcaaggacagtgtgcactctgcctgcctcctattctctcctgtcctcttaagcccagagtctacaacaaaattgtgtaccgcaattctcagagctctctaactttaacctttcccaccttccctagaacacatttttgggtggggatcatctgagaggcccatggatgagtccccaagatgacctctgtgggtgaccaagacaatcttgtcttttgaggcacctggagtctctcatccttttttgagctgggctgtcctcaaagcaggcccttacctcttatgtggcctcatctttagaggtgggaagtgggcccacatcccccaccccagccctgcagtggagctagcgtgggcctgctggaggacagaactgtggaacagggtcctgtgaggatatgtggcagggttggcggggggatagggggtcatggaggagcctacctctgaaaagcattcccctagctgctactgaagctaaatacaatttatttcatgctgggggacagaaaggagcaagggagagcagtcacctgctccttatctgggctattttcttagcagacctcaaaatgagaccatggtgggaagctgggctggggccaagggaagaagcttgccagcactgtcagccgatgagcccaggagaaaaagctgggcctagtctctgccccattcctgttccacacctgtctgtacccctgtctctcctttccctggctctgccagactctctatctccctgggcgccagcctccccacccacccctggagggcggggcttggctgcacccacgtgtggtggagttaaatgctcctagccggcagaggagctagggagtgtggcactgagccggctcaggcagagacgcggcaccatggctagcaagaaagtctgcattgtaggctccgggaactggtaagcagctctgtcaagtgatatgggggaagggtaggccccccaagacagaggtgggtaggaggcagaatgggtgggaaaggccctcaggttcctgttcagcccctgctgctatcttctatcatagcagcacaggacagacggtgcccggccctctcctgacccccgccctcctgggcagctgcacctgttcaccatgggaaggcgtctccagagctctctatgtgaagagccgcttgagtttgggggtgggaagatgagaaggggggctcccttctctagtagcaaagggtgaggagactgagtctcctttctactgccaggtcactggggactatttgtcatgggagtggaggtgataaggaaggtaggtaggagtgaacagcctggggggctgctgtgagatcctgaggtggggcgctgccccaactcctgccactgttccctcctcctgtactttcctgtgctccccctcccaccaggggctcagccatcgccaagatcgtgggtggcaatgcagcccagctggcacagtttgacccacgggtgaccatgtgggtatttgaggaagacattggaggcaaaaagctgactgagatcatcaacacgcagcatgagaatgtcaaatacctgccagggcacaagttgcccccaaatgtggtgagccccaacaccctgcgaagaacagggagaggaagggagggccaggagttggagccgaccttactcaacaggtgcctcctgctgagagggccgcttcaggtgcagcaggacttgggaaggtctcaggagggctgctctgggccctttcctgaggactgaggagaacctatgctttcccctcacaggctcccaggcgggtgggtggggaagggatgggagaacaagttggtctccatggcagccaaagactgggctcccagacttggggtccagtagtgcctgcctccggcactaatcctgttactcattcactgagtgagtagccgacttggaggctgctccttggacttacggtctttggtcaaatccacgtggctctccccacctggaaaggggaagcagggaagagagcagaaaggctggggctcccccttcccagctggggttcctgaggagctgggtgatgaaatcttatttgagctctttcttttgccaagcccaggctgcttttggcctcccgcactgtcccacagccaagggataggagagtgctgggatgaggtttccaggagtcctcaagagcccaggacagctggagggagacagagtggtagctggggggagggagtagagtgtcttattcctccaagttcagtccttctagattcagtcccaaacaagccttcctgctcccctaccagcctcactctttggctcccagatctcctgaatagggttccacaggggctaggggaggtctgccaggcccgcgagcacttggtcacccccacaggtggctgtcccagatgtggtccaggctgcagaggatgctgacatcctgatctttgtggtgccccatcagttcatcggcaagatctgtgaccagctcaagggccatctgaaggcaaacgccactggcatatctcttattaaggtgccagggacaccttcatgtggatgggggagggtgcggctcactgttgtggggttcagggtgggtgaagcaaggagaacagaaaatggcagacgcaggccaagagtttgctggagaaaagagaggcagttggctctggagaggcttaggaaagcagtgaggtgctgggggtcactggaagggaggctgaagggaggagacgagattggtttggaggtcctctcggggagtttcggaggtataaaggaatgcctgggagatatgagaagcgggctggtttgagaagtgtgaagagtagctggtttggagcagtgactggtcactgaatggcagtttgttggggcagtcaggcggggttgcctagggatgtggaggggacccgttgccttggagaagtagactggttgagggtatgtggcaggacagttggtcacatgctgtctggcctcctcacagcaaacttgagctgggttggaatggggcaggacctgtcgggagggacacagatgagcaatggatttggaagggacagaatttctgggcggaagcccgcaggtgggcccaaagggcacctggcctgagctccatcctgtgctcagggggtagacgagggccccaatgggctgaagctcatctcggaagtgattggggagcgcctcggcatccccatgagtgtgctgatgggggccaacattgccagcgaggtggctgatgagaagttctgtgagacaaccattggtgagagccccctggcacctgcatacacagtgcatctagttgcatcccctccccaaactgccccaaccccacttagccatctctttcccataaggcagagaaaggaaaatacaagcatcagaggtgaaggaggctgggacacccccagggaaggggcttcagggcctgcttagggaaacacagtgatgagccctccctcagagttggtgcagtggcacacctgtggtcccagctacttaagaggctgaggtgggaggatcgcttaagcccaggagtttgag

SEQ ID NO: 97210 - DNA, 18902 bp, Homo sapiens
agtgcttggaaaataaaacagacaagccaccaatactataataccataaaggccagcaagggggcctttacacttaagcagcacatccttattaaagtcatcacagtcacatgagaagtgacatataaacacaacccacagctaagtgactcaattacaaatctatacccttactgaagagggtattaggatatgcagattcatttttaattctaacagctggtcaaataatgcatgactcttttagattacgtgtatgcttttaaattaaatctttaacttaaatctaaaactgtggcatatattcagagcaggcttccctttgtaaactccatccaacgttgtctatgctttcctcttattttctaaatctttatttccagaacactgctgaaattcttgagaggttccaggctttctctagctgctgtcttggaaccaaggtagggatcaataataccaaagcttgtgagtgaaatctcaaggaactccttaaggcagaggactgaattaatacacagagatgacaggacccaggactaaaaacagtaatatgaattttgcatttttcattgattagaataaaaaaacgtgtgccctgcaatcaaaactgtcactttccacagttggctcaatttttatctgtgacttcctatacacacacacacacacacacacacacactacataatcaagttggctcatatataccaacttgagaagcatgataatatgtgaggagagccttctcattccagtgaagcagaatatgaattctcacttaagctgaccccaaaactggcagatcgcaaaggtaggtcataacataacgcaggtgtagggagtactaagacactgagaggatgaaggaacataatcatcctctcctcactttctaataaacaggatcagacaaacaacaaaaaaccatgaaatcacaatggccacccacaatgggcaaagcatggacggtttatcaaataaagtatctcaacaatcaaggtggaaagtgccaaagtaaaaacaagaaacagcttttacattcaaagtatcaattcagttaattagcatggggctttggtttatactagtttcaaacaccgagtttccaaactaacaacatagaaggtgttaactggcagtgaggtacatcagcaaaatacggcatttactccagttactatcacaagctcttacaaaactaggagaggggctgggagcggtggctcacgcctataatcccagcacctggggaggccaaggcaggcggatcacctgaggtcagcagttcaagaccagcttggccaacatggcgaaatcccatctctactaaaaatacaaaaattaaccaagcgttgtggcaggcacctgtaatcccaaccactcagaggctgaggcaggaaaatcactcgaacccgggaagcagaggttgcagtgagccgacattgggccaccgcaccccagcctgggagacagagcaagactgtctcaaacaaacaaacaaacaacacacaaaaactaggggaggaaaaactttaagtttatacgatgctaataacaagtcaagctctgtgaatccaactataattaaattatttacacataggggagcaatgtttctcttaatgtacatgcctctcagtcaagagaatgaaggttaaactcccactgaaagttattttaccttatgtaagacataactgactttatgatgctcttttaaaaactcctttggaactccaggttgaacaagtagcttatttacacaacagtcatgggtactttggtgtaaaccacaataatgcttctaatgttgtaaaataaaaacttcctatttttttctttcatattactttaaaaatctttatttcactaagatttaaataggttacttggaaaaaatacatacataaagtttaattctggtatttttttactacacttagatgtattgtccccaaactacatctcaaaactaaatgtactttccccaaactacacgtgatacttgaacttttcatctgtatttaataatatgacaatcatttccagctctagaaaacctacatatattttatatgtatgtgtacatacatacacacacccaattgtgaaatcaagtgacctaggtctattgcaatttatgcagttttgttacttatatatgattctcaaaagaagaaacataaatgctgaagtttttcttttttttaccctatgaagtatcaatctctactttctcctttacaaaacagctttatcttccttattaagttgcaattttcaaaataaaatttgtagccagcatcatcttatttaatcaataaacttgagtattttagttttcaaaatactaactttttaatactttcaaaacgtgtaagtagttacaaggaaagcaacaacttcacatagtatgccttatatacctatacttttaataatcaaatataaataataagccatttttgcctgataaaagcctactggttggttacttgcaagtggtaccaaaaccatctgttcaaggttgtgaagttcttattttaatataaatagtattaaaactcttcctgcactctggtataaggagaaaaagataaacttaagcaaagcaaagcaaattcacagtgggcatgtataaaatcaatgacttccaaggttggaagggccaagggtcattaagagattttcagcccaatctcctatattttctatacaggaactataaaaaccaaaatcaaagaggttagtttcaatatatagctcctaataagctagtctcaggaaatttttcaacaaaggccaagataaaaaaggaatttctacttaaagttcagttaaacagaatacccattccccacactctagttaattgaaccttttactatactttaatgaagtatatagtttacctactataaattccagtcttcaagcccaattgtttcactttttttttttttttggtagagacagggtctcattatgttgcccaagctggtcttgaactcctggcctcaagtgattctcctgcctcagcctcccaaagttttgggattacaggcgtaagccacctcacctggcctcaccttattttttgagtgttaaaaccaagaaacctttgaaacagtagaatacatgctttctaagagctcacagcaagttttcctttaagggaaaatggctgttaccacttaggacatcattcaacactgtatcccattcgctaaatcaaacaaaagcccctcaacaaacttcatttcaaacattccgtcaaataagttgtcttcaaattatatggtcattttcagaacttaaataactgcatataaaacaccaaataaagataaaaactatacctgcctacaaatactatacagtatttaaaaatttaaataatcccatttaaatatgtgatttttcacaatgactaagaaattgtagaagcaatgtctctagtcaaatacctgtaccaaagggcctccttttcactcaccaaaatgttacctggtagcaattctccaatgaaaaattctcctgttaagcaccaactggttaactaggtatcaaagaatacacccattcagttctccataaacttatcttggtgtatttatgtaacatacaaagtcttaaaggtacccacaaacatcaaccactgtcaatctttggtagcaagaacaagttcatggaaaaccatgttttcatcagacatttaaggcttttagaagcttagcaactctagagattgggttatcaaagtaatagtaactgaatacttatactttatacaaaggggtgtagaatgcaaatgattacaatattagcatctgtaaaaatttctcttaaaaaagctgtaagtaatttcttatgttaataagtgttcagaacccactactgcaaccagctctaaccggttccttgaggaatgtggctaggctgaaattttggaagtgttggttttggtggtgaccaaggagaaggaagtctctggcttccctgttgctgcagttcccaccctccaaaatgaatatacccaccggtgtgaattgacaatgtggtccaaagagcaaggcaggaaacggagtccagatcctcaaaatggtagtacagggcataaccactaggccacctatcagttcagtacaaaaagtacaaccctgcgcatcatggtgtaaaagctggggcctaggtttcgcattgtgcatctcacacctatggaaataacaagaggagtaaaatctatggaaatcaacacaccctaagaaggtgggtgctcacagaagactggtatcaacatttttgtaaaggtggttggctgctgagataatgaatggcaattacaagtccaaatttggagggaaacgaaatttttacaatcaacacttgagttcgacaatgaagaacccaacatgggcttgatgtttaccaacaaggctttgcaaatcatgacacccatctacacacttaatccaacatctctcaagaatgatttttaactctcaaagaattggaaagatttggcctatgaagaagggagttaaccagctatgcccccaaacctgttactttgtttcaaaccttctcctttaccaccagacttaggaaagatatggtgacacattcaaaacttgaggtggaagaactccagaggaagggaatccgaaccaaggatgtgccaaggtgattcgtcaagaacaaatatggactgggggccaacagttttgaaaaagtaaaaggagaaaacttctaaaatgcagggtgggctctttaaaagaagtaaaatcactgctcttgactcacttaatccttcgccatgttgctgtcagctcaccaactaagagtgcgagtgtgtcttgctgggcccattttcccatggtctgtagaaggcgctgtgaagcacatcctgttctagctcgggggcccttcccccctctgcagccttacccagtgcagagaatgcgccccctactgactccaacactcatcgcctttagccgacttggctgcggtgcattttgggtgggggctggtattttctccatggccataaaccagaagcaacaatgcagatttctaaagaaactgtatcaagctatccaagagatttttttttttttcattctgaaggttcaagatacaggcacaagaagcatcagggatgggaactgggtgtgtggggatggacatcattaacatgacaaacacagaaacagtttggttctttttccctcctaagcctttgtctgtgaaatggggttatggcaagaagtgtccagagtaactggtaaattcaagaagattaagaagacttcgtgtgtggggggtgtgtgtgtgtggctaaaaaggatatcagacctagagtcttggtcttgggcagaagaggaagagaagcaatcgcgccttttccagcagacagggatcaaggttgggggggaggggaaggcaggcaggcctcccagaggaaagaagaggtgaatacgagtgtgttcacaaaactactccccattcattacattaaaaaaaaatctttttgcagctctctggatttccattttctaccaccttactgcaaagttggggctcagaatgttcgaaagaggtgctgaccaggcagctgagattggggaaaagggatggtggtgaactgtggtcaggataagaggaaagctggcaggttggggaagaaggattgcacaggggaggcaaagactcactccatgccatgcatgctccccgccccccccaaccccgtcccccctcccccaggtaagggtgggcagacctggcagaaggctggttcaaggcatgggggtgtgcgtgggggggctccttttgggggtggggggcggacgggattagttccaggatgggagaagctcggttctggctgggggagatgcccttagctgcaaaagctccgggcggccaggcagagtgctggcctcggtgggctcacagggcggagaagggggtcgggctgcaggaggaggcgcctggacctccggagcagagtcgggtagcggtccgtgccgggacgggggacccgtcggcgccggggtgtgcaaaggagcgtgtgtgcggctggagggcggcgatgcgaacaacaatgcgcccgcgcccggggccaggctgcactggcggccgcgcgggccggggtcgggaagccaggcagggcagggccgcgggtccgcgcgcggcggcgccgggcttaccttgactcggcctcgaggcgcgcgcggggccggcgtgctcgggggccggacagcggcggcggcggcgggcggatggcggcggcacggcggtggcggcagcggggagggcgcgcccggggcctcgtcgcgctccggctcggcggactccggctcgcgccgcggccgcgggtgctgccggggggcgcggcgggcgcagcagagcggcgggcggcggcggcgtcgtcgagcggtgcagacaaaggaggggcggagggaggagacggagggtgtgggagaggcggcttcaccggcgcgggcggcggcggccgcgctcctctcgctcctcagcagcggggaccgagagagggagctgtgtctgagaagacgccaaaatcccccttagcgctgcctgcgggagggggagggggcacaagatggcggcggccgggggggggggggcgggagttcagctcatggatcccggcgggcggcggaggggagaccgggccggcggaggcggcggcggcaacgggcgggggagggggctgatcccgcgtctcccctcagcagacaatacaagcgcctcggaccgagtccccgaacctgccctagccaaaatggcggccgagaaagagcggaagtgacgtaagtgcctcattagcataagaggactcattgtccagctaaataggggggggcagtggggacagcacccctaacccccttttccccagggggggttcctcttactcccacccctgcttgcacctaacttttcctgagggagggtgctctcagcacccccacccccgcttgagggaaattatataatccccactgaggggggagctctcgcgagaaccaggcggatttgccattgacccactaggaggcgccgcggataatggccgcagtgcgctcccggggcccgtgtgctcggcgggcgccttcctctggccgcagcgccggcggcggaggcagaagcagcgggccgcagcacgcccagcactcagtcaggtggccgtgctggggatccctgcgcgggcccagctgggcctggactacatctggcgggaggggtgtgcggggcggcctggggcggctccacgtgctcagatgcccgcgcttccacggctgagaagcggcgggaaggcgccgggacacctggccggtcgcccctgacgcctcctgccttaaatgaggtgtgagggcctcgtgcttcacacagcgacttgagatgagacacaaccccatggatgccttagcccttcctggtggggtattcggtgcagaggggccgagattttattaaggtccgccgttaccctgtgacttgacattcttcccagtcacagtgatggactcttctctgacctgaataaaaaaaaaaatgggaatcctagtgccttgaggccacccaactggtgaaacttaaggatgagaagtgatgttgccaataggggcattggctctctgcaagatccttaaacaacacactttgtagtcctagggacatagcttttggtgctcccacaatctgggtagcataagacagcacatggttgctttgtaaatttaggtcaatcccaaccaatacattatctcctcaacatttttgaaccaaccttttaaagtaggttgttcaaagtaacattatgatttaaagtatcattggttggttaaatgtattgacaagtaatagatgtcaatagtgaggaattaaccaagcctgtttccttaatatgtgatctttaggtaaatacacctgtcttttgctgtttctttacatttcaagttaacatagtttcaagccatacttaacatccgaaaataatctgagttcgctgcaagtagtataaattgtggttacacatagctgttcaacatctaagacttcagttagccctgtttaacaaacttttatacaacacatttctgcaattgtgataaaatgtatctttaaaagccaagtcagtatttcaagggaaaacagctgaaaaaagtcgtggaaaaaggggttggggcaaagcatttgattcagaaaactaaagaatctaattacacactgcagaagacagataaaaactaatatgaaataagcaaagtaagtttaagtttagtttttcttagatatacttagattccatatagtgataatacaaatacaagggaaaacatctggatttcatctttggcctcatttacaaagcaaaatgggatgctggattcagatgtaaatatttaattttacagtgtttaagcaccagatttactacaaaaatgcatctaaatattccagattcttttctaaatgacttccaaatgctatgagtcttcactgctcaaatactctatggtaaattccaagagtgacagtgttgtgataatgattgtgtgaataactaaaaagatttaaaaggcaaacattatctactctagtgagtatctgagaaggcagtactatctatattaggttctctaaggttgttacttaatttctgctccacatacttgacactgagaactcaactttgagtttaggttaagaaaaaataaattctaaccactccaaaaaaactgagaatattacatttctattatcttagcttaaaactaatttcacatcaagcactgatgaattttcttcttgttatgaatgagagaagtttcttccctaaggaaagcagttccctcactggccagctggacagttctggacataagggaaacagaacaagagtggcccttattggaatgtgtactatgggttcaactatagaagcgtgggagggggtggttttaatgttcgaaatgacaccacaggttttatagtctgggattcatttctggtagaatctgtcagagagaaatgcaaatgaaaaatcagattttcatttttttttcttttaaaaaagacagggtctcactctgttgtccaggcatgatcacagctcactgcagccttgacctcccagactcaagtgaacctcccacctcagcctcccaagtagctgggaccacaggtgagtgccaccacacccagctttttttatatttttgtagagacaggatctccctatgttccctaggctggtctcaaatgcctgtgctcaagccatcctcttgccttggcctcccaaagtgctgggattatagacatgggccattgtgctgggcctcaatttcttcagcagccaagttaagccaggaaaatgtagtaattaggaatactgttcaataaataatttagagacacctcttacttttatttccagaagaaagtcaacttaaacttacttgctcaaagcatgcccttactcaaattttaaaagatactacatgaccataacctatgctacagttagaaattaactgatctcttctgaaatacctactttagagaaagtgggtaaacataatatttgccctggctttattggatagcttagcccaaattttaactggcagaacacttttytaaatggagagaagagcttaaggcagagatttttcaaattagtagggatgtgagctttgctgagggtctttaaataatatgaaaacaagtcttttgagaaaaaaattgttatataattcagtaagatgtttaaaaattactgtagcagctaagtttctgcctcagtgtcattaatatttttccttactgatagaggttattgctcaaaagagaaaaaaacggctatgtaatcaactgctgtcaaattgtttcccaattcacaatatgcattttaaatagacctgctttgatagatgaaatgtttcatcaattcaacagctgaaaagaaccgaactgtaaatgcctgctctaaatgtattttctagtttaagaaatttgagatacatttttaaggaaagggcagaggtgtgtatttctttttcaattcatacagacacagccataaacatttcatcagttaacattaycttacttctgagatcaattaggtataaagatctatgattccagtttttaaaaagactatttcaaattattccccatgtaaaaaattctacattcacatactctaatgaaggcagcaatactttatgcaaaaaaaaatatacatttatttataggtctcaatacagcaaaatgaaaacgaaaattgagaacattgctcattaggccagcaactttaaaattatttaatttgaaatataaaataggtggtcttmataaaaagatgcatgaaatttaccttaccttatattttatactttaagagtacattttatacaaatcagtaaccaggcttctttcatgtttaacctgaaatgaacgtaactataaatgagtatctttcttttatgtagtagcaaaaagagtcaataatcctttcaagaaagatactatttcatttcctcccaacttggattcaccataaacacgatccacaaatgatattggaacctagtttaaaaaaaaaaaagtaacgttagtctttaaaaacaattaggcagcttagccggtataccacattaccaacacaacagaaataggattagtcctacaacagaggtccttaaagtaagtataaaattaggggattatgaaagcaactgtgtgtatctccaagtctttaaaattaaacatgcattatctaaagataggtcacatgaaacaaatctgcaactgtttaaaaagcactgattctaggtattaccttggtttactcaagtttcagtttgcatttcaaggaaaaattatactccaaaagtaaaatggccttgtgcgtagatttttcacttgtcaaatttagctacaatggtttagcattaagtaaaatagcttgtaacttccacaagagaagtgacattccatagctattttcttgctctgaataagagttttactattaaatgaggagagtcttccctaccctaagagctcactaacgagccctaaatattacagatcaccacctccttgctctgtaattcctggtcttctcttactaacaggaaatggacatatggaactcatcattcattttaaagtatggtggccattggcggtgacaaaaggaaaagaagcaaagagactcagtccataatgctgattagttagaagaaagggctaggattgagaaagtaycaggaacttttaattatttaaaagagaatgctgactgttaatgttttaaatcttactgttcaaatgtactaatatgaatttttaccctttgtgcatgaatattctaaacaactagaagacctccacaatttagcagttatgaaagttaaactttttattataaaaattctaaaccttactgctcctttaccaggaacatgacacactatttagcatcagttgcatacctcgccaatagtataattcaactgtcttgcccgaacaatcatctccatctggaagacgtagcctttagaaacacatttttctattaatttctctagaacttcttttcggtataatctgtaagaaattaaaaatatatatcaacttctggataaatacacatgcctatgtatcctgacctttcaaagagttcactggtatgtataaagcctaaaactttcrctggccattggtaaacagaaaagctcgcacacttgatgattatgatrcatttgtcctaagcaagaaaggccattaaatatttgctaaataacttagaataattgtgaaaatgaattctcagttatctttttatagaattattttcccaccatactatcagaaattagtgaaatacggtaaaatgaatcatttgatgcagaaccatccattatttaagatttccctaaaatttaaagttgaaagaaactgttccaaatattgaacaacagggtggacagatgatcatgaagcaactatatatgttagatgacaagaaagaacctcataattcacagtcattttccaataaatgtttatgatgagttttgatttctcatgatttcctttataaattccccaggataaactaagttgctctaggatgagcttgggaagctaggttaaaacaggaacgaggcatcacaggatagaaacaatcctggtgggattcacctatcaccagttgaggtcacagttagacacttaacagtgggtgaatgtgcagcctaactttagatggactgcaggccaaacaccagatttacaaagacagcggagttgggcagtccagtgggtagacccaagcactttcttcagtaactaaatagcagggagctccgtattttcagagtcacacttttttttttttttttttaaagatcagtgtctcagttcatagggaggcagcaatttctacctttttttgtggggagaggggagaaagcaagaagaggcagtttggtgtaactttgttctcttcaaagttaaggccatctggacctactgtgcctcagggtttcaccctgaatccacatttttttyccctcagacttctaaggcgaccttatcttttgactatgaagtgggtataggacagcacagcccttagaaaaacctgacagcttagtgtgtgcaatcctttatccacatagtttccttaaggattcaaaggaatcaatttggaataaatatggagagaggagaatctgatggtagcaatatttattcaataataaatatttattgaccaatgtactgggtttcaggttttttttttatgttttggggttaagaagtgaacttaaaaactcaatgaagatatataatatgtcagatgctgttaggggagggagcactgggattgtggggtgggaagaactatgatactgatgggactatgtttccacattacctttatttatatatttgtatttttggagacaaggtctcactctgttgcccagagtacagtggcacaaccatggctcactgcagtctcaactttccaggctcaaaagatcctcctaccttagcctcccaagtagctgagactacaggcatgtgccaccatgccaggctaagcaagaaaggccattaaataattgctaaataacttagaataacttttaaagttattattattattattatttttatttttttagtttttgtagagacggagactcactatgttgccagagctggggtcttaaactcctgggctcaagatatcctccatcactggcctcccaaaagtgctgggattataggtgtgagccaccacatccagccagcattacctttaaaattgggattaggctatgaaatatttcctctctttaagagttgctttattccccttaagaatcattttctaagatatttcttttcactgccacctccttcctccccatccacatggtaactttaacactgtggctagtaaaataaaatgttacatgaagccatataatcccataaatgcgattaggatccaggtggtctatgctattaaatggctttatattgactgtagcctttccaggattccttttcttattttgtaaaaagcaccttcttcctaaatctagggatttaatgacaaaaatgggctttgtctagcgacaaatgaactttaatgcatgtatttaagaaaccaccactcttatgagaagacaatgagatttaactattaaaaaaaatttttttttttttttgagacagagtctcactctgtcgcccaggctagagtgcagtgcaatctcggctcactgcaagctctgcctcccaggttcacgccattctcctgcctcaccctcccgagtagctgggactacaggcgcccgccaccacgcccggctaattttttgtatttttagtagacggggtatcaccatgttagccaggatggtctcgatctcctgaccttgtgatccacctgcctcggcctccccaagtactgggattacaggcgtgagccaccgcgcccagcctatttaaaaaattttttgggctgggtgcagtggctcatgcctgtaatcccagcacttggggaggcggaggcaggaggatcacctgaggtcgggagttcaagaccagcctgaccaacgtggagaaaccccatctctactaaaaatacaaaattagccaggcatggtggcgcacgcctgtaatcccagctactcgggaggctgaggcaggagaatctcttgaacctgggaggcggaggttgtggtgagccaagatcgcgccattgcacactccagcctgggcaacaagagcgaaaccctgtctcagaaaaaagaaaaaaaaattgtgcaattaacaggttcacttttgtctgtttggctgctctgtcatttatacagaacacagctaatcattgctgtcaatacatgaaaatccagaactcccaggccatccttcaacccccatcccctccactaatccttgtatggttctgatgcagcaaaccaccctcaccccattcctctccctgctgtgtttttcttcacagcctctatcttcacaactagttaccagttaccctaggtttttattcaaaaccatcaaaactgtggcctgtgaaatccacactggcccttcccgctgtacagagattttgtgagtgccactattctttgcattgttgccacatggcaatcagagatcttttttgtttttttttgtttttttttagacggagtcccactctactgcccaggctggagtgcagtggcgcgatctcagctcactgcaacctccacctcccaagtagcttagactacaggcccaccaccacacttggctaattttttgtattttttagtagagacagggtttcactgttagccaggatggtctcgatctcctgaccttgtgattcacctgcctaggcctcccaaagtgctgggattacaggtgtgagccacaatgcctggcttttttttgacagtcttcctctgtcgccaggctggagtgcagtggcgcaatctcggctcactgcaacctctgcctctgggtctcaagtgattctcctgcctcagcctcctgagtagctgggattacaagcgtacgccaccatacctggctaatttttgtatttttagtagacaggatttcgccacgttgcccaggctggtcttaaaactcctgacttcaagtgatccacatgcctcggcctcccaaagtgctgggattataggcgcaagccactgcccatccaccagccaacgcccatccgcaatcagagatcttaatcatatcacaaatgactctttagccttagggtatagcctcccctctctttcatccccaagttcagctctccagtctatttgcattttagttctagagaggcttcatttttctttttgactgtcaacagccaggtcctaatttgtgtgtgtgtgtgtgtgtgtgtgtgtgtgtgtgtgtgtcaattctcacatttaaggacctagattttcctgcattaagcaaaggacccaagaatcaacattatttagtggaaaaaagtatcaactagtagaaattattaagtaatgtttggggggcttgggggtcactaaagtagatgcaggggcattttatagtttcagagattaaaaaaaaaaatctggcaagttttgtcatttgccatggtcagtcacacaaagcagctcacatctactacagcaaatctagaccaccaccccatacacccagaaacagacacgcaaaactcagagggaccgaagctttgtccaaattgaacaacaaaaatttcctcaaacatatggagaacaaggtaactgagagagctctatataaatattaaagagtttaaccttttctgtagacaatgctgtaggtattcatatgaaatgcagaaaattaagtacatgctattctttggaacagattatcagtaatagcaacattccaaagagcagttgagccttaatactaatgttaacaagcacacaaacctaactgccttcagctttttaaaggaaaagcacaatatgtctccttgagatgtttaggcttcattagcaacttctaggaattttagtctgcctttttagtatcccagaataaaaacaaggtagaaatgtaaagtgtctctttaaaatatccattgtaaagaaagttagccaagaagttatataaaagtagtggaaattttcactgtacctgaaacttcctgttaaatcagatgctcctggtctcagcaagatctgagttaaaaaattggccccacggctgccaaataaaacaatcagatcttctttacaaaatacaatttataaacaagagaaacacatcgaagaacagtgttaaaatgctatactaatttcataaatgtaacattaatttcataaaaatgttatttatctagaacaaaatagaaatttttagtcaatgaaaggagacctggctaggcgcggtggctcacacctgtaatcccaggaggccaagatggctggatcacttgagcccaggagtgaccagcctgggcaacatggcaaaactccatcactacaaaaaaaaaagtgaatatatatatatatatatatatatatatatatatataaataaaatacattcatataatatatatacacattcatataatatgtatattcatattatatattcatatatattcgtattatatatattcatatacatatatattcatattatatatattcatatatatattcatattatatatatatattcatattatatatattagctgggcatggtggtacgtgcctgcagtcccagctactgggaagctgaggcaggcagatcacctgagctcaggagttcgagggcaacctgggccacatggtgaaaccccatctctatgaaacaaaaattagccaggcatggtggtgcaggtccacagtcccagctactcgggaggctgagacaggagaattgcttgagcccgggaggcagaggttgcagtgagttaagactttaacccaggtctgtctgaaatcaatcttaattaaaattacactataattatggggagaaaccctacatatttagaccaaaagtatagaacaggtcacataaattaaaactgaaggtccagtacagtaacttttgctgaatgagaccatttctaccaaaggtccaaaggtttatgctgatttttccttaataaaaaacatccaggctctaatcacaggaaaaactgtaagaaactatctgggagtatttactggaagttataacctgatcccacaaatcccgggcagcatgatagctaatccaaatacttgctatgaatacatttccagtagttatactaataaagaagttgtaacacatgtacctacctgattatttttcttttcaaatcccagccatatacacctccatttcctttgtagcgagttccagagacaatatcaaaattaccctccttttgcttcctgtagaataaattagctgtcaattagaaaaagccactgagctttcaacagtcattttcatgagctacacaaacaaaacttttaagagaagtcgacacaggctgggtgcagtggctcacgcctgcaatcctagcactttgggaggccgaggcgggtggatcacgaggccaggagttcaagaccagcctggccaagatggtggaaccccatctctactaaaaatataaaaattagcctggcgcggtggcgggtgcctgtaatcccagctactcaggaggctgaggcagagaatcacttgaacccaggaggcaggttgcagtgagctgagatcacgccactgcactctagcctgggcaacaagagtgagactccatctcaaaaaaaaaaaaaaaattagtcgggcacagtggcacatgcctttagtctcagctatttgggaggctgcaatgggaggatggcttgagccagggaggttcaggctgcagtgatctgtgattgtgccactgtactccagcctgggtgacaatggaagaccttgtctctcaaattaaaataattaattttcccaatacccttccattctgttcttgccttctttgaagcaaataatactaaaaacagcctgatgtcctgccacacttttctttgcctagagaaagataaagacaaacatacacccctaggatttttggttgcatttacaaaattgggatgcaaaaaaagtacattttgtgacctggtttctgtcagttaacaatacatatcatggggtcagatgtggtggcacacgcctgtaatcccagcactttgggaggcctaggcaggtggatcacttgaggtcaggagtttgtgactagcctggccaacacagtgaaactgtctctactaaaaatacaaaaattagccaggtgtagtggcacgtgcctgtattcccagctcctctggaggctgaggcaggagaactgcttgaacccgggacgtggaggttgcagtgactgagactgcgccactgcactccagcctgcatgacagagtgagattccatctcaaaacaaaaacaatgcaaatcatggaatcatagacatccctacaggtcaagagagctctttcccattctttttaataattgcaaaactacttcatagaatattcaactcacacacctctgtggttgtttccatggtgccctaccctctcaaccacaataaacagtgctacaataaactttttttgttttgttttgtttttttttgagatggagtctcgctctgttgccagggtggagtgcaatggcgccatctcggctcactgcaacctccacctcccgggttcaagtgattctcctgcctcagcctcccaagtagctaggactacaggcgagtg

SEQ ID NO: 97211 - DNA, 37469 bp, Homo sapiens
gcgtcctgagtagctgggattacaggtgtgagccaccatgcatgccctttttatttttggagagacgaggtctggctatgttgcccaagctggtcttgaactcgtggtctcaagtgatcttcccacctcagcctcctacagtgctaggattacagaaatgagccagcatacacagtcagcaaaatatttttaacaacatacatctcttcctgctatggtctccccagatagaaggcagggacaccaacactaaacaaccatattatccaactgcatgattcttacacatggcccctaaagtaatatactgtaccattttacacagctgcataaggggacgatttttagtccctgcttattgcttagtatttattatatatctaagaagacaggctgtatttactttggttccacttaaagttgataaactggccaggcacggtggcacacacctgtagtcccagctactcaggaggctgaggcaggagaatcacttgaacctgggagacagaggttgcagtgagccaaaatcctgccactgcactccagcctgggcgacagagtaagacttcgtctcaataaataaataaataaataaaaagttgataaatcaataggttaaaaaacaccttcaggccaggtgcggtggctcacacctgtaatcccagcactttgggaggctgaggtgggcagatcaccggaggtccagagctcaagaccagcctgaccaacatggagaaaccttgtctctactaaaaatacaaaattagccaggcgtggtagcgcatgcctgtaatcccagctattcgggaggctgaggcaggagaatcacttgaacctgggaggtggaggttgtggtgagccgagatcacgccattgcactccagcctgggcaacaagagtgaaactgtctcaaaaacaaacaaacaaacaacatcttttcggtcaggcacggtggctcacacctgtaatcccagcactttgggaggctgaggcaaatggatcacctgaggtcaggagctcaagaccagcctgaccaacatggtgaaatcccatctctactaaacacaaaaaattagttggccatggtggtacatgcctgtaatcccagctacttgcgagtctgaggcaggagaattgcttgaacccaggaagcagaggttgcagtgagccaagattgcaccactgcactctggcctgggcaacaagagtgaaactcctctaaaaaaaaaaaaaaaaaaacaaaaaacaaacaaaaaaaaaactcccatcttgcctctcccaatgggccacaaagctatagcaatctaacatttttcctcagctcccaggggtcaatccgtcctaattccctgaagctgaaatgctgagcctaataaaggcagcctaacagggccccggctccagttccatactgccaacagcaacgctcctcggaaagccaagaaaaaatgatccattttctaggctagtgttgtcaagctacaaacaaaaactgtattatgaaggttagatttgtaggagtccaaaatcaacaagccccaaaggtctccctggcatgctacaacatgccttgcgagtcatcttcaaaggataagtttgttgtccacactactgtggagcactctgatcacagggcttccacaccttctgcacacctgctgcacatatgctcaacacctggagcccttgataaaaatgtatgttctcttgttacatgagtgtctacatttgccaaaattgtacattttactctatttaattatgcctcaataaaatttaaaatataattttagacccctttgcagacctatatcatgcaatggtaggttgagggaaagttttaaaaacttgagaaccacagctctggattacatcacacataccttcccccaccccaaaatgtggaccaagaacactggatctgaagtcaagacaccaggaatcaaaacccaactccatcactaactcactatatggccttggacaaaaggacaatttcactgagcctgttttctcatctggaaattggggataaaaaacacctacctcacaggatagctatgagacttaaccaagatgcttataaaatactcggcatagtgtccaagacaaataagcactcagaaaatggtagctacattaccatcattagcgtcttggtttccatcattttaaaatcaatctttatttggtatttctttcagccctgcgagacatacccccctccccacctgatgcaaaacttttgaagaacttaaatatacacatgcctagcctcatcgctagggattctgatgcagtaagtctgggacaagggccggtttgggaactacactgctctaggaaacgcgtgacagaacacgactacaaccaggaccacaagaatgcctaagataacctgaatagctccttcgactttcaaatgacaactagtatctatctgcacctttagacaagtagtgcggtatcagagtaaggcttttttttttttttttttgagacagagtcgctctgtcgcccaggctggagtgcagtggcgcgatcttcgatcactgcaacctctgcctcccgggttcaagcaattatctgcctcagcctcccgagtagctgcgactacgggcacgcgtcaccacacccggctaatttttttgtatttttagtagagatagggtttcaccagaaaggtggcaccattccatacccaaacctcccaacaataaataaaaaagatttagtcttagttgaattctctcagagataagactgaagtatactctaggagggttcggcagtcaacaagctgcttctcctttttttttgttttttttttgaggagtctcactgtatcatacaggctgcagtgcactggcacaatttcggctcactgcaacctccacctcccaggttcaaatgtttctcccacctcagcctcctgagtagctgggattacaggcatgcaccaccacgcccagctaatttttgtattttttagtagagacggggtttcaacatgctggccaggctggtctctggtctcgaactcctgacctcaggtgatccacccgccttggcctcccaaagtgctgggattacaggcatgagccactgcgcccagcctgcttctccacctaacaggggcacccctagatagtacagaagaaacaaatggaaggaagaacaatcagtatcctgttcattcctttagcaggtcttatactggaaagatgggttttcatgatttatcagccagagaagataatgaagggaatcacgacaaacatcaaacatcaaaacaaaatataaatcctatagcatgaatatgtgtctacttagttccctaaaataagtttcaaaactaccttaatataattctccccacccagtgtaaaccggtttttctgagtgtggtctttgagtcacctgtatttgaatatgaggagcttaactgggcccactgaatctgcacttttaccaggtcattctcatgctcaatatttggaagtacttccacagtatctaaaaattttcgcctcaagtaagtcagtcttgaacacaaaagatcaaacttatgcttggtcttagagcaatgaagaaataactaacagaacgtaaataattcagaaaaacacagtggtccaccgcaaaagctatgaagctagcaattctgagtttacatttctatttcacaacgcactagccatttgaccgggcaaacgtgtcccagttttctcatctgtaaaatggaatactaccacctacctcagagccacgaggctaatgagttaccaaagctcttagtagacgactgccaggtcgggcacaatggctcccgtctatatcccagcactttgggaggccgaagtgggaagatcgcttgagaccaggaggaattcaagaccagcctgggcaacataagagatcccatctctatttaaaaaaataaaaattgaaaaattagcctggcatagtggcacgtgcctttagtcccagcaatgcaggaggttgaagcaggaggatggcttgagcccaggaggttaaggccacaatgagccatgatcatgccactgcacttcagcctgggcaacagaacaagacgctgtctcaaagtaaaaaacaaaaaacaaaccaaaaaaacccttgtggctaatggctatactcttatttgctgaatctttggaatttacatccatttccaacgatgtaatacaaaaccatgaaggatctcatattttgcattgcttcaaactcaggtgcttctcaaataaaacaaaactaggtgactgactctgaaaatggcacaggttaagaatctgttttccaaatctgttgcaagaagatggaaaaagacaaaagaactgaaaactcccaaacttttcacagcaaaatagaactacatttaatcatccatatcagagaagattcaaaaaagcagttgggtgactgggctaaggtagaagactattcaataaaaatctcacatcttgccattttccctccctctcacaatctgcatttaaacaagtcaatttcctgaaataggaatctggcaacacccaccaaaaagtccaaccatatgtaaaatggcatcacactgtaaagctcatattacagtatcaggacaattgatactttcaacagcagcaatggctgccaggcagcggtcctgaattgaagacttgtaaaggggagaaaatacacaacacagaaaaagaaacctaataaaatggggaaacggattctctgggaggagcgtatgcaactcccaaggcaaaattcagaaagatgttgtttcccctcaaaacaaagagccttaatgcccagaatgccacagttctgaatcgtgagtacctgcaaatagacagaaggaaaacggaggggatatgtgggtgagagatgacctggattctcacgagaagaagggcagccaccttagaggtgcacggaatacagtttcaggcctggtgcaactcaaggggcagttcaccattttccagtaagcccgaaattgacgaataaaagggacttaaagtattagagagcagctctttggaaacccacggaaaacaaacattggggattcaaaggatttgggaggaaaggaggtggaaatgagtcaaaagaagccttctcgaggataaaatcatgtgaccctcaggaagagaatgcccaaggagctaagaaaagggaggacaggtcctggggaaaagccctccactccaacaagcgggaagtgcataccaatgggtgcgggggggcccccgaaggtaccgctttcggagcacccgaggcctccagccggatgtcaggccacgcaccaacgagggaccaccgtgcggggacagtgtccgcgcgcgggaaaaacggcggcggggccggaaggggacagggtgggccggaagggggggcagggcgggccgggagggcgccccacggaacacttacgcggccgctttttcctcaggctttcgacgcgctggcgggagaccgaggtggggccgctgtaagagcccagtcgatcccgcctcgtgccctcagccgaggccccgaccgcgggcaccgacgcgctgctcgcccggcgccgcagtggctcctgccgccgcccttcggggtccccggccgcctgctccccagccgacgagacggaggtggcggaagccctgccgtggcgctccatgggcgcgccgagccggccccctcccatccgcagcagcagtcgctgccgcccgagcaagccccccagcgtcggattccttctcgcctcctccgcggcagtccagccagagcagaggcgcgccctcggccggccgcctcttccgttgcgccaacgcgcaggaagccaatccgacgaggctggggacggcccaaaggcctcgcgtccagtcggctccctaactcgaggaggattgaccgtgcctccgtccaatgagaggctatcgtgacggggcggggagagggtggtggaggaggggatccgggttccgcggaggaagagaaggcggtgtagcccagaagagagtgatggcggcgccgcccaatggacgcgtgggtggaagggcccgagcctcctcatccaccccctccttccgccccccacttgtgcatgcctctgcccccccgggccgcggaactctcctggggcgaccccgagtcccaccccgctgctccgtgccgtcctcgcagctcgagccctcctccagcccagcagtgctcccgcagcgtctggccgctggtcgtcggcagacgaaagggcttgaaccgcgggctgaccttagcctttgtccctcggcctagttccgcagctgccgtcgaggccgccagcccctcccccagcatgtttgggctaagccgcctcctttccgcctgcgttggagagagaggtaccagaaggaatgaaaggactggggcttgtctccatggcaactgaaagaaagaggtgggttataaatccttcgccaccctcctgtggcgaaggaggggaagtgggagccgggaagtagagttggccttttgcaggagagtctggagcccctttctgggtgatgcattgggggccatagaaggatttggctgccgctttggagcatggattttttttttaatcatcttcctttctcttttggagagaaaaattggtcacctccaggactgagaccctgacccttccaagcatccccactaccaaaggctgcccaagcccggaaggatcccatcccgttctgtactctgaggtcacttcctcactccgtcaaatttcactggactgtgggctaattaaaagtgcctccgtattagcggggcgtggtggcccatgcctataatcccagctacttgggaagctgaggcaggaaaattgcttgaacccgggtggcggaggctgcagtgacccaacattgtgcaacaagagcgaaactccgtctcaaaaaaaataaaaaataaaaaagagtgcctccctggggagactgtaatgcccactgggcagtgatcctaatgccccttgggcagtgatccttattcccctctcccataatgattggttgtagcaggctgaacaaaaaggttgagcttcrcttgtgcttgctgaatagaattctcacgcccactccacgttagctcccctcactgtaggactagctctgaaaattctagctcctgtaggaagccaacacagacggatctacaagaaccaaaaacagctatagctactcttctaaatctcagtgcctgacattgcctctctttctgcctcctytctccaccccccaaaaaatgtggtcctccttgacctgagggagcttccgtccaagtctgagctctgatcatcctgaagaatcaaagtatcatcatcccttggctggcaagatgaactccaacatcaaaacacttgaaacagtagtatttttacacaatttgcccactgcctctacatctcacttagtccttgcagtaacatttggatgatgaggtaacttatccagaagcacaaagcctaaagaatgacagagcttggactcctgagaagttcagctactgcccgccttatgataaccaaaagaaagcggccgggcgcagtggctcaactcctgtaatcccagcactttgggaggccgaggcgtgcgaatcacaaggtcaggagtccgagaccagcctggccaacacagggaaaccccgtctctactaaaaaaaacaaacacaaaaattagttgggcgtggtggtgggcacctgtaatcccagctacttgggaggctgaggcaggagagtcacttgaatccggtaggcggaggttgcagtgagccgagatcgtgccactgcactccagcctgggagacagtgagactccgtctctaaaaaaaaatgaataaataaataagaaggcacaccacaagttcgagaccacttctacaaaaaataaaaaataaaaaaaattaggccaggcacagtggctcatgcctgtaatccaagcactttgggaggctgaggygggcggatcactggaggtcaggagtttcagaccagcctggcccaacatrgtgaaaccctgtctctactaaaaatacaaaacttagctgggcgtagtggtgcgtgcctgtaatcccacttactccagaagctgaggcagaagaactgcttgaacctgggatgcagaggttgcagtgagctgagattgcaccactgcactccagcctgggcaacagagtgggactctgcctcaaaaaaaaaaaaaaaaagaaaatgaagatgaccaaatgggcttctagatggctaatgatattctgtttctttgatctgggtgggggttacatgggtgtgttccctttgtaatatgttatcaagacattttgtgcacttttttgggtattatactgaaagaaaacatttattttttaaaaagttgaaaaattgccttggagcagagtaaggtaaatctatgattaagcttagatttttttattttttattttttattttttttcaaaaaaaatgaggccaggcgcggtggctcacgcctgtaatcccagcacgttgggaggccgaggtgggcagatcacgaggtcaggaggtcgagaccatcctggctaacacggtgaaatcccatctctactaaaaatacaaaaaattagccaggcatggtggcaggcacctgtagtcccagctactcgggaggctgaggcaggagaatggcatgaacctgggaggcagagcttgcagtgagccaaggtcacgccactgcactccagcctgggtgacagagcaagactcgtctcaaaaaaaaaaaaaaaagtaaaatgaacctaacaagaggcatcctttctctgtggttattatagtgagaactaagttctttatcactctccggttatttacccctagagagaagccaactttctggttgtatacaccagaataagtacaagaatggtaagcatagagcttcagagaaactagccagattctaaaggaatgacttgaaaatcgagagccgtttcaatgacaaaacatcatacaaaatattcatctaccacattagaggcctatcgctaggtaaaaacaccaaaacttcagcttaaacagtagtatgtatgtatgtattatcccagtttctgtgagtcaggaattcaggattgataagctgggtggttcttgttcagaatctttcaagaggttgcagtcctctgaaagtgtagtgggttggggtatccacttccaaggtggcttgctcatatggctggcaagttggtgctggctgttggcaggaggcctcagctcacaatgcaggctttcataggactacgtgagtgtcctttcaacatggcagcaggccttccctagagctaktgaaggatgagaaaacgacaaatcgcaatgtcttttatgacctaggctgggaagttatactccatcatttatgcaatatcctgttatcacacaggtcatccctattcagtgtaggttggtactacacaaggacatgaatatcaggaggaagagaatctctggaggccatcttggagcccatagtccgccttctgccccctaatgattcacgtcttcgtctgttcctgctctctaagagccaggaggcagacttcccttgagctttcttgcagctaaagtagagcatcattagcagtaaaaattaagatatcatcacaaaggccaggcacggtggctcacgcctgtaatcccaacactttgggaggccaaggtgggcggatcacctgaggtcaggagttcgagacatgcctggccaacatggtgaaaccctgtcttcactaaaaatacaaaaattaacctggtgtgttggcgggcacctctaatcccagctacttaggaggctgagccaggagaatcacttgaaaccagaggcggacgttgtagtgagccaagatggcaccactgaacttgagcctgggtgacagagcaagactccatctcaaaaaaaaaaaaaaaaaagacatcacaagattgccaggcacagaggcttaaacaccaagttctttctcatgtcatcgtgtttcgtcggtgccgaggacatgaggggtgtagatcaggcctgtttcaaacacaaggccttttggccagagtgtaatggtgtgaggacttgggaagaccttacctacttaactgtctctctcaaaggacaaaggtatgagggggttaaaaaaaaaaaaaaaaaggcaaagctatgaagaacatgaagttcttaagcccctagacactcttccaaggtctggcctgtatcccagagtccactgctgaaaaggggcagagatgtgtgttatatgcgcacatacgtacgcatagtatagctagcatatggcattctggtggcctcgacggagctcacaggcaatataacagcattgactgctttcacagtttccacttgtctcaggaaaatagagaaaattcaagatgaaatacagtgagtttaggacaactcagtttcctaaatatggaagatcctgtcccttcccaagtattgaaagagatgaaaattttcccttagttttcaagctcaaagtctatcttatctttgactaaatagccctgatttggatactgttaacttgctcttaactactaatagtctagtgcttttactttattttattttatttattttctttgagacggagtctctgttgcccaggctggagtgcaatggcactatctcggctcactgcaacctccacctcctgggttcaagcgattctccttactgagcctcccgagtagctgggagtacaggcgcacaccaccatgcctggctaatttttgtacttttagtagagatggagttttgctacgttggccagggtggtctcgaactccaactcaggtgatccacccaccttggcctcccaaagtgctggaattacagggatgagccactgcacacagcctatttgttttttaagagacgtgatctcgggaccaggcatgatggcccttgcttaatcccagcactttgggaggccaaggcaggcggatcacatgagtccaggagttagagaccagcctgggcaatgtggcaaaaccccatctctacaaaaatacaaaaattagccaggcgtggtggcacatgcctgtggtcccagctactcaggaggctgaggtgggaggatcgcctgaaccagggaggtggaggttgcagtgaaccaagatcgcaccactgcactcagcctggaccacagagcgagacactgtctcaaaaaaaaaaaaaggatctcactctcaccgagtcacatttcaagtagtcaatagccacaagtaccaggcacggtggctcacgcctgtaatcccagcactttgggaggccgaggcgggcagatcacgaggtcaggggatcgagaccatcctggctaacatggtgaaaccccgtctctactaaaaatacaaaaaattagccgggcatggtggcgggcgcctgtagacccagctgcttgggaggctgaggcaggagaatggcgtgaacctaggaggcggagcttgcagtgagccgagatcgcgccactgcactccagcctgggcgacagagcaagactccgtctcaaaaaaaaaaaaaagaaaaaaataaatagccacaggtgtctagtggctatcacaaacagaaagctctaattagtaatttatttcaatggcctcctaagagtttgttctgcctctagtctctactctccaggcccacagctcccagggtaatcttattaaagcattctcctgtttataatctcgcctatgttaaaaaggttatggtggcttctttgcctacagaatgaagttcaaacaacttgacatccaaggagctccaccatttggtatcttcccactttttctttttcttttttttttttttttttttgagatggagtctcactctgtcacccaagctggagtgcggtggcacaatctcggctcactgcaagctccacctcccgggttcatgccattctcctgcctcagcctccggagtagctgggactacaggcgcctgccaccacactgggctaattttttgtatttttttagtagagacggggtttcaccgtgttagccaggatggtctcgatctcctgacctcatgatccgcccgcctcagcctcccaaagtgctgggattacaggcgtgagccaccgcgcccagcatcttcccactttttctcattgctttattatgcttgcataactgttctaacaaaacaaatctcacaattctctagataagccttattcttacccagctttggctcatccttcatctctacatcttttttttttttttcttttgaaacggagttttgctcttgttgcccaggctggaatgcaatggtgctatctcagctcaccgcaacctctgcctcctgggttcaagcgattctcctgcctcagcctcccaagtagctgggattacagggatgcaccaccacacccagctaatttttgtatttttagtagagatggggtttctccacgttggtcaggctggtcttgaactcccgaccacaggtgatctgcctgcctcagcctcccaaagggcatctctacatctctacataaaattccttcccgccacatttctgcttatcaaaatccaatccaacttctatggcatggcccaaatgatacctcctccttaatgtcttcattgattaccacagttcactgtaaacctgatctttttttttttttttttttttttttggagacagagtctgtctctccatcgcccaggctggagtgcactggcgcaatctcagctcactccatcctccatctcctgggttcaagtgattctcctgcctcagcctcccaagtagctgggactacaggtgcatgccaccacacccggctaatttttgtattttttagtagaaacagggtttcaccagtctggtcttgaactcctaacctcaggtgatccacccacctcagcctcccacagtgctgggattacaggcatgagcctctgcacccggccaaccctgatttttttttttttttttgagacatagtcttgctctgttgcccaggctggagtgcagtggcacgatctcggctcactgcaagccccgccacccaggttcacgccattctcctgcctcagcctcccgagtagctgggactacaggcgcctgccaccacgcccggctaacttttttttgtatatttagtagagacggggtttcactgtgttagccaggatggtcttgatctcctgacctcgtgatccgcccrcctcggcctcccaaagtgctgggattacaggcgtgagccaccatgcctggcccttttttttttttttttgagacagggtctggctcagtcacccaaggtggagtgcagtgacgcaatcatggctcactacaacctccacctccccggctcaagcagtcctcccacctcagccactcaagtagctgggactgcaggtccacaccactatacctggctaattttgtattttttgaagaggcagggttttacaacgttgcccaagctggtctgaaactcctgagctcaagtgatccgcccccctcagcctcctaaagtgctgggattatggtgtgagccaccttgcccagccttatgtcactctcagtggcatttctcatacttcctggtcctaagattcttggtgtacacgttgtataatcccaactagatatgagagctatcagattaagactttgcatctttacatcccccagtacctttcagagtgtgagtgcacacacaccatttgctaaggaatgattgcagtgacaataccaagtttaggatcccttaaaatacctatatcttgggcagaggttgcattgagctgagatcatgccgctacactcagcctgggtgacagagcgagactccatcttcaaaaaaaaaaacagtccgggtgtggtggctcacgtctgtaatcccagcacattggtaggccaaggtgggtggatcacaaggtcaggagttcaagaccagcctggccaacttggtgaaaccctgtctctactaaaaatacgaaaaaaaattagccgggcatggcggcggggcacctgtaatcccagctactcaggaggctgaggcagagaattgcttgaacctgggagacggaggttgcagtgagccgagatcacgctactgcactccagcctgggcgatagagcgagattctgtctcaaaaaaaaaactacatcttcatagtggacatatttgacatctacccaacttacaaccattcctcctatagatcatagattaggccccaacagccatgtttgtacctcctaaaccccaccaccttggaatagagacttacttctcaaagtgtgatgccacattcctcgtggggtcaaagaagcagaaaaaattggtttgcggccgggcgcagtggctcacgcctgtaatcccagcactttgggaagccgaggcagacagatcacctgaggtcaggagttcgaaaccagcctggccaacatggcaaaaccccatctctactaaaaatacaaaaattagctgggtatggtggagggagctactcgggaggctgaggcaggagaattgcctgaacccaggaggccaaggttgaaatgagccgagatcgcaccgctgcactccagcctgggtgacagtgcaaaactgcatctcaaaaaaaaaaaaaagtaggtttgcacagagctccaagagtgaacagatgaacagaacagaaaaagcactttgccagctctcccagtcctgcctgtttctatccattccctaggctgaatacattcctgtctgtgttccatatgtctccccccgcaacattaaaataagtttattaagtctcccgccccatattttaatctagcttacattgtcttctgttacttggaaccaagagtctttttttttttttttgagacggagtcttgctctttcacccaaactggagtgcagtggcacaatctcggctcaatacaagctccgcctcctgggttcatgccattctcctgcctcagcctcctgagtagctgggactacaggcacccgccaccatgcccagctaatttttgtttgtttgtttgtttttagtagagacagggtttcaccgtgttagccaggatggtctcgatctcctgaccttgtgatccacccgcctcggcctcccaaagtgctgagattacaggcgtgagccaccgtgcccagctggaaccaagagtcttaattaaacaatcatgatggagaccaagcccacatttttcaggtcacctaatcctggcctctccatgatccagtaacctgagttacagctttcctaccataaggacttagagctaatttcttaaagcctgtagtggaggctgaggcgagaggattgattgacacaaggagtttgagtccagcctaggcaacataccaagacccagtctcttaagtaaattttttaaaaaatcaatttagtttccaaatgagatcaacatattaacatattatatttgattgctttgccttttttttttttttttgaggtggagtttcactcttgttgctcaggccgaagtacaatggcacaatctcagctcaccacaacttccgcctcccaggttcaagcgattcttctgcctcagcctcctgagtagctgagattacaggcatgcaccaccacacctggctaattttgtatttttattacagatgggtttctccatgttggccaggctgatctcgaactcccgacctcaggtgatccgcctgcctcagcctcccaaagtgctgggattacaggcatgagccaccgcacctggcccaggtttgatttctttaaaagaattcttcacaggtgctatttacctttttaaacattatttttctatttttgttttgtttttgagacggggtctcaccctgtcacccaagcaagagtgcagtggtgcagtcacagcttactgcagcctcaaacccctgggttcaagcaattctcccacttcagcctcccaagtacctggaggtacaggtgtgcaccaccacgcccagctaattttttttttttttttttttttagagacaagggtctcactatgttgcccaggctggtctcaaactcctggcctcaagcgatcctcccaccttggcctcccaaagtggttcccacttataagtgaaaacattacaggtgtgagccaccatgtctcactatttactttttattcatctcatcaagagaagagaaattcataacattaactacttacgttaggggctacagcccctaccgtaattttctaatcaggtagtttcttctatgcttggttaactggaatttgtgtgtgtgtgtgtgtgtgtgtgtgtgtgtgtgtgtgacagagtctcactctgtcacccaggctggagtgcagtgacacgacctcagctcaccgcaacttcctcctcccaggttcaagcgattctcctgccccggcttcccgagtagctgggattacggctgtgcaccacgacacccagctacttttcttttgtatttttagtagagatggggtttcaacatgttggccagtctagtctcgaaatcctgacctcaagtgatccacctgcctggcctcccaaagtgctgggattataggtgtgagccaccgcacccagcctaactggaatatttctataaagaatcttccctcatcaactctttgttatcctgaagtacctcaacctcagcctccagaggagctggaactactcaaatagaaaaggcaggatcaattctttccctttactgaccagttttcagaatgagttggtttcctggggcatcctctagaggtcaacaatgaattctttttagtattatcatgaactggtggctttttttttttttttttgagacggtctcactctgttgcccaggctggagtgcagtggtgcgatctcggctcactgcaacctccgccttctgggttcaagcgattctcctgcctcagcctcctgagtaactgggactacaggcaagtgccaccacgcccagctaattttttctattttagcagagaggaggtttcaccatgttgcccagggtggtctcgaactcctgagctcatagaatccacccactttggcttctcaaagtgctgggattacaggcgtgcgccaccatgcctggtgktttttttttttttttttttttttttgagacggagtctcacactgttgccggggctggtgtgcactggcgtgatctcggctcgccacaacctccacctcccgggttcaagcgattctccttcctcagccccctgagtagctgggactacaggcgcgtgccaccacgtctagcttatttttgttttgttttgttttgtttttttgaggcagagtctctgtcgcccaggctggagtgcagtgacgctatgtcggctcactgcaagctccgcctcccaggttcacrccattctcctgcctcagcctcccgagtagctgggactacaggctacctgccactatgcctggctaattttttttttttttttttttttttttttagtagagtcggggtttcaccgtgttagccaggatggtctcaatctcctgacctggtgatccgcccacctcagcctcctaaagtgctgggattacaggcatgagccaccgcacccggactgtatttttttttttagtagagacggggtttcactatgttggccaggctggtctcaaactcctgacctcgtgatccacctgccttggcctcccaaagcactgggattacaggcgtgagccaccgcgcctggccaactcatggattttaaaagcctatttgatgagtttcagtccactggagtcaggtctttttttttttttttttggaagtgctgtgatcgtgactcactgcaacctctgcctcccaggttcaagcgattctcctgcctcagcctcccgagtagctgggactacaggcgcgtaccaccatggccagctaatttttttgtatttttagtagagacggggtttccccatgttggccaggatggtgtcgatctcctgacataatccacctgccccggcctcccaaagtgctgggattacaggcatgagccaccacccagcccaaagattctatattatatatacagttttccactttttttttcctcttagcaaaacatcatggagttcactccatagcagtatagagatactcatttctattcacagctgcatagcactccaatgtagatataccttggtttattgccaatgttctgtagatggacattgtctgagttatttccagkcttttgctatttacacagtgggctataatgactagccttggacatatatctttatttttgccaatgttatctttggcttagactactagaaatggaattgctgggtcaaaaaacacatgcatatgtcattttgtaggacagaatcaaattcccctcctgaagaggcagctgctataatggtgcttccagtggttcctacttctgggtaaattgccccttgactgcaatttacagaagtgatgggagtggatgcagaggctcctgcctgtaatcctagcactttgggaggctgagccaggaggatcacttgagcccagcagtctgagactaacataggcaacacagtgagaccgcatctctactaaaaatcatgaaagttagccaggcatggtagcgtgtgcctctggtcccagcaactcaggaggctgaggtgggaggattgcttgagcccaggagtttgaggctgcagtgagacattctactccactctactccaacctgggcgatagagcatgcccttgtcttaaaaaaaaaaaaaaaaaaaaaaaactgctgggatgtcactttcaagattaagtaccaaaggactgtgacttctgttttgctctcatacattctctgtctgagagctgggagcttgtctttaagtagaaacccacccatccccagggagaaggcaggagggaaaaggaggagaggtcacagacaagccccctgactctgttgatcttcactgcagtagcttctcattacaagcaggcatctggccattgtagaccattataactgtagttctagaagtaataatagcagatttattgtacagaagtgtccacgggctcacaattctaaggacatcatcatgacagcaagtaggaaraaaaattaaagtaattctttcaccaattaccagtttatctcttctccaattcctttgsatacgcctcctgcaagaagccgatttccagctgtatgtgataatgaaagggtttttctttcttatgttaaatacaagcgaagtgattaactggaagatagcgtctgattgcgaggwaatcagtgattcagatggtgtgggaatggcacctggggatgggggaggcaggacggagatggaggaagctggtgcagcctagcctgccttgtgccaaggacacccaagggcagagggactgagctctgggggaggacagatttgacataactggtccagcctcacagtttacaggtcctggagggtgaggaaagtgggagctggctgcggatgcaggacaagaacccagggcttcccttcattttgcctgccctgccacttcctcccgccacttccacccttcctacccctccacctcccttgtgcctttcactgccttttacagcatttacattacacttcagtaaaaagttgtggttttggctggttttttttttttttaaataaaaacagcactgaagaagtagaaggaagatattcagggtttttatttttattttttgagtctgggtctcgctctgtcacccaggctggagtacagtggtgagatcatagctyactgtagcctcgacctcccgggctcaaagatcctcacacctcagccttccaagtagttgggacyacaggcatatatcatcatgcctggctaaattaactattttattttaagagatgtggtctagctatgttacccaggctggtctcgaactcctggcttctagcaatcctcccacctcagtctcctgaatcactgggattacaggctggggccatcatgcccagctctaggtttttaaaatgtaggcaaggaggtcagcatttacacaaaagcagggtttgatcttaggaagcttaataaagagaggggtctaatcaaggtttcctgtaggatctgggctttaagttaggccttaaagaacgaagaatgtttgtgggtgtagtaagcaatgacttggagcagagccctctagccattgggctcaccctcacaggcaggcgccactgaccctaggggggtgtaggcagctggaggaagtactgtgtgtcccccattccagcgatggtggcccctctcagagtcaatacccttccttccaagagactgaacatacaactggacaatggccaggccacatrtgacaatagactctggccagaaacccatraccagcctgggaagccaaggaagccaaaccacagcctcagcagcaatcggacccagaacagtctgaacttagtggctgccagcttcttcccaatccccagccaccacaccccctcttccaactccagaccaaccagagaaagccaaatatacccccccaaccaaccaaagatgcccctccagttagtccgctctgtccccatgccaacaatctccaatcacagcacacccagagccttccctttttttccactataacatttcacagtccctgcctgcctttgacccctgccaaatacaagcaatcatggctgactcctttgcaaactttgaccaaatggcctctctgctcttgtttaggtggtttttatttccacatctccaacagggagtctggaaacaaactgacaatactcrtgaaatcaacacccagatgaggtagaccagcactccaggatgcccctccccagtatccctcccctgttaactgttcccctggcttctaacaccatggatcagttttgcttatttctgtactttttgtaggaagagaatcatacaatgaattctctcttgatgatgaggactctgacctcttttgcttgacctcatgtctgtgaaatttatccatgttgctgtgcatagcgatattttcattcatattcgttgctgtgcagtagtattcgaccctgtgacttcactgtagcttcaactgtggatggacatttgggttggtggatggacatttgggttgtttcaggtttggggctacagtcagcgtgtggttagaaacattcttgccaatgtctcggtggacatagctttctgtggtgtacatacccaggagtggaactgctggatcagtttatacgtatgttcggcttttggtagatactgccagttttccaacagggtcacaccagcttggtccattcaggttacaatgaaacaccttagcctgggtaatttgtaaacaacaaaaaattatttctcacagttctagaggctgggaagtccaagatcaaggtgccagcagatccagtgtccagggcgggctctctgcttcagagatacggtgccttctcactgcatccacacatggtagaagggacagaagggctccctcaagcctgttttataaggtgctaaccccattcatgatctccaccctcatgacctaaccacctcccacaggccccacatctttattatttttttgagatggagtctcgctctgtcacccaggctggagtgcagtggcacgatctcggctcactgaaatctccacctactgggttcaagctattctcctgtctcagcctcccgagtggctgaaattacagatgtacgccatcacacctggctaatttttgtatttttagtacagatggggtttcaccatgttggccaggctgatctcagactcctggcttcaagtgatctgccccctgccagcatcccaaagtgctgggattacagtcatgagccaccatacccagccccaaaggccccacctcttaatgccattgctttgggggttaggattcaacatatgaattcaaagggtacacctacattcacaacacagcactgacttagattccctgcaaaacccatgagagtttcatttcctccatattttcatcagcatttcatcttgtcagatttactctctataggttctaagtattattccccctctgctgatttacttattataaacagtacataactgatcagataaacacttgtccctttgccacccctaatgcctgcccccacttcatattccaggaacactccattaaaccaccccctactgtactggtgggtggtgggagggggctyatcgggtggggtctttgccgtattattctgtgtcactgaggcctatcacagtgctctgcacatgtaggtgcaaatatctgttgtatgattacataaaagaatgatgtgaaagcctatttgtctgtaccacaatcatgaacgtccccaaccacttgaaggcactcatagtgtcttaatcatcttaggccttcgatctggcataggtaactcctttaataaacaatgtctgctaaaccaaatggcttcctgaggcctggcattttaggctgtgtcccctgccccacctcgcccagcctggggcattgagcctggctgggcacacacgtgatagttgtaatcatattgtcataacatccctgagactacattaattacatattgagtgttatagtactattatagcaggtggcagatgttggcacactgggcagagatgtgttggtgtgaaaaacctctatgtactttaaagacagggtctccctctgttgcctaggctgaagtgcagtggtgccatcatagctcactgtaacttcaaactcctgtgctcaagtgatcctcccacctcagcctcctgagtagctggaacttgaggcacataccaccacacccagctaatttttaaattttttgtagagatagggtctagctgttacctacactggttttgaactcctggcctcaagcagtccttctgccttggtctcccaaagtgctgggattataggtatgatccaccacctccagccaaaatctcactttaagtggggtccctaactccagacatgtgataagctgtggttcacaggcataaagaacatccagcctggggccccggggtcagagttttccctcgcattgtcccctgggtccttcatccctcctaatcttgcaaaccagctgtcaattgggttgagatggtatctctttcatagggtcattatgaggattaaatgacttaatatatgtaaagcacttagcttaatgcctggcagacagtaaggtatggagtaagttgtaacccttattattattgctgttgctgttagcaacagagtgaggaatgctaggagtgaccatgcccagcaccgaatgaggccttcatagccttgggctaaaagaaaaagagcagaaaggtgaacacaggggaaggcctcaatttcaacacagatgcattagaccaaggactctgaactcactttccctggaggtgggggtgctatcagctgcttaatggagcatcatggaaaatgtgggactcaaggcctgaaggactccattcctaagagatgggagcaggagacatgctacggagtttgaatcttgcctagcacagggatttctgcctgctggaagggctctgtcagggcctagtggaagcccctgcctcagtggggcaaactgccactggacacacccatcattcatcatcacctctctgggacagtagtagcagccaggcacctccaaagagcttgacaacagaggaacccgcttcggcccctcctctgaagacaggatcctgcgctactccaactctgaactggttcaaggtgagagacgtcatccacagaggccacaaaaccaagaggtggatgcctcrttgttacttcatgctgtctgggagcaaagagagggccttaggcacaaaatcctccagacccgcatctgccccttggctttctcaacccttcactctccaacttctataaataacctgtacagtggccaggcaccgtggttcacacctgtaatcccagcattttgggaggccaaggcgggcggatcacttgaggtcaggagttcgagaccagcctggccaacatggtgaaaccccatctctaacaaaaatacgaaaattagccaggtgtggtggcgggcatctgtaatcccagctacttgagaggctgaagcaggagaatcacttgaacctgggaggcggaggttgcagtgmgccgaagttgcaccactgcactccagcctgggcaacagagcaacactctgtctcaaaagaaaagaacctctgcagaatgaggggaagcagggaagcaggcaggggtgaacaagatggccatgaattgataattactgaagttgggtgatgggctcatggggatttgttattctactctctctacttttttgtgtttgaaagttcataataaataatgttgctcaaaggaagctattaatagtttgaggccaggcagggtaaagagcatctcctagatttttttttttttttttttttttttttttttttttttagagatagggtcttgctttgttgcccaggcttgtctcaaactcctggcytcaagggatccycccacctcggcttcccaaaatgctgggayyacaggcacaagccaccacatccaacctccctcatatttgactaagaagtctcataaatctgagaacacctagcaaggaattaaggcgagggtgtggcactgttctggcttcagtctatcaccaggcagagtccacgcattcttcccagggagaaagaagcagtgacagctcttgggctttgagggaaatgattcagcgggagaaagaaggtggagaggggctratatgcagataccattgctgcaggtggctctgcccctaagcactgaggagggcactggtccctctggccccacccagccttcaccccaaggtgaagtaygctttctcaggtccccaaggatgggtggccaggtcccccactgggagtggaggtctcactcccttccttgggttctgacctccacattatctggctgtgagggtgacctgcctggctttccccaccaagtgcagctccccgcagctgaaagccacactctcaacacaggactcctgagatctgacactggccaattcacaccctgcttgaagctggcatttgagaggccttcaggttgacaacagcagcaacaagtttgctgttcaaagtaggccaagtcacggctttgagcggcatcatttgaaaagtgctgggatcagccaggcgcagtggctcactcctgtatcccagcacyytgggaagccaacgcaggtggagcacttgaggtcaggagttcaagaacagcctggccaacatggagaaaccccgtctctactaaaaatacgaaaattagtcgggtgtggtggcaggcctctgtaatcccagctactcgggaggctgaggcaggagaattgcttgaacccgggaggcggaggttgcagtgagctgagatcatgccactacactccagcctgggcaacggagtaagactgtctcaaaaaaagaaaaaggaaaaaaaaaagtggtggggtttgggtgcagtgtctcacatctgtaatcccagcactttgggaggctaaggcaagatctcatgaggccaacctgggcaacataacagcatgacctcatctctataaaaaatttaatttggctgggcgcggtggctcacgcctgtaatcccagcactttgggaggccgaggcgggcggatcacaaggtcaggagatcgagaccatcctggctaacacagtgaaaccccgtctctactaaaagtgcaaaaaaattagccaggcgtggtggcaggcgcctgtagtcccagctactctggaggctgaggcgggagaatggcctgaacccaggaggtggaggtcgcagtgagctgagatcgcgccactgcactccagcctgggtgacagagcaagactccatctcaaaaaaaaaaaagaaaaaaaaatttaattagccaggcatggtgacaggtacctgaagtcctagttactcagaaggctgaggcaggaggatcgcttaagcccgggagtttaaggatacagtgagttatgattgcaccacttcgctccaggctgggtgattctctaaaaaaaagaaaaaagaaaaagatgggaggatgggaggcggggctaggggactgggaaggtccctcaaccctttctacatgccttacccagggtatctcccatcatggctggttactgtgctaaaattataattttttttctttgagacagagtatcactcggtcacccaggctggagtgcagtggtgcgatctcagctcactacaacctccgcctcctggcgggctcaagtgacttatcttcccacctcagcctcccatgtagctgggactatagatgggcgccgccatgcccagttactttttgtattttttacctaggctggtagtgtgctaacattctaccacttgggcaacagtcttcggggctacatactgcctttttttttttttttgaaacagaataccactctgtcgcccaggctggagcgcagtggcacaatctcggctcactgcaacctccgcatcctgggttcatggaattctcgtgcctcagyctcctgaatagctgggattacagacgtctgccactacacctggctaattttcttatttttgtagagacggggtttcaccctgttggccaggctggtcttgaactccagacctcaggcgatctgcccaccttggcctcccaaagtgctgggattacaggcgtgagccactgcgctcggcccatgttgcctttttgagatacttttttcaaagctaccctggaacggtaatacaataaaactagtacctgtgcataaattgttaactgacctgcccagcatgggtacctaactggggtttagggtagggggacagagggctttttaagattggtggtgggggatggggattaatacagacagctcgggtagggtccactcctggttccagggtgcaggttgctggacttggagcatgggatgaagagatgttcagagatagagatcattaggttgctgaactcccctagggcagtggagtgaaaaagctgtagcagccaaggcagggtgtagatccctggaggctgacggcttggggtggggccacagtgagcccagcccctgatggctctagttcttgtcccttgcagagctcagaaatggaggtggctcctgtgccttgtccagcaatggttccctgaaaagaacccataaggatacccccaatccaccccaatgtgtttctggtgttattgtagataatctccccaacagtgggtgagcttggggtgagggaacctggctgctgggagtggaaacgccctatatcctccatcctgtacagctgcccagtggacatacctctctccccagcaatttctcaaggcacaagataaagtaaggggcaaatacaaagataaagctgtgaggcaggagggtctgagtctgcctctaaaggagtagccaagactcctgtttctctgcatttttctttttcttgagacagggtctcgctctctcacccaggttggagtgcagtggcacgatcctagctcactgcagcttcaagcttctgggctcaagtgatcctcccacctcagcctcccaagtagctaagacgacaggtgcaccaccacgcctggctaattttttaaacttttttgtagagatggggtccctgttgcccagcatgcctggaccctcaacacttaatagtgataataacatatatccaacccttggtaaatgccaggactcatcctaagacctacatcgataaacwmctttaatcttcacaacactgggaaatatatatatatacttatcctccttttacaggtgagaaaactaagggacagacagataaatcccttgcccaaggtcacagagctggtgagaggcaggttgggacgcaggcctaggctgcctgtgctgcagagctgcacccttgaccactgtgcactctgcctctcatgccctcagctctaccaggttgggcaggagagagatgggagaagcagtggccacttgctctgggccaggcacttggcaaacacctgtaggttcaatctcagaagaacccagtgaagaatgagccagatactcactgtccacgtggagaagcaagaccagaagtctgacatctgccaaagccacacagccccggaagtgagggagctgaaatccaaacctctgcctgagctctgcccaccaggtgtctcctccccagcccatgtagggagctgaagagaatggagaccagaggggagggaaagaggaggctggagaggagctccacaggtcttcctcaggcctgacagctgcccctggcttccctgaggtccacaggaacctccagaccttcccaggattgcccagcaggggagggggcccagtggggcaggaactcaaggcagwtgggctcctggagagcagccaccctgccgctcctgcctgcctcaatgcaacggtctcaggctgggctgccaggatgggaggcaggtcttgtggagtcgcccacacaccacatacctgccctgaggccttcagggaccaatgcaacaggagaggcattcccaagcaccacatgttccagtggtscctcctgctccacctgggccaacagggctgaggcctggaggaggaagctcctctggaggacatggatgataacctggattgccagtggggaaggtctggagcactgggggcagcccaggacccagaaagccaaggacggggacccacacaaggcaccgtggggacagagatgctgctctcaggacttggttcagccaaggcatgtcctgctgccaggcctgcagtcccttaactcccctctgacccagcctccacaatccccaagaaagggacaaggggcttcggagaggggccrggtrtactgcaggaacggaacagatgggtggtgggaagagcccagggcttcactagtgcagacgccgccggtacagcaccaccaggagtgtgactaccagcacccctgtcacagccacctggagccacagagccccaggtgagggcctgtggcatggcacctccctctcctggaacttccggtcggcttgtggcctggggccrccatccgggtccgcaggtggcccagggttgccctccaggagctggatgctggggttctcagccacgtggatcccaaaggtgccctcggacttatactcattctcctctgggccatggcagggccccatgcccaaggaggtgctggcactgatggcaagatcctcgaagcagcccgagaacgggctgtctacctgggatgccagcacgccaggcttactcagctccgacccaaggcycctattctcaragctgctgtctagccaggctgagctgcctccagtggcgccggcgggtgttggagctgctggggtctcctgggaaagaaaggagagcactggaagggactggggttggcagggagacgaacctggtagggcggtcccattcccaggccagggcatgaamtaacactccaacccctcaattcccaatctataatgcccctaggccaccttttcttggagcagtgggggtagaggggaccaagaatctgcaccaatggtggcctcctccagggcagcctttccctactccctggcctgcctgtgagctcatgcccacctggaagcctttggtagggcggggctccatcctgcactgacatcctgcctgggcctgagaactagagagcagccacagggtcagaggcctggccatgtgcccaaagggccctatggacttggctcttcccagcagacagccgcagctagggttagatgtgaggcttggagcaggcaacaatggggggctgctgggtccgagtggctgctccaggtgggactgcgttctgtaaagcctggccatggagggacacaccaggcatcctggtgaagagcaaggcaagaggcagatgggccactgtgctgtccccgtcactgcttccttatgtgcaaaacggcaccgctcggcttcactaggaactacgagccctaaatgaacttatacacctgaccagtgggtgccccctgtggctgaccctcctgaggtgtccagacttagaagctcaatgactgttcctcctggagaacatggtgtggggcctgcatgaggctggttctcaactgtctgtatgccctcaaggagaggccacagagcagcacaggctggacacagaatgcagactgggaaggggccaaggccagggccaggtgggcaagctgtcccgggggaaggggccaggatccctgccaggaagggcgaggactcacctcatttctgctgctcccgtcagtggggactgtgctggcagacaccttggtgagcaccatgctagtaggcactttggatggcaccatgccagcacgggttgagttgatgggcaatttggatggtgctggattggtgagcgcattagaaggcactgcaccagggggctttgagctagttggcaacttggagggcactgtgctgacagatgctgggttggcaggcactttcagggccactgtgttcacaggcatcaaggtggtaggcactttggagggcagagagttggcaggtgcctctgccccactggagcagatgataggctcggcctggtcactctctgcaccctgtttaccctctgcagcccctgcagaggccaagccaggggatgaggaggagaaggaggtgccagtagatacaactgaccctgtgggtccaggcaagcggcttgccctgggggtggaacgggccaggggctggaaggagacagatggagacacaggcccacgggatggtgtgaggctggaggtcgcacctgccggtggaaaaacacaagtggaaacacagacccaaagaccattaccttgaggcctggagaagggtccctctggcccagatctcatggtccctactgtgtctaggcctccaaatctcctgcccttggaggagatgccacagtccctttggtcactgcttcctggcctgaaagcccaacagctgccctcagtccttgacctgtagccccaggtctgtcctggcacacagtgaaatggtacctaggagcctgaagaccattattaattattctctccgctttttcctctcccacctgggaaacctcccctctcctgtgtctaccttttctactttgaccttagcctcatgcaatcctggacacttcccccactgctgtccctctcctaccaccatgagtgggagcagccatggatcagggcaaggggtggcaggatggctcatgcagaacagctcacaccagccgagaggcctggccatcccggaggcttgggaagagaggggacaaggacaaagccacccctgggaggctgcctgacctgggtgggggaagcagaggatagcaggtggtgatggtctgtaaaggcagttgcagcaggactctccacggaactcggaatgcacatgccaagccccacagctggcaaaagtcagggtgattctgatgtacagctcccccaccacaatctaataccacagaatctcatgggacctgtgtctacaaacgtactgaaacctaagcgccctctgcctctgtggtctacagcaactcctgaaaggcatcccgtggccaggtgacactgcaaagcagacaggtgcttggagcagtttggggatgacaaaagtactaagatgacgtctcccagcctctaactgctcatgtgtcttgtggctgtcccagggcactgagggctgactgggcaccagcgtcatgtggaatagtttgggaagtaggaaagagacatgctggcctgagaggtccagatggacaactatatatttctgagggggagcactgacatctggagttgagtccaggccactggatgatgaagaccttacttcctctggggactgagaagttttcatgattcactgggaactggagatctctgcggtaagacagtgcctaaaggttcccctgccaacagctgatgcagcccttcactgtccctctcccactgccctataggccctggctgttccctacagtccctttggcagagcgcaaaaatggccctacttatctcgctcatctccacccagccccactgcactgtgcctgtcagtcctcccgtctagggagggagtctatttccctactccttgaatctaggctggccttataacttgcttttgcccacagaatggagcacaggggacactgtgccagttttgagccctctctgagaactctgcccagctgccatgatgggtttgtgtgctggaggatgagagactacatagaagagaaccaaggtgctcagcaaacagccagaggcagaacttacgtatataccggtgagtacttgagaggaaattcagccaagaccagaagaaatgcccatgtaggtagcccaaatgcctgacccacaggatcatatgctaaataaatggctgtattttaagctactaaaaaaaaaatttggaaaactggagtggactatttgttacacagcaaatgctaactgatacacccactaaggaactggtttgcttcctgggttgaactccctttattcccaccttgtctcctgttcaaggaagccagatggggcaactctaattcttaccctcacttgagagatcagaaggaccctataattccagattccatgcatacctgctgtgtgggtactgcccagttctgtgtcctgctcctgatgcccgctggaggtcagagggctgagggctgccaggtcagaggaggactccagggggccaccatctggattccttgggatggctctggggctgagcgtctgcagggcttgctctgaattctgcaatgagggaaaatatgaataaggcagttgcctctcccaagagctcacaaagggcagcttgtgctcttggggcatctcctataggcctcagcccacaccatggagcacaggagccaggggagcccttgcctgggttctggtaattcccagaccctctgtccacaggtgtccttacgtctacctcacagaaaacacacagcattgccaggtgcggtggctcacgcctgtaatcccagcactttgggaggcaaaggtgggcagatcacctgaggtcaggagttcgagaccagcctggctgacacggcaaaaccccatctctactaaaaatacaaaaattagctgggcgtggtggtgggtgcctgtaatcccagctactcaggaggctgaggcaggagaatgacctgaacccaggaggcagaggttgcagtgagccaagatcactccactgcactccagcctgggtgacagaatgagacactgtcacacacacacacacacacacacacaaaactgtggtctcccagctggttgctgacagaggattagggctgccacagggtgaagacctggtcagcagcctggaagctggtctggggcagatccccactgaggaagccctagggttctgagcagagattaggcgtgatttataggggacgggagagggtttctggaaggctcaatgggcagaagtgggcagataggaacacaaaagtggtggctcaaggtagactatgaggacagacctctcctggggactctggcgcctgggtctcctggacaggcatggggtaacttggctccttctctctgcagctgttgtaggggatgctgtgggccgcagcaggtgtggggggccctggcctctcagcaggaagtgacggtggctccagtgggtctgggggacggtccgaggtccctagaggacaaagatgtagtgatatcaagaaggaatcagggctgggcacagtggctcatgcctgtaatctcagcactttgggaggccaaggcaggcagatcacgaggtcagatcgagaccaccctggctaacacagtgaaaccccatctctactaaaaatacaacattattattagccgggcatggtggcgggcccctgtagtcccagctactcaggaggctgaggcaggagaatggcgtgaacccgggaggcggagcttgcagtaagccaagatcgcgccactgcactccagcctgggcgacagagcgagactccgtctaaaaaaaaaaagaaagaaaaaaaaagaaggaatcaggggctgggcacgatggctcatgcctgtaatcccaggatttggggaggccaaggcaggtggattaggaggtcaggagttcaagaccagcctggccaacatagtgaaaccccgtctctactaaaaatacaaaaattagccaggcgtgctggcaagcacctgtaatcccagctactcaggaggctgaggcagaagaattgcttgaacctgggagacggaggttgcagtgagctgagatcgcgccactgcactccagcctgggcaacagagcaagactccgtctcgggggaaaaaaagaaaaagaagccagacgtggtggctcacgcctgtaatcccagcactttgggaggccgaagtgggtggatcacctgaggtcgtgagttcgagaccagcctgaccaacatggagaaaccctgtctctactaaaaataacaaaattagccaggcgtggaggcgcatgcctgtaatcccagctactcgagaggctgaggcaggagaattgcttgaacctgggaagtgaaggttgccatgacctgagattgcaccattgcactccagcctgggcaacaagagcgagactccgtctcaaaaaaaaaaaaaaaaaatagaaggaatcagggactatagggaggctgaggaaggagaaccacttgaacccgggaggcagaggttgtggtgagccgaagtcatgccactgcactccagcctgggcgactgagcaagactctgtctcaaaaaaaaaggaattgggggttctcctcatgattaaagaggcttgggtgctcttgggtacaccccccgccccacccataggtccaaaagctgttctgatgtgggcccactcctcaagagtgacaagcagggctgggcttggtggctcacgcctgtaatcccagcactttgggaggccgaggcgggtggatcacgaggtcaggagatcgagaccatcctggctaacacggtgaaaccccatctctactaaaaaatacaaaaagttagccgggcatggttgcaggcgcctgtagtcccagctactcgggaggctgaggcaggagaatggcgtgaacccgggaggcggagcttgcagtgagctgagatggcaccactgcactccagcctgggcgacagagcgaaactccatttcaaaaaaaaaaggagtgacaagcatcacttggcaagggggcaggagtgggagggtgagagcagatggaggacaaggtagcaagggaggaaggggagtatgggggggcctcgtgggtctctagtcacccacgccgtgtcagcagtcactcttctctgtccccaggcatcctaggacccagtggctttctcctccacatgactatcattgctcactgacccctgccctgatgctgccacctgagcccctcccctttgcccccacccctcatcaggccctaccacagccattgtattcaggggatcactatttttggggttttttttttttttgagacggagtctcactctgtcatccaggctggagtgcagtggcgcaatctcggctcactgcaacctccacctccccggttcaagcaattctcctgcctcagcctcccaagtagctgggattacaggcttgcaccaccatgcgcagctaatttttttgtatttttggtacagacagggtttcaccatattggccaggctggtctcgaactcctgaccttgtgatccgcccgcctcggcctcccaaagtgctgggattacaggcgtgagccaccgtgcccagccagggatcactattaatctccacacatgaagagacatatttaaaaagaaggaaggaaaaaaaggaaggaagagaggaagggagggagggagggaggaaaagcaaggaagggaaaaaggagagaaaagcaagcatgagagccagacgcggtggctcacacctatgatcccagcactctgggaggccgatcgcttcagcccaggagtttgagaccagcctgggcaacatagtgagatgtcatctctacaaaaaatttaaaaattagccaggtgtagttgtccatgcctgtagtcccagctactctggaggctgaggtagaaggatcacttgagtccaggaggtcaaggctgcagtgagctatgattgcaccactgcactgcagcctgggtggcgcagcaagactctgtctctaaaaggaaaaaaaaaaaagagagagaaagaaaagaaaaacatggatgtcccacagctataaatgtgaccagggtctcgggggttacctctagtttgaaatataaatagggctggcttgattttttttcccatgtctttttttttttttttttgagatggaatcccactctgtcgcccaggctggagtgcagtggcgcgatctcagctcactgcaacctctgcctccctggttcaagtgattctcctgcctcggcctcctgagtagctgggacaacatgcccggctaattttttgtatttttagtagagacggggtttcactgttttagccagggtggtctccatctcctgacctcatgatccgcctgcctcggcctcccaaagtgctgggattacaggtgtgaaacaccgcgcccagcctcctcccatgtcttgatctcactcaggatcaaactcaatctcatcaaatcgcctccgagcactcagagtggcagggacactgagagggacttaaagaataactgggcagctgatagagggcgtcgaaggctctcagggtaaaccaggggaggggaagagaaggaggagagagggagggtgaatgagtaggtgggggagaagaaatgaggaagggtgggaggcgaatgctacagccgtgaaagttaggggagactccatgtgctgggcatacaggaagtgcccagcccagctcaatactcaacacgcatcgtcccgcagtatcacccactgcagctccccgcggcagatgctgccatgagcttcattttacagaagagaggcctgaggctcagggaaattaagggacttggccaaagggacacagctggtaagtggctcagcctggatctacacccaggtttattcatcgcttcacagtgacaagaaagaggatgacagagaaaggcaggaagtacagggagagagaaaaggagagcggaggccagggagcaggctgggggtccaggagggcaagggcaggacgctcacgaggctggtagctctggtagacagaggccacttcgtccgcgagatcaactagctcacagcccctcagtgccgcaatgaagtactccacccagccgggccgccgctgaa

SEQ ID NO: 97212 - DNA, 13076 bp, Homo sapiens
aggggacaaaattaccctccacgcagcagccatcctgctctgcacccacacaaggtcccaatgcagcagcacccatatttcctaagtgccaaggcccatgtgcagaggtggccacgcctagtggaacagcccacagcccacatatcagttccccttgccccagctggaacacgggtgtctctgctgcctccatgcggctggcaccctgcccatccctccctgaccacagccttaaacggaggggagcagggaggctgcagagccttggggttttccctcctggtccaaggctgctttgtacaggcccatccttgccttcaacagcaatatgggcaccacttaagacctcagatataaaaggtgcattctctccttgggaaaggcttttgaaattattctgcaaagcagaaagaaaagcttcagcccctaccaagagcacctgcagcctggcactctcctcaggcagtcttctgagactcacctcccaagtgccacagtgccctgaaggaccccccactccccatgagttctttgacagacacttcagttcttccttttctacttagcctgaaagaaaaaccagattctccctgatcccctgagggggtgtcaattctagtggccctgctgactcatgttagtcctccagattgtgctgcttctgccagtgtacccacttgcatcagaacagtccgcccactacccaaggaaattctgccaagaaaagaagccctgtctctccagacattcattcccaggatttagtgtaaagtaacgtggaactgcccttccaaaaactgcttgttaagtttcaggtacacaattaacctgcccaattaattttgcagaaccttgaaataaaacatgttttacagtaagttcacacacaggcttaatgcaaaccagagtaatgcacagatgattgccaagaccatattgacaaattgtgattagattataacgcatagtagcctgccttacattcagcaagttcaaacaggacacaaaaccagtcaactgaacacagagcagctctcttcagaagcacttccaatgagtgatgcagagatttcaaaaatacaaagcaggcaacttatatacagcaaatcctcacactgcctggacatgtgccacttttttgttgtttttaatatatttttccttcctggttgctaatttagactgaattcttaaggatttatcttgatgacttagaaaaatacacctgtcctttctcactttgtttcaggtagtacagtcatgaaattgagtaagtctcttaaaaaaatgaaagtccacagatcccattgtggaaggtttcaggaacccctccccaggtaatgatcacgggatcttcaacagctcaaggagtgctccaacagctccaaaataaccctgaaagaaaatacaccaaaaataagtgcaattttccttagacttattcaaatcaccttacacatgatgactagtgttaaagccaaccactgcccacacacagcatacccatttcctgagcaccccagaagggccaaggccagcctgggagcagagacgccctaaggagtccctgtctggggagggggctggatgtcctagactatccaagcacttcagaccactgtgataagaggaaaaccaaacccgcagtgagggcgacaggagctatgaggccagcagcagctcagttacctctggtaagagacagaacctgactgtttctggggaatgaggtgagaagcagcagaggcctggagcatttccagacaactaaggaatgaaggcgaggtcggatgcaaagtgcaatgaaacaggtgaagttgtgaggtgggtcacagagggtgagagcccgactgagctgggagagggagggagagtaagagataagatggattcaagattcacccctaacagaggacaggacagcaggagggggcagcatccccgagaaaggggacacaggagtaagaggtgtggagagcaaggccggtgggtgagttccctacaggacatgggaagctgaggtgcccacagcagccaagcagctgtgcccgggtggtcaccagacacctggatcactggcccagaagcaggcggcacaggaatgaaaaccaccacccaaaggtaacgtgaagagaggtacagaacaaagagcaaagcctgaggaagcacggaggctcccgagggagggcagccctcagccctcctgagacacagaagcagcagctgagagacgacaagcactgtactgtctccagaagcagtcaggtcacatgcaaccaagaactcaaaaccaaaacacaggaatagcacattagagaaaacggggcaaaccccataatgacagaaaagagaacactagcaagaatcagaggcaaatcctaaaacgatgcagaatccatcagggtctccaacctgtaaggtaagatatcagactactttttaaaagaaataactaaaaaaggaatgagaagatcctgaaagacttgtgtatggattttttaaaagtctctgaaacataaataactaccactctatctttcacgaaaagcttcttcaagaaacctgatcaaacgagaggccaaaggctttcttgtcacactctagttggcaatttaaaagaaaggcatattggctgggcgcagtggctcacaggtaacccagcacttcgggaggccaaggcaggtggatcacttgaggtctggagctcaagaccagcctggccaatatggcaaaccccgtgtctctactaaaaatacaaaaattagccaggtgcggtggcacgtgcctgtagtcccatctactcaggaggcttagacaagagaatcacttgaacccaggaggcagaagttaaagtgagccgagactgcgccactgcactccagcctggctgacagagtaagaccccatctcaaaaaacaaaaaaaagaaaggcatattgaccatctttggttttggtgtgtataaataaaataaaggcagccacaccaatctgtgatgtgaggcggccagcagctacaggacaaggcacagctgaaatacagaggcaaggctgtttgtcttaatagttcactatacagtttgttttaggcagctttctgtaccttttattttataataaaaatatagaagatacagttaaccattatatatatatatggggggggtccactgaagactaggatgctactatcaagacagaaacaggtggttataaactacaacgtgctaagatgagaataaaggatcaaagaggaaacgcttgagagaatctatacgaagctttcacaacaaaagttaaagtgacttcaatgtgagggcaagaaaatatttcaaggctcagagaggctaaaataatcaaagttctgaactgaacaatgagaacacttggacacaggaaggggaacatcccacaccagggcctgccatggggtggggggaggggggagggatagcattaggagatatacttaatgtaaatgacgagttaatgggtgcagcacaccaacatggcacatgtatacgtatgtaacaaacctgcgcgttgtgcacatgtatcctagaacttaaataaaaaaataaaataaaataatcatcaaagttccacaagggcagagatgcacacaagagtcaaaggcctgaatgcaaatggaaaacacagggacaaatggaccagcaaagctaagcagtgggaaaaacaaagtcagcgagcaataaggacaaaatgcaaccaagaatttcacgaaggcttataactattatgatgatatcggtttggtgttttgttttttgttttgagatggagtttcgctcttgttgcccaggctggagtgcagtggtgcgatctcggctcaccgcaacctctgcctcccgggttcaagagattttcccacctcagcctcccaagtagctgggattacaggtatgtgccaccacgtccagctaatttttgtattttttgtagagacagggcttctccatgttggtcaggctggtcttgaactcctgacctcatgatccgcccacctcggcctcccaaagtgctgggattacaggcgtgagccgctgcacctggcctgtttggtgtttttgtttgttttgttgttgttgtttgtttttgtttttgagacagagtctcgttctgttgcccaggctgtagtacagtggtgcgatctcagctcactgcaacctccgcctcccagattcaagagattctcctgtctcagcctcccgagtagctggggattataggcgcccgccattgcgcccagctaatttttgtatttttagtagagacagggttttgccacattgaccatggttggccaggctggtctcctgaccttaggtgatctgcccatctcagcctcccaaagtgctgggattacagacgtgagccaccgcacccagcctattttttttttaaggttaacttaaaaaactaatctccatgttctacctaggaaaaggttaaacaagaggcagaaataaagcagaaaaagatctaacattcgagtttaaaaaattctaatataaagcaaaataaaataagtcagatcacaaaaaaagatgtatacagaaacatgaactgtaagaaacttaatggcaattcggtgctggtttacaaatacagtaatgttagaattttaaaactaagttagatgacttcaattttaagctttttgatatggggatttgtgtactttggacttcaactatgaactaaagcaatttaaaaagaaaaacttaaagtaactttaaaggaaaaagtaatctctagcacttcaaatctgtgctattatctggactttgatttcctttaattcatatagactgttaaactaaatatgcaatacaattctgaaaaatgttcataataacagtatctaaaatccaagaacagttgaaagaatagttcaactgccccacaaccaagaagggaagaaagaacccctacacgcctttccatacctctgcttctttttccccaaataggaaaaataagagtgctttccaagacaggctatgaggttgagcaatttgattcttttccatttcatcatttccagcctgtctacaattgtacttaagttcttatgatagtatggttctagtctgagaggtttactcatctattcatttttacaacatgcatcttaaataactggcacaagaattacaacaatatataaaaactggcactgaaaaaaatgaaaaaaccagaacccagagtaatgacacagtcagtgcaatagaaaaaatatagaggatagttcagacaaaaatatggcatcagaaatataggggaatgttcaagggtttttctctaaaattccttaagcttacaattaaattaacccaaaatttaccttgcattagtatcagggaagaaacagctttcaaatgttacgaaattaaactaccaaaaaagttcaggcacagtggttcacacctgtaatcctggaactttgggaggctgaggctggcagatcacttaaggtcaggagtttgagaccagaccagcttggccaacatggtgaaaccccatttctactgaaagtacaaaaattagcagggtgtgggggcgcacacttgtaatcccagctacttaagagactgaggtgggaggactgcttgaacccaggaggcggaggctgcagtgagccccaagactgtgccacgcactccaacctaggtgacagagcgagactccgtctcaaaaaaacaaaaaacaaaagaaacactgcagcccatttcacctccaccctctacctcaagttccatgacagtgtgacccacaagccctctgtgtacataatataccacaacgaacaagtcagcttacctcgtgttccgaaaaaagtgctttcaactgccccttggaccaataatccaaagcatatgccaaaagccgcatggcgatcgtattaattctcaagaaatttccaacaaataccacctggttaatgttctgagcacaccaaaaaaaggcaattagttttcatcttaatttctattttctcataaaagctaccccaaatacagcaccatgtgcatagctcttagcaacaatttgactgctgatcaaatttagtccagttggtccagggctacttaaacttgatccccagacaactctggacccactgcaaagcatgctagataatgtcacaggagargaaaacagattaggaaaaacatttgtattaaatctgaccaacaataactagttttgaatacaatgttttatacagataagttaaaataaacaaaaaaaaacagtatgactccaatccaaaaggacagtgacacaaacaggcaaagtatacaagcaatataacaggcagcgaaaaattcaaaccactagtcatcaaacaaaagtaaaattttagacctattaacctcgcaaaaaaaagcaactgaaattccaccaccaccatcagtagttgtagtaaaattaatccactcattcaccgctaaagatgatctaaattggtgcagcccttgtgcaaagcatcatgacgataaatgtcaaaattcatgagcatgatcatttctgtagaccagaaatctcactcctaagccccatatcaagaataaaattcaaccaaagaataacttcatgcttaaaaatgcttactgccgagttatgagcaagcaaccaaatgccaagctctgttatttgatataaaagaacttgatcaaataaatatacaaccatgaaatgtatatttaagtataaaatacaaattgtggtatgcacaccaactaaaatttctgaaaatacgtaagcacaggaaagggaacatacaataaagaaaaaagaagttatgatattccaacaaatgtttaattacttgatgctgatacagtatttttttaatttaaaatgagacaaatcctttgtgtcttttgaggtttccttttaagctacatgcctattattatctaaagaataacttcttaaaaataaaaataaaagaataatttaacaactatacacacagggacaagccataagctgcaccaactggatcctagatcctcttttcccaagggcagcccattcttggttctttcatagccctgtacaatgctgcttgacctgaatgctacaaggcagcactgtaaagaagctgaaagcacaaagacgcagctctgctgaggtgggggagccaaggagggcacccctcggcctgctcagtcttctcccagcttccgtgacttcctctggattcctccctagggcctctagagctcagcagtgagtgtggagtctacattcagcatcgttatccatcatcacccccaacagtccccaatatctggaacactggctaccttccactcttcctctactttctcctcaaaagatgtcattttacctctagacaagtagcaatgtttatcttcagtttaaaaaaaaaaaaaagaagattaatctgtatttgaagagttttaacttcgtgctaaaacaaaccccaccccaaatgactacatttaggcactgttctgagaaaacagacgtgatggggcccacttaagttcagtattttccttagagcaattaaagaaatccatgtccccttacttcattaagggcacacattcttgctattgagccaatgttgttggtgatggtgatcaaagtcgctctggccaggtcctctttactgacagcctctcgcttctccttgctcatcatgtttccaaagctgtgatgggggaaaaaaaatcccattgctaaaccaacagcaacaaagcccaacagaacttgaatgttactttattgaaataaaattagcttttagggcaacattgttgaaatcttcaaaccttttattttgcaatggagcatctgttcaaagagaaatgcaaacttcaaacagagccctccaacattctaaatgagcagacagctttccctgcggtttctactgaaatctagcttggataccagatattcacatattcagttagaatctcatcagatgcactggaaggcaccattgctcctgcaaccagacagttccaggacaacacctctaacagcaattcatctcaactgcacagctgttccactcagatggccacatgcacatctggtaaactgctctatcagagcagagtaaagcacagacagctgagtcccagagtgagctgcttaagaatttcaggtttccctagaagataaagtacttcaaagtacatgctcagcagaactgctacaataattttccaatcagaaaaggaagtgatgaccaacgagcaaattttacaaacagaaaatcaacagcattgaccaagtgcctaaaacttagtaaacaagcatgtatacatatgatttttctattagtaaaagccatgtgccccaatatacgaaaaacaattgtacttctaaacgatctcaaaatggagacaatgatttcatttataatagcattagagaataaaacacttacggatatatctaacaaaagtattaacacctgtacaataaaatctacaaaacactgctgaaagaaagcaaagatctaaatcaatggaaagacattccatctttttggatcagaagactttgtattaggatggccaaaagattcaatgtaatctctattaaaatcccagttgtcttatttacagaccttgccaagttaaccctacaattcatattctcaaggtacccagaatagccaaaataatctcgaaaaaagaacaagttggatgactcacactttcttacttcagaacttaatacaacgctacagtatcaaggcagtatggtactggtataaaaacagacatatatatcaatggaacataacttaagagtccaggagtaaacccaaacatctatggtcaactaatttttgacaaaggggccaagagaatttaacagggaaagaatcatcttttcaacaaatggtactaggacaactggatatccacacgcaaaaagaaatgaacttggagctctacctcacaccatacacaaaaacttactcaaaatggatcaaatataagagctaaatataagagctaaaactggcgggcgtggtggctcacgcctgtaatcccagcactttgggaggccaaggtgggcggatcacgaggtcaagagatcgagaccatcctggacaatatggtgaaaccctgtctctactaaaaatacaaaaattagctgggtgtggcggcacgcactgtagtcccagctactcaggaggctgaggcaggagaatcgcttgaacccgggaggtggaggttgcagtgagccgagatcgcaccactgcactccagcctggtgacagagcaagactccatctcaaaaaagaaaaaaagaaaaaaatacacacacacacatatatatatatgagctaaaactataaaactcttaaaagaaaataaacaattcttcatgatcttaaattaggcaattcttcatgatcttagatttcttacacataacaccaaaagcacaagtgacagaagatagataagattaacttcatcaaaatttaaaatttccatgctgcaaaggacaccatcaaggaagtgaaaagacaactaacaaaatgggacaaaacatttgcgaattatgtatctaataagggacttgtatccagaactcaataataaaaagacaatccaactaaaaacttagcaatagacttcagcagacatttatccaaagactacagacagatggccagtaaacacatgaaaagatgttcgggctgggcacagtggctcacacctgtaatcccagcactttgggaggccaaggtgggtggatcacttgaggtcaggagctcgagaccagcctggccaacatggccaaaccccatctctactaaaattacagaaattagccaggcatgttggcataatttacaggtgtgcctgtaatcccagctacttgcgaggtgaagcagaagaatcactaaaacccaggaggtagaggtttcagtgagataagatggtgtcactgcactccagcctgggcaacagagagagaccctgccacacacacaaaaaaaatgttcagccaggagtgatggctcacacctgtaatcccaacatgttgggaagccaaggtgggaggatcacttgaggccaggacagcctaggcaacatagcaagaccctatctctacaaaaaaaaaattaggcaaggcagtgcacagctgtagtcctagtgactcaggagactgaggcaggagaaacacctgagcccaggagacacaggctgcagccagttatgatcgcaacactgcactctcatgtgggcaacagggcgagaccctgcctcttaaaaaataaaaacgctacaagatatcacttcactcctattaagacaactaaaaccaagaagacagataataacaaatgttgacaagaaatataaacgctcataaactgctaagattgtaaaatgggactgccactttggaaaacagtgtagcagttcctcaaaagattaaacattaagtgaccatatgactcagcaattctactctcaggtatatacccaatagaattagaaatatatgtgcaggccgggcgcagtggctcacgcctgtaatcccagcactttgggaggccaaggcgggcggatcatgaggtcagcagatcgagaccatcctggccaacatagtgaaaccccatctctgctaaaaatacaaaaaaaatagccgggcgtggtggcaggcacctgtagtcccagctacttggaaggctgaagcagaagaatggcatgaacccaggagctagagcttgcagtgagccgagatcacgccactgcactccagcctgggcgacagaccaagactccgtctcaaaaaaaaaaaaaaatatatatatatatatatgtgtgtgtgtgtgtgtgcatacatacaaagacttacatataaatgttcaacattataaccaaaaaatggaaacaacccaaatgttcatcaaccaataaatggataaaatgtagtattatccacgtaatgaaatattatgtggcagccgggcgcggtggctcacacctgtaatcctagcactttgggaggctgaggcggcagatcacctgagttcgagacctgcccggccaacatggagaaatcctttccctactaaaaaatacaaaattagccaggcttggtggcgcatgcctgtaatcccagctactcaggaggctgaggcaggagaattgcttgaacctgggaggtgggggttgtggtgagccgagatcacgccattgcactccagcctgggcaaaaagagtaaaacgccgtctcagaaaaaagaaatattatttggcaataaaaaggaataaagtactgattcacactgtaatgtgaatgtttgaaaacatatgctatatgaagaagtaatcacaaaagatcatatactgtatgataccacttatatgaaatgttcagaagaggcaaacctacattgaaaataaattactgtttggcaggggctgtggggggaatggagagtcgtagctaatgaacacaaggtttctttctaggatgataaaaatgtcctaaaattgggattacagtgatggttgcacaatcctgtaaatatactagaaaccactaaattgtacgcttcaaacagctgactttatagtacgtaaattatatctcaatagagcttttttaaaaaatatgcccaatattattattttatgtcttttttttttttttttttttttttgagacagagtctcactccgttacctaggctggagctcaccgcaccctccacctccagggttcaagtgattctcctgcctcagcctcccaagtacctgggtctacaggcgcgcaccaccatgcctagctaatttttgtatttttagtagagacagggttacactatgttggccaggctggtctcaaactcctgacctcatgatctgcccatctcggcctctcaaagttttgggattaaaggcatgagccaccgcgcccggcccgcctgtatttcttagaacacacatgcccccttaccttgaagccacagcccagcctggcagtccaaacctctcatagtcccctccataaatatctcgtactagtttatccactttggtgctatctccacgagatgccatttcaagagcttcttcaaaagtggtacagccagtaagaagacagcagagaccaaaaaaagttcctcctccaagactatgattaaaaacaattaacacagtattataacatttttaaaaataagaacaagaagttaacatttatgaaccccaaaaccatattcacatatccaacccaatcatgcaaatgccactggtaggaaacaagtctgtgaaaagataaggtgcctgatatacacctttaaggtacatatgcatgtgagccaacatgcaaagtacaaaacacagggcccatgtccccagtgcagtctggctgtctgccaagtatgaagagcctcaggtgcaaattagcctgacacgcctggggccatgctaacacctcctccctttcccttctccaagtacattccctgagtcattctcatccaagcaccttgtcaccctggcttatcagtacacccccaaacatactcctcctgcaacgtgttttgtcacaaaaaaattactcctctatttaaatcacaactgtttttttaaaaaaattgtttatcccaatccctagatgcctgtttttcctgaagtgacctctgacccttaagccgaaacattctcttcttccatctaatcctcattttttttttttgagatggagtttagctctttttgcccaggctagagtacaatggcacgatctcggctcaccgcaacctttgcctcctggttcaagtgatttttctgcctcagcctcccaagtatatgggattacaggcatgtgccaccacgcccggctaattttgtatttttagtagagatggggtttctccatgttggccaggctggtctcgaactcccgacctctggtgatccacccgcctcggcctcccaaagtgctgggattacaggcataagctgccgtgcctggccctaatactctcttttcttttttttttgagacggagtctcactct

SEQ ID NO: 97213 - DNA, 13395 bp, Homo sapiens
atgagtaattgaacccattaaaaggtattcaggcacaaggattataaagatcactatagtatgactgaaaagttccagtaagaatacttaccaaataaacccggagcaaatttcaagtttcctctactgtgggaaagcttttccatgcagttttcctgtcactatgtattttccagttcatgccatttttcagccccaattcctcaaagtatttaccaccctttcccattttccaaagaaaaaatgtaaaagacgttcaaatagtcatattactataatatgtttttttctgaccaactattccccaagaccataaaacaattatagatagaccgctgccacagttgaagagtaaatactatgcaaaactagattcagagcaagaaaatttatttcacaaaagagcactttaccttggtatcagaatcaaagggttcgtcatctactgaaagccatgagtcaccagaactctgtccacaggacagcctatagagaaaaacatacaacaaaaatgaatgagttcatttatctaaaaaaaaatggattgttttgtgtctaggtatcatcccacaaaaaaaaacaaaaacaaaatctggggaaaggtcagctacctatagaataaataatatttcttaattaattaaaattggcctctttttcaaaaagattttagttacctatttctgcctccacctttcccaatctatgaaatgttcgataaagactcacctttagttccttaacaaatagtgactggcaatatattggcagagcctgagaataatttgtcttcagaagtgtctgtcctgaaggctgaattcaatatccaattaatgagtgacataacctttgttacctgaactggaaccagcggatcacttaaaacaaggtagaaagagacactgtgtcttctccattacctgtatctggttcaaaggctaatctgtgccactcaaaaatggcagtcttggttcttcagcatggaaaccacttaagtaggccctattgctgccctttaccctaaaacagtgtaggcagttccctgaaatgtctgaaattcttgacacctgaacgtacaaaagttaaaggaacaagtgtctatgtcattattggaaatatgctttgcagaaaaattaaaactttaaaaatgataaactttaattatgttccctgcgtaggtcccgcctagttcaggtccacatcaactagcaagcccttgagaatcttcataggtgctctgatacccaaggagagagactgctggaaaaatagagtcctgaaagctgtatctctgtttttcccaactgttatctcaatatcttccttcctatgggctcctacttacagatcactctaggactcaatgacagtctccaacattgaagtctttcatgtatgaaagcacccattccaaaaaatgggttcaaatgaccaagagtaggagctatttccctccttccggtaaacaaactacgtgtagtctcagtcatctgtccccagtacagacacgttccccaccacccaagtgaattagtacaaccatcttggagaatagctttgaagttcctaaaaaaagctaagaatagaattaccataggatctagcaatcccactgctaggtataaatcccaaagaaaggcaatcagtatattcaagaactatgagcacattcatatttaccgaagcattattcacaatagccaagatttgggaaaaaaactaactgtccatccgtagaagaaagggtaaagaaaaagtgttacatagacacaatggagtactattcaggcataaaaaatgaggtcttgacatttacaacaacatggatggaaatgaaggacattatattaagtgaaataagccagccacagaagaacaaagtttgcatgttctcactcatttgtggaagctacaaattgaatcaaccgaactaagggagatagacagtagaacaatacttaccaggggctgggaaaggtagtgagattgggggagggtggaagtggggatggttaactggtacaaaaatatatttagatagaattaataagatttagctctggaaggcacaacagggaaactatagtcaacaataatttattgtacatgttaaaataaccaaaaagtatatttggaatgtttgtaacacaaagaatgataactgcttgaagggacagatagacccatttaccctgatatgataattatgcaccacatacctgtatcaaaatacctcatgtacccaaaatacctcatgtacacttgctatgtacccatggaaataaaaaatagaaagataacgcagaaaagaacagcaaaaaaaagggctgagataacaaggacacatttttaccaaaaaactattcttacttggatttcagaaaactttaagccaaagaaacatcaacattcaaatgaataagcatggctcattttattcaatatttagatttatatgatatacgtaaatcagatattatcaatgattaatattagtatttaagactgttataagggagtgggttaaattactactatcaggtactatgctcacggcgtgagtgacaccatctgtcctccaaacttcaccatcactcaatgttcccatgtaagatatctgcatatgtgccctctgtatctcaaataaaagttgaagttaagaaaagaaaagaaaaacactgctataaattttcaaaagggtagttaaaaggttatctttcacaactttctaccttcagaaatgcttttgtttgaaaggagggaggaaaagcttcaatttagattaagtcctaatagtccaattttaaatctctcaacttgttcagactgggcaggtaaacataaagtttttaagcttggaagggtcctgagagacagtagaatacatagtgggcattcaggttacatttaatgaataaatggattaaaagaatacataaatgtatttgaggagttcaatatttttaaagaaaactcgtaaagataagtaacacttgtgcaatagaaatgatttatatttgctattttttattttcataaggacaccactaaaataaaatgattaaattataattgtttgcatgtatgtaataaatctatccataataaaagacatgcataaaaaatatacacaatacaatctaccagcacagattaaaagattccctctatttctgaagaggctaaaccttggcagaagataccaatccacaaaaaaaattaatagaaagcaaaaacttatttttatctgttcaagattcatattcctgttcttacctaggattatttcagtaataatagacttttactaaacctgttatacatgctcattgtggatatcacaataagaaaaaggaaaataaatcacccctaatacaaatgtcccaaaataacaaaattttatcacattttgtgtatactttcagctaccacaagaccattccctctgtgtgtatgtataatcaaatcgattttttctcacttaatataccaaagtacatcttcccatgtcaacatacatccatatctattgccaccttcagaagttacatataatttcatcctatggatgcactgaaatttatttataaaatcctttatttgccctctccttaatacattgctattggaaacagtgctgagaaaaacgaattgtatgcatctctaattattttctgaaaatattttagtataatggaatcaatgggtaaaggatacatacctttttaagagtgatgttcaccaccaaattgtttatttaaaaagttaacagcaacttaaactttaagcagtggtgtaagtactactgattttccagatcactagtagatttggaaaaagtactttgaccaattttaaattatagttcttatttctttaaaaaaaattctctgtaaaaggaagacacatttttcattgcaaataataaatgtctatatttatgtatataatgtgaatattttgcaagtatgttgtcttttattttgttaacttttttctgatgtaaggggagttttaatttttgttttctaaatcaacctgcagaatgcattcataggaaggtctttgtcaacataaaaatgtatctgtataaataggcattcgtgttttcttctggcattttctaattttgtatatttaagtttttacgcatattctatcaataacttatttttgtaacataaaaatctagctagttttctccagttcacagacatgtcatttacaaataactcatctttccatacacatatgaaatgtcatcaggatcaggttctaaaatcttacacatttttcagtatgtgtgcattttttattctgttccacacatttatctgtcttctcatcttttagtaaatgaaacctaatatcacactttgatatatagaagggcaagtctttactctgttataaaaattttcttaatgtcatcataagagtaaaaggtagcatacgtaacctagaaatcttaaaaccttgatgcttttatttggtttatctaaaatgaatagagttcacatctcgagaaaaatgagtcttcccacatgcacacgtatgttgactgcggcattattcacaattacaaagacttggaaccaacccaaatgtccataatgatagactggattaagaaaatgtggcacatatacaccacggaatactatgcagccataaaaaaggatgagttcatgtcctttgcagggacatggatgaagctggaaaccatcattctcagcaaactatcacaagatcagaaaaccaaacaccacatgttctcactcgtaagtgggagttgaacaatgagaacacatggacacagggaggggaacatcacacaccagggcctgtcggggggagggggtggggggccaggggagggataacattaggagaaatacctaatgtaggtgacgggttgaggggtgcagcaaaccaccacggcacgtgtatacctatgtaacaaaactgcacgtcctgcgcatgtaatccagaacttaaagtataatttaaaaaaaaaaaagaagaaaaaaagaaagaaaaatgagtcttcctattcaagaacagggaaccatcctctcacttcaaaagatccttctgaggtcattcatgaaataacttattactcaggtgtaggtggatataaaagggatattagattttatccaaagaatttttagcccagaagttaatataatatagaaattatttttctcatgatgcttgtttccataacatatataacattgtttaaaatgtgtacaataaaaataaaaagctatgtttcttaattttttttaaagcactaaaactttcagtaaagtaacgggaattatgagaggatcggaccagctaaagttttgtttgtcgcgctgctcatattgatgaccttgaggttgccacaccggctgctgcgggctgcagagggaacaaagcccagcgccctcggggacaggggtgagccgagagcaggaaagggggcctctccccgacccgccctcctccctcctctgccgggctccagttcctattacctgttcttctcgtctctgtcatccacgccactcttcggcagagaaaggatccgccgcatcgtctctgtccggtgtcggccggcagctctgcggagcctgtcgaaccccttgtccgggtcgtggcgcctgggctgggaggaggcgtggtcctcactctcactcccggcgcccgcgcccaccttcccggggctgctgaccgagccccagggcagctcgcccttccccctcctgaagcccgaggtcttcttcatggctccgtctaccggcttcggagacccgctggactttccgccgcctccggaaccctatatgaggaagcaaatcgcgtccgccacagcctccaaccaggaaactccgcgactctcagcccctcagaagagaaacggagacgcgccaagcaaagccgttacacggactgtgcacgcgcctccggtgtccctgcgcgtgacacaaatttggccccgagggagctccgtgtgctcagcctcagagccgtaggcgagagcgcctgtctgcatgagtgagcatatgggtgtttttgagtctgtgggtgtcacagagaggagatcgggagctgcctgctcacaggcactttgggaccccgaaagaaaaggctgtgccgagagagttcttccagtcagaggtttgggaatgggggagaagggagtgcccggaatcccgacctcagaactgagcctccgaagtgggaaacagtggctcccccacacgctcaagggccaggcaggtgcatccaccctgccttgcatggcccaggtgtgagccggtgggcagaggggtggccctgggtccagctgagaaggctcccgggattgacaggggttggggttggggagttctgccttcctgcgtggcccagtgctgggaggggtaagggatgagggcaggggtcctatcgctgggctctgacccctcaggccactcagaccctgcccatgtgggcactcaggggtcaggtgttcttagagggaactaagctgggcagggtcaccgtccccttctgcagaggaggaagctgaggcccacgaggtaaacagtgggctgggagtgggcctggtagaccccaatcccagcccatggagaccaactactgagggagcactacaaacgccccttaacggctggatcccccagttttcatgcaatggggtctacactgaccctggggtctcactgggagagagcaggaggtggcttgaggctgggcatgggtggccacgggggcatggactggctgacccctgtgcattgaccacactctccatcccccaggtgtcatgaagactggacatgggcctatcagggccatgggcatgatgtcagccaaggaactcgcggcctgcctctgccaagagaccagcatctcggcctgagcactcccagcctcscatcgccttcaacctggctgcattcagctgccatgcccctacctccttgtgtggtcagcaccctccaggacttcatcttgggtcacccaaaggccgaggacattgctggccagcaggaaattcatggtgcatccaggaagacttccaagaggtggtggagcagggggcgccacacccagacagctgtgtgtaattgcgcagctgcgggctgctgcgggtgctggccggcagtgcattctgggcacactggactgtgtcaccgcatgcaggctgtggccggagggggaactgctggccgccaaggcctatgtgcctggaaaccagcagggctgctgcaggaggagggctgcagaatgctccagctcagacctgactcagggttttagagggcatagggyataaggctgtggacatagacagccctactgcgcaggaagagcataaaccagccsgagggcatgcatgtgggctgctgttagattctgttctcctttgaggtagggaaggatgtgtttctattttatggatgagcaaactgaggcagagtgctggagtgatttcccccagcaacgatggcagatttagctccagggcttagattttaggatcctccctctcaaataccatgatgtatcatgggctttctctccacagaaaattagaaactcagaaatggaaagggaacaatgaaacttacccattctcccactgctcacatttccttctggtttttttgcgtgtgcatataaaatatatctcagaaaattgagtttgtgctgtggatgccatttatatcctaccttttatactcaatagatcatgaaaatcccctttgttgctaattatatttcctggcagccccatggcccatcctatgcacgtgctgttattccttcggagagtcctagatttttgctcttagttgtaacacatcaggagtgacatcctgtctccacgatgttttctccttaagatggagacagatatagcgctcctggatcagagagcactgccacctgtaggatccttgacttcaggagctgtccccctaaccatctggtcacctctcatcctccacccagctctgatgctcactgcaaattgtttgccaacctaacgggtgaaccctcagctgttctgatgagtactcctctgactgctggaaggtgacaggaaggagttttagcaacattaaaaccactgagactggggatttgggggcatcattaatgtcagccccctccccaccaagtgcgcgcacacacacacacacacacacacacacacacacactcttattctgcctcccaggtgcttaatttgtatggctttggtttgctagtgaggaagaactttcttctttcttttatgtgatttgaggccattatatttgtatctggaaattgttaaaattgaggctctgtctccttttcccagtgagaattcatgagcattcccaacattcccacgtggagacagacacatgccacttgtagcccctgtgttaccttgttctgcctacaaacacacccgtgggtccagagaccagcaaggccatattgctaatccaaatttttgtggaaaaggaaactgatgcaggatctgcccagggtcagccctgctgttgagcatctgtgtaacctcaattctgtcatctgtaaagtgcctccctgacagggcaatggagagattgaggggaatgtagggtcgatggctgcaccctgggaagtgcagctgtgggttctggggatggcatggcgtgggggtccctccaaagggacacaggtctctgcagtcctgtgggaaggaagctacccaggccaggtgcatagggacaggatttaccttggcccaatcatctgggtagttgaggggttgtggggaaggggccagcccatcctgagcaactctccccacagggaagccccacggcatgcaccagctggccacactgccaatgagttggatgtggaggacgtatcgcaccttctggtggccaacaccctggtggccacctggatgaggcccacaagtccctgctggtagccctctcctgaggactcagatggccccgtgctggccctgctggccttgctgcggctggggagaggctgcttctacgatgccaacccaggtgggctgcagagggcaggtagcagcgggactcttctctgaggagggcacaggccttccgtggcccttgctctccaccccacaacctgggctttggagcaagcaaaccttgttcagccctagttctgccacctgccacaggccctcacctctttgaccttcagtctcctcatctgtgtcctggtcttttaggttgtcatggaaattagccagagcaggtaccccagggcccagcaggtttcctgcatacggtaagtgctttgtatttgtttttgctgtggttccgatgatatcggtgaaggtttttgtttgtgtgtttttgtccctatgcccttccataccacactgcttttcaggtgaaaagaggctatgtattttacatgttctacattacaagaaaactcagaagaattctttttacaaaaggcccaattcaattgtatgaaaagcatctaagaagacagtataaattattgtgacagtataattaaaactggaaagaagtcctcacattaagagttattcctatatatcacaatgctatagatagtgatactgtttctctgtacaaaaagtatgaggcaaaagcttatgcagagcccttgactttcccgcctctaagctagaacatctccagctccttcgctcgtgatgtgccgactctcagaaactcattctgatcctgtgcactttgtactcttcaagaagaaagtgccaattgaaaattgtatggccatcagtgagtttcaaataataacagatgagaattctcctgatatgcctattaaaatagaattagagtatgttctcactatcttataatgttatatcttcctcttaaaatgttataccttcctcttataatattataccttccttttttcccactggattatccttagatcaccaaaattataactaatttaaggatatatttatgagtcttaacaattccagcacttaggttaactaattataataagcctttgggcagtaaacaagtgcgttgtttgctttaattctagaagtgaaaacggaaggtctatgcccgggcaatgccacagaggaggaagacactggaactcactgagtaatttacttctttctgatccctaggactctatagagtttgcaaaatcttgtgtaaacctcaagcacagtattaaaattctatctgtagactttttcatattttaatttattttgcatatctaactctttagtgatttttttatttgagtctttttacttcaactagcatagtgatcattattttaaattctcagtattaaatgagattgggtgcaattattagattaattgatttttgaaaagaaaaaccagtgggtttttttttaaaaaaaaaaaaacatctattttcatcccattactttactgagcagcccttagagtaaagacagtttgttacttttgcctgatattttcaaaaatggaaataacaacagccttcctcaaatggagtatgggagtctaaagttctgtatggcttcttaaagcatatccaaaacatcaggttcattaggcatcacattcaatcttgttatatttgttaataatagtgtttaaagagaagaaaatccaaaatgaaaagtacaaattatgagaagtctgactcctttattttagagaggaatggactgtggtctgagaggagtgacatagcttctaagagtcagatccaaagcaaacacaagtagcccatccccagagtgtgcggcccgcttctttctgcctctgccgcgtggagaccatcttccagtgcagatgctacagtcctgggtatctgagctagagattatgcagaggaggcatccagctcatttcaaatgatcttttaacaatttctggaacagctaaggaggccttagggacttaccatgtggacttaccatgtgttttgtaaggaatctatcatgtattttgtaaagatgtacaagaaaaaatttatgaaattctgtttagcctaaaattcatttaatgttaaaattttaattatatgctgtacaaatttcaggtttggtacacagaatgttgaaattcctcatcttcctcaagattttgaagttgcaaaatataacaccttggagaaagtaagaatctgatttctagttagcaaaaaaaaaaaacacacctgtttgactgtcttctgagtgtttttcctatttgatattttctcattgttttgaaaaattacgcatatcctgaatatcatatattccttaaaatatgagttgattttatttatttatttatttatttatttatttatttatttttgtggagacaaagtctcactatgttgctggtctcgaactcctgggctcaagccatcctccctccttagcctcccaaagtgctaggattacaggcgtgagccactgtgcccggacctgatttttaacagccaagaaaatgtttatgtttagaatttaatgtttaaatttttagtatttatattataaaagaaatgcatgctcatagcaaaaattttaaatagtataaaatatcaatatggcattaaaaataaaagtcctcttccctgttattaacatcttcttgtatttgggaagggaaggtttgacactaagtatttacgctatgttgcatttccattccttttgcattagaaagaaaaacaaaatcccttttttttttctttttcacaaagtcatgcaaatgaaaatcaacactagtgtctggtgtggcatcactcgcctatagttccagctacttagggggctgaggcaggtggatctctcgagcccaggagtttgagaccacccgtttgaggccaccctgggcaatatggcaagacctctgtctctaaaatatatagagagatataaatcgacactagccttcaaagtgatgttccatttgtatttttaggtatgttaataaaacataatttgaaaataacatttccctcattgataaagaaaacatgaaaaatggtacggcataaacatatacagatctatttatgggatggtaaaaatacaggagggaaatgtaccaaaatattaatagtgattgtattgctgtcataggattttaggtgattttaattttcttcttgatacttttctgtattttctaaattatatctctaaatgaacatatattattttataattataatgaacattttcaaatggcacatgtagtttgatgtttcccaagtgcagcttctgaaagcacatcctattttccaggtgggaatggagggaggccaggaagctgtggttgtggaactgcagtgttcgcaggactccagggactgtcctttcctgatatcctcacacttcctcctggatgatggcatgcaggtaatgctgtttatattgagtcctatgtgtttattcacctctgttcataactcgtttcaatgaaccagccagcctcccaacctttttcttcttacctggtgtcttagctcaggctgctgttaataaatgcaacaggctggggagcttaaacaacagacatttatttctcacagtgctaaaggctggaagccaaggtcaaagcgcagcagggttgatttcctctgaggtgaggcctctctctttggcttacagacggctgccttcttgctgtgtcctcacatgatcttctacctgtgggtgtctgtgtcctcatctcttcacatgaggatagcagtcatattggatcagggcccacccctatgatctcacttaattaattaattacctctttaagggctctatctccaaacacagtcccattgttgaggtcctgggagttaggacttcaggatatgcattttgtaggggtacagttcagccctaacacctggtaaataattttgcaaaggggaaatgtgttctcttttggagtatgggaggtggggacctcaccccctgagtagatcagcacagggtcccactaggagggaatgtttaatgggtgcagggtgtatagcatttttgttcttgttccacatcacttatgggatattttcctaatatttacacctctgaaagcattccactgatacacttcattaagcacctgctatataccaagcaatcgactagggctgacactcaaagatgaaaatagcttcacaccctggcctcagagatcactgtctagaaagaaataacactcatcattacaatccactgtgatacttccaatcctgaatatatatatatgagatattgagggctcaaggtcacagagccctgggaacaataagggaggctttgcagaggccatgacctttgccttaggtcagtatcagtttaagagcacagttccaatctaaaataatcatg

SEQ ID NO: 97214 - DNA, 12201 bp, Homo sapiens
tgtgttggtaattaattgtaaagtgtaacaccaagagaattttgttctaaaagtgaccacttttcagataaggcaccaaattgtccctctgatttccagattagattaattggtcttcagtgaactttcagttactttgacattggaattttatcatattctgattattttgctttgggctgtggttcagattgtgacgttatgccagatgttttttcataatgtgttaggttttttttttcccccttaagaaggacattaggagggccttttggttttgttttttatttttattttttttgatccttgcttggttgaaatgccttttggttttattatatatagttctttgaaaagccatttgaattatacagctaagctttcagtgagcatgatcattttcaaacttcatgttttaaattaagattccgagaccattcgactgccctatgaagaaggagagttgcttgaatatttggatgcagaagaattacctcctattttggttgatctcctagaaaaatctcaggtacaaaatttttgtctttaaaatgtctttatatttgttatatgtatatgatatatatatgtcacatttttatgtatgtatacatatatgtatataaacgactacatgatgtttcatgacagatgatatttaatttctatcactgttcccaacagcctttagaacatgaaatcaggctgggctttggtggctcatgatgcctgtaatcccagcactttgggaggctaaggcaggaggatcacttgagcccaggagtttgagctcactacagtctcaaacccctgggctcaagtgatcctcctgtaccactgcaggattagagaaggaaggattagagaaggaagaggaaaaccagaattgcagtgattgcaccactgcactccagcgtgggtgatagagcaagaccctgtctctaaaactaataataatagaagatgaaatgagacatatatagctatctggaaatgggcttattgtcggatatttaacctttagggtatactgaaacgtagagacgtagttcttctaaaatagttagaacaattagctcatcaattggaaatctccctatagttacaatcaagaaattatgaaagaaactactttgaatatttatgaagtttttcacttgggggccagaaactggcctttacatctgtacttctgttcatagcttgcctaggtaagcactcccttgccctgttctactttcttcttactgccttaacttaaccccagccatactgtgtactctactgaggaaaaagaagacatcacatgagaactctcgtttcctcctagcaccagtcgactagcatccctacctctctcttcatatctgcctgccttcccgttaaaatagttgatgtatactgtttatagacatccatcccctccacttgttttctggatcctccccttccttctcaaggacttaaaattataacctctctttttttctatttctctttctctattaaatgcagaatgcaagcatactgtgttacaggttgagcatctcaaatctgaaaatttgaaatccacagtgttccaaaatctgagcactgactgacacttaaaagaaatgctaattggaacatttccgatttcaggttttttgattagggctgcttaacctaagtataatgcaaatatttccaactctgaaatgcttctggtctgaagcacttcagataaaggattcttaacctgtatgtctcaaattttaaaaaaatcctcccttgacctcatatccttctccaactactgctcttgttactcttgacagccacgctactcaaagaatttatagtcatttcctcttttgcagatcccattctttccaccacctatctcatttggcatcatgacatcgttctgcagaggctgcatttgtcagttaccagtgatcttcatatactgaataattggtcacttttctgttctcttcttaattggcctcttagcaaagatcagtggatataactgcgtcctgcttgaaatgcctttctgttgacttctgagacatcattttcctggttttcctctgctttctctaatccttcggtcttttttactataatccctgttccatccataaacatgtgtgttttcaggttcagtccttggctctctgtttttctttagtaatattctccctgaatgatttcagccagtttcatgggtttttaaaatgttacttagtctattgcttatatgcctcaccatggccattccaccaagctcctaacttacatattttcttggatatataataggttcctcaaatttaacatgacaaaaacagagctttattttacctcccaaaccagttttatcaccagtctcttcagtctaacagatgactctgtccttaccttccacattcagtccatcagcaaatgccagtctctctttaagatacatgatcgtgcccagtgctctgaacaaaacctttgctttcctgtttgtcttcatcttctagatctcatcctcactcgctgcattccatccatccttgtctcatttccacaataaaacactccaagcttgttcctacagtaagaacttctcatatgttattccctctgtctggaatgatctgtccctgaagtgtctggccgtttcttgtgattcagatcttaggtaaaacctaaggtttctatctgcacatacaatccagattagcccttccctatttgatttcctttatagaattcatcactatctaaaattactttgttctgtttacatgtttattgcctgtcttcccacaactgagagcaaatgttgtctgactactgtatctgtgaagctgtacctggatagtgcctagcacatagtaggcattgtagttgctcagtaaatatttatttaaaagaatgacaataagaatgacaaaacatggagaccacagtacccactaaaagttctgaatgggtgaaaaacatactatgagtgaccatggcaagtcataactagcaagacttcgatgataatagttcttacatttgagcatagaaaggactgaaaaactatttttctttttttttttttttgaggtggagtctcgttctgtcacccaggctggaatgcagtggcccaatctcggctcactgcaagccccaccgcctgggttcatgccattctcctgcctcagcctcctgagtagctgggactacaggcgctcgccaccacacccagctaatttttttgtatttttagtagagacgcagtttcaccatgttagccaggatggtctcgatctcctgaccttgtgatccacccgcctcggcctcccaaagctgggattacaggcatgagctactgcacccagcctgaaaaactatttttcatttgaattttatatttagcttccctcttattaataaaggctaagggcaaaattatatttctgaaaattttagcagagcaaatatagaagttatatctagaagctaaaacactggcaaggttggttggcaatttataacaatgataaactttatagtaatgacaaagttagtgaaatgtaacagtaagcctgtgagctgcagaagaacagcagttccaaggatctgtaacataatagtatgtaaatgccaaaagtcaaactgttgacttggtagatgccaaagtcaatctataattagaaactattaaatagttttaaattgcttcttgtgtcatagtgatgaacatgaaatacttcctctgaaaaggtttacatagtgttaaatctaccaaggaaatctactgaagagtacatacatgagtggccagaaatgttgcatgaatgtaaagaatgcgaaatgtttgatataaacccacttatttaggcttttggaaaaaaaaatgacgtttacgtatttttgcccaaacaggttaatatttttcattgcggatgtgtcatagcagaaatacgtgactacaggcagtccagtaacatgaaatctcctggttaccaaagtcggcacattctcttacgtccaacaatgcaggtaaggatgtttaattaagaaatactattttagattttagttgggagttttatttatcgaattcttcatatgtttgtgcatagattaataagttttttaaatttttatttcttctagactttaatttgtgatgtacattcaataacaagtgataaccacaaatggacccaggttagttgttttgttttttaatctcaaacaggcaaaatataggatgaaaaaaaattatcattaagcaaaagtgattttctgcttatttttattcaataattaagtttgatgctttatgtgaaaagctggtattcctttataagatctagaagttaagggtctctttatatgtgtagtaatccctcaagttgcctaagatcattttaaggtcaagctggcctaatatattcaatgagataaaacttagttctttatctcctctcaaacagaagaaaaatgttttgtttttaccatggttacaaatagatactggtttttttttttcaaataattcaagtttctaaaccctagcctagcctatctttctttgccatttatactggttgccttgaaatgaggggaactctcttacccctgagaataaccagttaacccctccagttctggctcagtgttatatgaggggacttcagaaagtttgtggaaaactggaattaaaagataataataaaaaatataaacttttcttctcaatataagctccatcaagttcaagatgcttgtaaatgatatcaaccatttatttagtccacccctgaagaactgagggtcctgggaactgaaccatatcaatgcaatcttttctacattattaactgaagaaaaatgggtactttttaaactttttttttttaagattaggaaacaaaaagaagtcagaaggagccaaatctggactgtaaggtgcatacctaatggtttcccatcaaaactcttacaaaatttctcttttttgatgagaggaatgagtagaggcattgtggtgcagaagtctctagtgaagctttcccaggcatttttctgccgaagctttggctaactttctcaaaacactcataataagcacgttatcattctttgttccttcagaaagtcaacaagcaaaatgtcttgagcatcccagaaaactgtttccatgatctttgctcttcatctgtctgcttttgctttgactgaatcacttctgcctcttggtggccattgccttaattgtgctttactatcttcaggattatactggaaagaatgctttagtatcttggtcctacttgttgaaaatttctattgaaagctctgcttttgcagctgatcgggatgcagtggttttggtacccatcgagtggaaagtttactcaactttaatttttcagtcaaaattgttcaggctgaaccagttgagaggcctatagtgttggcaattgtttctgctgttaatcattggtcctcttcagttaggttacaaacaaaatgaatttttttcctcgtaaattgatgtggaagatctgctgctgcaggcttcgtcttcaacatagtcttgtcccttcttaaaacaagttacccatttgtaaactgctgctttctttgaggcattcttctcataaacttttcaaaaagcatcagtgatttcacaattcttccactcaagcttcaccatcaatttgatgtttgttcttgcttcagttttagcagaattcctgttgctctggtaaaggctgttttcaaactgatgtcttatccttcttagtgtttcaaactaggttctgttcagacatgttataacagcttagtacatgtttattttggtgcaaaaagttttgaaacctatgtatagttttttcttaatactcatttttcataaactttttaaagaccccttgtatatgagatgtccactcacaaaagtgttcagttgcctgactatagtgaggaataattactaagtcaaaagaaaatatcagtaatggtagttatcctttctgtgacatgtgattataaactaagcttcagttcatcagtaactaccaagtattgtgttttggtttgggctataatgttgtcatctacaaaaagattaaaagctattaaaagaatattrgaaaacagaaaaactcattggttaccatcagagtttgctagggcatcagattcttactctgaagattgataaaggagagaatataatatttatcctgcccttcttgttatgaactgtattttaggcagccaagtaactgagggaaaattcttaggaaaatttccagctaataggtgcaaaagaaatgatagacttttaaaaaataaaagtttgaaagtcttaatgaagtagtgaatctagacagcagtatttcttggatgtgaaaaccattagatgataggttaatgggaaattttataatgtagaaatctgatcaaacccactgattgaagatgagacagtcaattattgtgtacctcctggtttgatgcaagagacagtacacaacagtagtaatagcaccaataaagaactcttgtccaaaaaaaaaaaaaagagcccatattaaatcaagccactagttgtaactagcagtttataggaattcagtgaataaaataaactcttaagtgacacaatgaggaagaaaccagccagatctagttaatggacatgagaaagcaactggttaattctaacaaattcttatttagcaatattattaattgattcacttttttaaaaaaaatagccttagctatcaagatatttcagaggttaagcaaaataataggattcagtaaaatatgttatgtgataatagtaaagagcctgtatgtttggaattgggtatatagagttcacacaatattagcagagtcatttttattcttgtaatgtagttgagttgagtataggataggactgttacttcacagttactgaaaaatgccataaccctttatgaccctataggttttgtgagagcagagggttttgttttgctcactaccttatccccagttcctggaaaggtgcctaacacatcataggtgctcagatagtttcttgaattaatgagtagccactcttacaacctgaccattccgtgctctacaaattatagtcatacctcggagttactgtgggtttgattccagagcactgccgtaaagcaaatactgcaataaagcaagtcacatgaactttttggtttcctagtctataaaaaggttacatttacactatatagttgaccttgaacaacacagaggttaggggcagtggcccttgtgcagtcaaaaacccatgtataacttctgactcctctaatacttaactactaataactactgttggctgggaagccttactggattttttttttttttttttttgaggcagagtcaggttgcaactcaggttgcagtgcattggcacaatctcagctcactgcaatctctgcctcctaggctcaagtgatcctcccacctcggcctcctgagtagctgggactataggtgcatgccaccatgcccagctaatttttttttatttttggtagagacaggatttcactgtgttgcccaggctgatctcgaactcctgagctcaagcgttctgcccgcctcggactcccaaagtactgggattacagatgtgagccaccatgcctggcgattaacatgtattttgtatgttatgtgtattgtgctctgtattcttagaattaactgttagaaagaaaagaaaacattattaagaaaatcctaagagaaaatatgtttactattcagtaagtatatcatattaaaggtcttcatcctcatcatcttcacattgagtaggccaaggaggaggaagaggaaaagttcatcttgctgtctcaggggtgcaaagagataaagaagatggaaggggaggcagaagaggcatgcacactcagtgtaacttgtattgaaaaaaatctcctagctggtcgcagtggctcacacctgtaattccagcactttgggaggctgaggcgggtggatcatgagggcaggagatcgagaccatcccggccaacatggtgaaaccccgtctctaaaaatacagaaattagctggacatggtggcgtgcgcttgtagtcccagctactcaggaagctgaggcaggagaactgtttgaacctaggaggtggaggttgcggtgagctgagatcgcaccactgcactccaacctggcgacagagcaagactccgtctcaaagaaaaaaaaaaaactccagtttaagtggacctgcatagttcaaatccatgttgttcaggagtcaactgtactgtagtctattaagggtgccatagcattatgtttaaaaaaaaatctatatacattaattcaaaaatactttattgctaaaaaatgctaatgatcatctgaacctttagggagtcataatctttttgcttctggaaggtattgcctggatattaatgactgctgacagatcaggatctgacagattgagatggcagtggcagttttttgaaagacaacagtgaagtttgccccattgattgtttctttcatgaaagagttctctatagcatgtgatacagttttaccctacagtagaacttctttcagaattggagttagtcctctaaaaccctgttgctgctgcattatcaactaagtttatgtagtagtataaatattacgttgtcatttcaacaatgttcacagccaagaatagagtctatctcaagaaaccacttttgccaggtgccatggcttgtgcctgtaatcccagcacttttgggaggccgaagcaggcggatcacaaggtcagcagttcgagaccagcctggccaatacggtgaaaccctgtctctactaaaaatacaaaaattagctgggcatggtggcagttgcctgtaatcccagctactcgggaggcttaggccgagtagcaattcaagaattgcttgaacccaggaggtgaaggttgcagtgagcctagatcacgccattgcactctagcctgggcgacagagggagactctgactcaaaaaaaaaaaaaacactgtatatggtcatccataagaagcaactcatccattcaagtttgatcatgagattatagtggttcagtcacatcttcaggctctctacttctaattgtagttctcttgctatcaccacatctgcagtgatttcttgtcctgaagtcttgaaccccttggagtcatccatgaaggttggaatcaacttctcccaaactcatattaatgtttctattttgacctcctcccatgaatcatgcatgttcttagtgtcatctacaatggcacatcctttccagaaagtttttaatttactttgcccagatccatcagaggaatcactatctatggcagctaaagccttacaaaatacattttttaaatattaagacttgaaagtcaaaattagtccttgatccataggctgcagagtggatattgtgttggcagctatgaaaacattaatccccttgtacatctccatcagagctcttgggtgacaaggccattgttaatgagcagtaatatttttgaaagaatcttttttttctgagcagtaggtctctacagtggccttaaaatattcagtaaaacatgcagtaaacagatgtgctgtcatccaggctttgttgtttcatttatagagcactgatagagtagtaattcttaaggattgtaggattttcagaatggtcaaataagcattggcttcagcatcaagtcatcagctgcattaacccccaacaagagagtcagcctgttctttgaagctttgaagccagacattgacttctctctagctatgaaagttctggatggcatattcttctaatataaggctgtcttgtttaatttgaaaatctgttgtttaaggtaaccaccttcatcagttatcttagatcttctgcataacttgttgcagtttgtatatcagtacttggctgcctcaccttgcacttttgtgttatggagacagcttctactcttaaccctcatgaaccagttttctgctttaaacttttcttctgcagcttcctcacgtctctcacatcatagaattgaaaagagttggaatttgctctggattaggctttggcttaaggaaatgttgcaactagtttgatcttctatccagaccattaaaacttcctctgtatcagcaataaggctgttttgcatttttatctgttatggatattcactggagtagcacttttaatttcctttatgaacttttcctttacattcaccacttagctaactgtctggtaccataggcctagcttttggcctgttgtagctgtttataggcctttctcactaagcttaatcatttctagctttggatttaaaatgagagatgtgtgactcttcctttcagttgaacactaagaggccattttttgcctaatttaaatattataatgtttctagaagtaagaagtcctgagaagaaggagaaagataggggagatcccacactggggagtggtggatcggtgaagctgtcagagaacatacatcatttcttgatttagtacacattgaatatcacagatcaccataatagatttaataataatgaaaaagtttgagatacaaaaaaaattaccaaaatgtgacacagacacaaaataagtgtgtgctgttgggaaaatgatgctgatagccttgcttagtgcaaaattgccacagatcttcaatatgtaaaaagtgcaatatttgcgaaccacaataaaatgaggtatacctgcattgaatttccattagaagtttctttatgctgtctggtttctaaaagtttacatgcacactaacattggaacttgaaataccatattttactgtagtccttagcagaattccagggaatatttctagattaagtgcaatatatgattacatatttgaaaatcttaaatctggtattgacatatgctcttacacatttcaggaagacaaacttttgcttgagagccagctcatcctagctacagctgaaccactctgtcttgatccttctatagcagtcacctgcactgcaaacagactgctctataacaagcaaaagatgaacactcgcccaatgaaacggtaattgcctttgtggaagggtgaaccaaaagacacaagtagctataaattttgctatttatagtatcttttccctccagggtatggttgctccgattttggtggggaagggtagagatgaggtctctctttgttgcccaggctagtctcaaactcttggcctcaagtgatcctcccactttggcttcccaaacagctgggaatataagcatgaccaactgcaccagcctctgatttttttttttctttttgaaaataggattcttaatggtctcatattatatatttttatatagtattattatttttttaaatgctctatgctttagattgaactgttgcattttctgcagtcttttaaagaataaactttttctaagtttatagtctgtttgccaaaaaggtaaagaggctgagatcaaatatgaacagaaagaataattttttcattattttcctactaatgaatgactgatttaattgttgttaatcctactttaaggaaagaatttgtaattttgagatttgagaaaatatgatcatagtttttagaagtcagttataaactgaatccaggcacacctaccttttgtttttgaaacaaaccaagcttattcctccctcggcatcttttaaaaatgtcccttcaaatagtcattccctgatctttcagaatattttcttttccccaccctccatgggaaacatgaggggatttttccccggtagtcactgtgagaacctctttgagctcctggagataaaacccccaaaagtctgggggctcccagtgactaggtccccttggagttttgaatctctcagacatgtccacagtaggcctccagcaattcatcagttatacttgaggttccctaccctggcactggttcctgaggaggtttctgctaatgggtttctgcttcagcaaggcatgatggtctgcatttgcctattggtttctccaagtttggggcagtggtttgtcttgtgaccacatctctttgatggatctaagaagaatcgttgatttttctgttta

SEQ ID NO: 97215 - DNA, 18264 bp, Homo sapiens
  misc_feature (1)...(18264): n = A,T,C or G
tgaactggccggttgtgatggctcacgcctgtaatcccagcactttgggaggctgaggtgggcggatcacttgggatcaggagttttagagcagcctggccaacatgatgaaaccctgtctctactaacaatactaaaactagctgggtgtggcagcacatatctgtagtttcagctacttaggaggctgaggcaggagaatcgcttgaacctggaaggcagaggttgcagtgagccaagattgtgccactgcactccaacctgggcgacagagtgagactctgtctcaaaaaaaaaaaaaaaaaacacgaaaaaaacgaaggccgggcgcggtggctgaagcctgtaatcccagcactttgggaggccgaggctggcgaatcacgaagtcaagagatcgagaccatcctgcctaacacggtgaaaccccgtctctactaaaagtacaaaaaaattagccgggcgtggtggcgggcgcctgtagtcccagctgcttgggaggctgaggcaggaggtggagcttgcagtgagccgagatcgcgccactgcactgggagacagagcaagactccatctcaaaaaaaaaacaaaaaaaacgaaaagaaattgaactgtgttcagatgcagtaaggaaaggagaggaggagataggaaagagaaagaaagacattttcaacggcttggcatgctcaatccttcatagttttgttctctctgtgcctaacagggaaaaggaacttactgtgttctaggaactgttagaagttgagtgtagctctcgcctgtaataccagcactttgggaggccgaggcgggcggatcgcgaagtcaggagattgagaccatcctggctaacacggtgaaaacccgtctctactaaaaatacaaaaaattagccgggcgcggtggcgggcgcctgtagtcccagctactcgggaggctgaggcaggagaatgtcgtgaatccgggaggcggagcttgcagtgagccgagatcgcgccactgcactccagcctgggcgacagagcgagactctgtctcaaaaaaaaaaaaaagaaaagaaaaagaaaagtagggccagtagggaatatgaattttattctaagtataatgagaagtattaaagttgtttcttctagctgtattttgctttttattatggaaaaatctcaaacatttacaaaagtagacaaaatatgaaaatattactcattgcccagctccaaccatcattaatcccctgttcccaacttataatttcttcttttttttgagacagagttttgctcttgttgccgaggctggagttcaatggcacgatctcggctcaccgcaacctccgcctcccaggttgaagcgattctcctgcctcagcctacctagtagctgggattacaggcatgtgccaccacacccagctaattttgtatttttagtagagacggggtttcttcatgttggtcaggctggtctcgaactcccaacctcaggtgatctgccctccttgtcctcccaaagtgctgggattacaggcatgagccactgctcccggcccaacttaaaatttcttttctttttttttgagctggagtttcgctctgtcatccaggctggagtgcagtggtgagatctcggctcactctaacctccgcctcctgggttcaagcgattctcctgcttcaaccttccaagtagctgggattacagacacccgccaccatgctcagctaattatttgtatttttagtagagacaggttttcaccacgtggccaggctggtcttgaactcccgacctcaagtgatccgctctcctcagactcccaaagtgctgggattacaggtgtgaaccacctcgccttgccactatccccattttagagaggcaaaatcaaggtacagaaaaacttgcccatggtaactagctagaaaatgatagaagcacttgggtccgggcagtctaattccagagtccttcaaacttcctcttgtcactgttgtcattcaaagaggagtttctgtatctagcatttacgctaagctctacataaattatctcaagtgaccttcacaaagtgtgtgagatggaggtgtcatgctcgtttcacagacaaggaaacaggttccaaacagctgggtcacttgctcagggttattttactaataaatggcagataggaatccagatctgtccaactccaaaatgaacacccttagattatgcaatctctaaggtcaagaaatacattctagtctcacagctggaagaattcatctggttcaaaagcttcctttcacagatctgaggccctgagaagggaagtgttgggtccaagtttgaggcagagctaggggtagaaattgcctcagatttaccatcctagaatgatgcttggtaataggtggtagaaacactgtaaatgattgaacttctaaaatgtaagaacagacggggcactgtggcttatgcctataattctagcactttgggaggctgaggtgggaggattgcttgaggccaggatttcaagaccagactggggaacatctcgaatttaaaaaatttaagtaaataaaatttaagaacaaacacaaaatcatgcatgagggctgggcgcagtggctcaggcctgtaatcccagcactttgggaggcccaggcaggtggattatctgaggtcaggagttcaggaccagcctagccaacatggtgaaaccccgtctctactaaaaaatataaaaattagccaggtgtggtggcgggcgctaggaatcccatctactcaggaggctgagacaggagaatcgcctgaacctaggaggtggaggtggcagtgagccgagattatggtgttgcactccggcctgggtgacagagcgagactctgtctcaaaaacaacaacaacaacaacaaaacctgctatatcctcatcacctataacagtgtctgcctggcatgtagtaggttctgtttttttgtttgttttgtttaagacggagtcttgctctgttgcccaggctggagggcagtggtgcagtctcagctcactgtaacctccacctcccgggttcaggcgattctcctgcctcagcctcctgagtagctgggatcacaggtgttcaccaccacgctggctaatttttttttttttttttgagactgagtctcgctctgttgcccaggctggagtgcagtggtgcaatcttggctcatcacaacctccacctcccggtttcaagggattctcctgcctcagcctccagagtagctgggactataggtgggcgccacaatgcccagctaattttttgtatttttagtagagacagagtttcactatgttggccagcttgtctcgaactcctgaccttgtgatccccctgcctcgccctcccaaagttctaggattataggcatgatccatcacgcccagcccgaggatatagcttttaacaaaataggccaagtctctattgtcaagcagcttattttctgtttcattcaataaacataataaaaatagctaatgcttatctagtgcttaccattgctggcaccaagtgctatacaatgaccatactacctcatttcaattttcgtaacaaccctttgaggtatttgtactattaatattacctcctcatttccagaagaaggaacagttatggagtggttaagtaaagtatacaactagtaggtagaagagctggaacctgatctaggtacactggcttgagtgagggctcttgatgaggtgtactggctccctatacagttagcaagctctatctctggcaggtgtggggctgtgagttagacgaaggtccctatgctgggaagctgtgggagagagagaagcttaaataatgaagacggatggaaggatgttattcatacttgctactgggaggacatcttcaggctagctagcccaatttgttttgggctccctctccctccttctctttcttagtttttctttttcttttatgagttttctcttctttccatctcttttctgctttctctcttcccttttctctctctctcgtaaaagtatttttgtaggaggggtgcagtggctaacacctgtaatcccagcactttgggaggctgaggcgggcggatcacctgaggtcaggagtttgagaccagcctggccaacatgtctccaattagctgggcgtggtggcacatgcttgtagtcccagctacttgggaggctgaggcaggagaattgcttgaacctgggaggtggaggttgcagagacgagactgcactccagcctgggcgacagaatgagattttaaaaaaagcctgggtgcggtggctcttgcctgtaatcccagcattttgggaggctgaggtggatggatcacttgaggtcaggagtttgagaccagattggcggacaggggaaaacgttgtctctataaaaataaaaaaattagccagatttggtagtggatgcctatagtcccagctactcgggaggctgaggcaggagaatctcctgaacctggaaagtggaggttgcagtgagctcagatctcaccactgcactccagcctgggtgagggagtgagactctgtctcaaaaggaaaacgaaacaaaacaaaacaaaaacaaagagagactggccgggtgtgcgtggcttactcctgtaatcccagtgctttgggaagctgaggtgggtgaatcacttgaggacaggagtttgagatcagactgggcaacatagcgagacactcgccccacccacatgcaaatccctaactctgaaaatatttaaaaagtagccaagtgtgatggcgcacgcctgtaatctcagctacctagaacgctgaggtgggaggatgtcttgagcccaggaggtcggggctgccgagaggggtgatcctatcactgcacggtcacaaaataaacaacaataacaacaacaacaccaacaaaaaaaccttcctatgcttcatttttttaaagtcctgagttgaggccgggcgcggtggctcacgcctgtaatcccagcactttgggaggccgaggcgggtggatcatgaggtcaggagatcgagaccatcctggctaacaaggtgaaaccccgtctctactaaaaatacaaaaaattagccgggcgcggtggcgggcgcctgtagtcccagctannnnnnnnnnnnnnnnnnnnnnnnnnnnnnnnnnnnnnnnnnnnnnnnnnnnnnnnnnnnnnnnnnnnnnnnnnnnnnnnnnnnnnnnnnnnnnnnnnnnnnnnnnnnnnnnnnnnnnnnnnnnnnnnnnnnnnnnnnnnnnnnnnnnnnnnnnnnnnnnnnnnnnnnnnnnnnnnnnnnnnnnnnnnnnnnnnnnnnnnnnnnnnnnnnnnnnnnnnnnnnnnnnnnnnnnnnnnnnnnnnnnnnnnnnnnnnnnnnnnnnnnnnnnnnnnnnnnnnnnnnnnnnnnnnnnnnnnnnnnnnnnnctctctctttctctctctctctctctctctctctctctgtgtgtgtgtgtctatcgggactcttgctctgtcgcccaggctggagtgcagtggcgcgatctcggctcactgcaatctctgcctcccgggatcaagcgattctcctgcctcagcctcccgagtaatcgggattacaggcataagccaccacgcctggctaatttttgtatttgcagtagagacggcaggctagtcttgaactcctgacctcaggtgatccgccctctcgggctctcaaagtgctgggtttacaggcgtgagccaccgcgcccggcctagtctgtatgtcaataggcttttgaataaagtggttgcatatagggcgaatcggcttcctgctatcatcgtcccgggattatgctctgggactccgacagggtgcggaactaatgtaagagggtcgaggacatcgccggattaattttcctgcgaggcctggtagctggttcctttcgcgtttcctgtcagcgcgcatgcgccgcctgcgctccgccgctcgcgcctcgggctcggctcgggctccgggatgtccgcgctgtgcgaccctcccggggccccagggccacctgggcctgccccggccacccacggtcccgcgcctctcaggtagttagagcccttggcaccttccccccatcgcgcggccccgcgccgatccctagccttctcggtagaaacccggatcctacctcgagractcacgtcagggttctcagattcttggtcaggtcctcccagaactcagggactgcttcaccaaaactcagggctccagtgcccgccctcccgacctcgggcctgcctctcgctagactccaatgcctaactaccctcgaccccgggcttcctctcccaagagtcgggggtatctgaactcttgggaacccagctgccctggccatttttgaccctaggaaacccagtgtcctgacttcatagagactccctgagaacccaggcccagaaacagaatgcagtccggctgagatattcccttatattagggtgttttttggaggaaacagaggaatggcactgttagagccttatcagcacctagaggatgctgtcttctttgacagaaaaggcgataagagaaaggggatttgccacctcccataacattggcttctgaacctctgagactgaacccatatatgttttaggagggaaagggttgaaaagcattattactctgtgccctgggacaccctgatgtccaagcacattgagggtgctgagtaggtggtggtggttgatgtggtggtaggtgactaagattttgcagaatatgggaagaaacagatgttaggagggagagcccttaataaggtgcttacaattttttttttttcccattaagagatttcaaggtgcttgtgttgtgggatggggcggggcgggggtggtggtagaaggtgataaagtggaaaggtgtgtttttttttgtttttgttttttgagatggtcgccctgactcccaggctggagtgcagtggcgtgatctcggcttactgcaacctccgcctcctgggttcaagcgattctcatgcctcagcctcctgagtagctgggattacaccatgcctggctatttttttttttttttttgtatttttaatagagatgaggtttcaccctgttggccaggctggtttcgatcttctgacctcaagtgatccaccctccttggcctcccagagtgctaggattacagacgtgaggcacctcagccagcctggaaatgtttttaaagcagatattatagaaacacaaatatagtcaactcaacagatatttattgactaccttccatatactgtgtacttcaatagaagtggatacagtgttgaagagcacagaaatggttcctacactcatggcgcatatagtctgattgcttaaccttgatttcgttcttttttttgacggcgcacacagtctggggtgcagtggtgtgattttggctcactgcagccctgcttccagggctcaagtgatccttctgcctcaacctccccagtaggtgggaccgcaggcacatgcgaccatgcctggctaattattattattattatttttgtagagatggggtttcactatgttcctcagactggtcttgaactcttgcgctcaagcgatccaccagccttggcctcccaaagtgctgggattataggcgtgagccactgaagccagccttgatttgtctgtaaaatgggatcataatagtacctaacttattgaactgttgtcaggattgaaataatacacgcaaagtacttaaaagagtacctgatatattctaagagttatctgttgctgatwttattactgttgtcattgaaagaaacatagcttttggccgggcacgtggctcacgcctgtaatcccagcactttgggaggacgaggcgggaggatcacaaggtcaggagatcgagaccatcctggctaacacggtgaaaccccgtctctactaaaaataaaaaaaaaaatattagccgggcgtggtggcgggcgcctgtagtcccagctactcaggaggctgaggcaggagaatggcgtgaacctgggaggtggagcttgcagtgagtggagatggcaccactgcactccagcctgggcggcagagcgagactccctctcggggcggggggagaaagaaacatagcttttattgagtgattagtgtgaatctggtatggaacctaagtgcttttttttccctcaggccatccttctgcagaacttaagtgctttataaacattctcaaccaggcatggtgcctcacacctgtaatgccagcactttgggaggctaaggtgggcaaactgcttgaggccatgaaaccagcctgtggaacatagccagacctcatttctataaaaaggttaaaaagttagctgggtgtcgtggcatgtgcttgaagttgcagctactcaggaggctgagatgggaggatgctttgagtctgggagttcgagactgcagtgagctgtgatcttggcactgcactccagcctgggtgacagagagagaccctgtcttgaaaaacaaaaacagggcgggagcagtggctcatgcctgtactcctagcactttgggaggctgaagtgggcggattacttgaggtcaggagtttgagaccagcctgggcaacatggtaaaatctgtctctactaaaaatacaaaaattagccgggtatggtggcacacacctgtagtcccagctactctggaggctgaggcaggagaattgcttgaactcagtaggcggaggttgcagtgagccaaggtggcgccactgcactccagcctgggcgacaaagcaagactctatctcaaaaaacaaaacaaaggccgggcgcggtggctcacgcctgtaatcccaacacttttggaggccgaggaggacggatcatgaggtcaggagatcaagaccatcctggctaacacggtgaaaccccatctgtactaaaaatacaaaaaattagctaggcatggtggcgggtgcctgtagtcccagctactagggaggctgaggcaggagaatggcgtgaacccaggaggcggagcttgcagtgagctgagatcatgccactgcactccagcctggacaacagagcgagactccatctcaaaaaaaaaaattctcttatgagggaagtatttttattatccctatttaacataaaaggcaaagctcatacaggaaaggtaagttgcctaacatctcacaacactcttaagtctgtttcttttgcttccttgtagtgctcaggagctgtcccaggaaatcaaggcttttctgactggcgtagaccccattctgggccaccaactctcagcccgggaacatgctcgctgtggtcttctcctgctccgttctttgccacctgctcgggctgctgtgcttgaccacttgagaggtgtctttgatgagagtgtccgggcccacctggctgccctggatgaaacccctgtggctggtccacctcacctccgtccacctccaccctctcatgtccctgctggtggacctggtctagaggatgtggttcaggaagtgcagcaggtgctgtctgagtttatccgggccaacccaaaggcctgggcacctgtgattagtgcatggtccattgacctcatggggcaactgagcagcacgtactcaggccagcaccagcgtgttccccacgcwactggcgctcttaatgaactgctacagctgtggatgggttgtagggccacgcgtacattaatggacatctatgtgcagtgcctctcggctctcattggtagctgcccagatgcgtgtgtggatgccttgctggatacctctgttcagcattctccacactttgactgggttgtggcacatattggctcctcttttcctggcaccatcatttcccgggttctctcctgtggccttaaggacttttgtgtccatggtggggctggaggtggagctggcagtagtggtggaagctcttctcagaccccctctacagaccccttccctggatctcctgccattcctgcggagaaacgggtgcccaagattgcctcagttgtaggcatcctaggtcacctggcctcccgccacggagatagcatccgacgggagctcctgcgaatgttccatgatagcctggcagggggatctggaggccgcagtggggacccctcccttcaggccacggttccgttcctactgcagctggcagtcatgtcaccagctttgctgggcactgtctctggagagcttgtggattgcctcaagcccccagctgtgctgagccagctgcagcaacaccttcaaggattcccccgagaggagctggacaacatgttgaacctggctgtgcacctggtgagccaggcctctggggcaggtgcctaccgcttgctgcagttcctggtggacacagctatgcctgcttcggtcattaccacccagggcctggctgtgccagacaccgtgcgtgaggcttgtgaccggctaatccagctgctgctgctgcacctgcaaaaactggttcatcaccggggagggtctcctggggaaggggtgctaggcccgcccccacctccccgcttggtgccctttttagatgcgctcaaaaaccatgttggagagctgtgtggagagacgttacgattggaacggaagcgcttcctctggcagcaccagctcttgggcctgctgtctgtctatacccggcctagctgtggacctgaggccttgggccatctgctgagccgagcccgaagccctgaagagttgagtttggccacccagttatatgcagggctagtggtcagcctctctggcctcctgcccctggctttccgaagctgtctggctcgggtgcatgcagggacattacagcctcccttcacggcccggttcctgcgcaacttggcactgctagtagggtgggaacagcagggtggcgagggccctgcagccctaggggcgcactttggggaatctgcctcagcccatctgtctgacctggctcctctcctgctacatcctgaggaggaagtagctgaagctgctgcctctctcctggccatttgtccctttccttctgaagccttatccccctcccagctcctgggactggtaagggctggggtgcaccgcttctttgcctctctgaggctgcatggacccccaggtgtggcctcagcctgtcagcttctcacccgcctgtctcagacatccccagctgggctcaaggctgtcctgcagctgctggttgaaggagccttacatcgaggcaacacagaactgtttggtgggcaagtagatggggacaatgagactctctcagttgtttcagcttctttggcttctgcctccctgttggacactaaccggaggcacactgcagctgtgccaggtcctggagggatttggtcagttttccatgctggagtcatcggccgtggcttaaagccacccaagtttgtccagtcacgaaatcagcaggaagtgatctataacacccagagcctcctcagcctcctggttcactgctgcagtgccccagggggcactgaatgtggggaatgctggggggcacccatcttgagtccagaggcagccaaagcagtggcagtgaccttggtggagagtgtgtgtcccgatgcagctggtgcagagctggcctggccccccgaggaacacgcccgggccaccgtggagcgggatctccgcattggccggcgcttccgcgaacagcccctgctctttgagctgttaaagctggtagcagctgcacccccagccctgtgctactgttccgtgctgcttcgggggctgctggccgccctcttgggccattgggaagcctctcgccaccctgacacgacccactccccctggcacctggaggcatcctgcaccttagtggctgtcatggctgagggaagcctcctgcctccggccctgggtaatatgcatgaagtatttagccaactggcacctttcgaggtgcgtctgctgctgctcagtgtctggggttttctccgggagcatgggcccttgcctcagaagttcatcttccaatcagagcggggtcgcttcattcgggacttctccagggagggtggaggtgagggtggaccccatctggctgtgctgcacagtgtcctccaccgcaacatcgaccgcctaggtcttttctctggccgtttccaggcaccttcaccgtccactctccttcgacaggggacgtagccttttcttgctctggaagcccagggaggttgagcagtgagagagggaagggactaacgtgctccggaagggtggaggtttctcttctaagtccttggtctaaagagcgctgtcacttttttctctcccacttttttttttctaaataaaatttgccaacttgagaaaaccagtccagtgcttctgtcatgctgagagcgtgcaaagtctgacagcgcctggctctggacgttcccgcccctggcctgaagccccgccccctgcgataatttggagtgcgcactctaccaatgagacagctgcccggcggcgctcaggtcgaaccaatcataaggccggaaggggcgggaactaggatacgtggctgagcgcgcgcgatggggcgggaggtttggggtcaaggagcaaactctgcacaagatggcggcggtagcggcagtggcggcgcgtaggaggcggtgaggagcccggaatctgggggcgcgcccgggacgcccccagatcccccaagtcccattccactccttcctgtgtgtctcttgacactctgccacccccggcctcgtgaggaacctttgttcctctggaggcggcctcagacgcctccggtctccccgtggtagatccgagcgacgctgggggccttgcctgtggggctccgggctcccgcccggcggtttagtaaagccacagctgtgcgtctttcttggtcttggccgctctcagccgccgccctcctttggctgcttgcggcggtcaacgtcgccgcccccttcctgcagtgcgcggggtcgtcggggcgggggaaaagatgcggcctggcctcggggaatgcagcctgcggccccgcggcccctcggctgagctggaagcaccgggccagcagttaagcctgtactacccttctggctctaccctgtagagctccgaatcctcctctgcccttgtcttcacgtgagcaccagctctggcttagttcagtgtccacggtcgctgggcacggcccagggtccagtaagctcacggcgtggatggtgttgctcaaacacaacatgtaatcgaatggcttggtccacgctctcgggtttatattactggggaaaaaaaaagattcgaaacatatcaccagtgccacaaatgtttactaggacctaacggatatactggggtggggtaggcgtgtactctccaaagcgatgaagaaagcgtggatcataaactcagttccctcggagcctgtgatctgaaacaataaatgcgtgcaacttgccctgcagcttattcctgactttggcctatgaacacctctcttggggtggtcaaggccgccgtgaattccttagggccctccaacaggtcatatctgaaagatgctttaggaatcctatctccattggcatctttccgaaccaattttacagactgtgcaaatagggccccagagggtatttaactcactgtacgtcttttttttttttttttgagagacagagtctcgctctgttgcccaggctggagtgcagtggcgagatctcggctcactgcaagctccgcctcctgggttcacgccattctcctgcctcagcctcccgagtagctgggactacaggcacccgccaccacgcctggctatttttttgtatttttagtagagacggggtttcactatgttggtgaggatgatctcgatctcttgacctcgtgatccacccgcctcggcctcccaaagtgctgggattacaggcgtgagccaccgcgcccggcctcaactcactgtacttctatttactgctgcttttggcaggtggacgtgggtcagtggccaagagtgcctgttgcagtcactcaggtcactcactgcaggacctgtgccgcatgccttgctatggagttttgtggtagcatttattctgcttggcctattaaaccacagtgcctagtgttttcttcatttttctgtctggcctgctgtggaacagttgtttcgtacattcctctggagctggaggagagtcctgtgatgagatcatagtacactctgtgatctcatttctggtaattttcttttagctttcaagcagatgctgaagctaatgctagataactagatacaatgtgtataatagaccctgtctttagttaccttattataggttgtcaaattttatttatttatttatttgtttgtttacttattgaaacagggtctcgctctgttgcctaggatggagtgcaggggtgcaatctcggcttactccagcttccacctcccgagttcaagcgattctcctgcctcatcctcccgagtcctgggattacagacgtgtgccaccgtgcccagctaatttttgtatttttagtagacaccccattgaccagtcttaattaatttacttttttgagacagagtcttgtgctgtggcccaggctggagagcagtggtgcaatcgtagctcatgcagcctcaaactcttgcgttcaggcagtcctccggcttcagcctcctgattagctgggactacaggcacctgccaccatgccttgctactcttttttttttttaagtagagacgaggtcttgctgtgttgcccaatcttccctttttgacctcccaaagtgctaggattatagacgtgagccactgtgcctggctggttgtaaaactttattgcttagaagaaccctcccacccccagtttgaaacactttctcagagtatgctcgtattctgcccatatcagtgtcactgggagagcatgtttaaaatgtggtgtcagccgggcacgatggctcacacctgtaatcccagcactttgggaggccgaggctggcgaatcacctgaggttgggagttcgagaccagcctgaccaacacagagaaaccccgtctctactaaaaatacaaaattagccgagtgtggtggcacgcgcctgtaatcccagctacttgggaggcagaggcaggagaattgcttgaacccgcgaggcagaggttgcggtgagccaagatcgtgccattgcactccagcatgggcaacaagagtgaaactcagtttcaaaaaaaattaaaaataaaatgcggtatccagggtgggtgcagtggctcacgcctgtaattccagcattttggaaggccaaggtggaaagatggctttagcctagaagttcaagacaagcctgggcaacttttttttcttgtttttgagacagagtcacactttgtcacccaggctagagtgcagtggtgcgatctcagctcactgcaacctctgactcccaggctcaaaccattctcgttcctcagcctccccagtagctgggattataggcatgtgccactacgcctggctaatttttgtatatatctatttttttctaggtggtgtttcgctgtgtcgcccaggctggaatgcagtggcacaaccttggctcactgcaacctctgcctcccgggttcaagcaattttcctgcctcagcctcctgagtagctgggactgcaggcgtgtgccaccatgccctgttaattttttttttgtatttttagtagagacggggtttcatcatgttggccaggctggcctcaaactcctgacctcaggtgatccacccgcctcagcttcacaaagagctgggattacaggtgtgagccaccacgcccggcctaatttttgtatttttagtagagatggagtttcgccatgttggccaggctggtctaactcctgatctcgtgatctgcccacctgggcctcccaaagtgccaagattataggtgtgagctaccatgcctggctgattcttaacagacattaaaatttgagaatctctgtttaggatttattcagaatcctaaggatgaatcctggatgaatatattcttcaaactaacttatttaaataagcctattagtctcttatctgtcatttcatagcacattgggaaattgacaattcgtgataaccttgggatgatggtcctcaatgagacaggcccatttcatcctgctagtgattagtgtgctgtattgtgcatcatggtaaagcacatgggccccagagtcaagcacaactgggttcagttcgtttcatcccttaccagctatttaatcttgggtgaactattcaaccttttatgctttaattttcccatctggaaataaaccccaaccctatattcaccaagaaaacaatggaagaaagggaaaagaagatgcatgtaaagaagtggttgtgaacccaggttgctcattagagttgtttagggaactttaaaaaaactttagccagtggggcgcgatgacacaacgcctgtaatcccagcactgtgggagactgagacgggcggatctaggtcaggagttcgatacgagcctggccaacatgatgaaaccccgtctctactaaaaatacaaaaaattagctgggcatggtggtgggcacctgtaatcccagctgctcgggaggctgaggcgggagaatcgcttgaacccaggaggcagaggttgcagtgagctgagatcatgtcactgcactccaacctgggtgacagagcaaggctccatctcaaaaaaaaaaaaaaagtctgatgcccaggcttctctctgattaagttaaaatttttagaagtgagaccaggtcactgatattgttaaaaactgcaggcaggctgggcacagtggctgacactataatcccaacactttgggaggccaagatgggaggactgcttgagcccaggagtttaagaccagcctgggcaacaaagtgaggccctgttgctaccaaaaaaaatttttatttattttttttgagtcagagtcacgctctgttgcccaggctggagtgcaatggcatgatctgctcagtgtaacctccacctcctggttcaagcagttctcctgcctcagcctcctgaatagctgggattacaggcccctgctcccatgcctggctaatttttgtatttttagtagagatggggtttcaccatattggccaggctggtctctttgccagcctggtctcgaactcctgaccttgtgatccgcccaccccggcctcccaaagtgctgggtttacaggtgtgagccactgcgcctggccagaaaaaaaacaaaaaccacaactttttaaaaattagctgggtgctgtggcgagcaactgtagtcccagctacttgggagggtgaggcaggtggatcacctgaggtcaggaattcaagatcagcctggccaacatggtgaaactccgtctctaccaaaaatacaaaaattagctgggcatggtggcgtgctcctgtaattcagttacttaggaggttgaggcatgggaattgcttgaacctgggaggcggaggttacagtgagctgagatcatgccatggcactctagccagggtgatggagtgagactgtctcaaagcaaaaaacaaaaactgcaggcagtattaaaaactagtaatataaagtgattacccaggcccctaggggtgcattagggctcagaacattttagctattgttattttttttcagctttgggtagtgatggtggtgttttgaagatacaggagtagaaatcagagaaacaggctgcctagggtgctagggatgttaggaccctaggaactgtaaccagcaggctagctgagggtacatcttttttttttttttttttctgagagttttgctccatcacctaggctggagtgcagtagcacaatcttggctcactgcaacctctgcctcccgggttcaagcgattctcatgcctcagcctcccgagtagctgtcactacagatgctcaacgccatgcccagctaatttttgtattttaagtagagatggggtttcatcatgttggccaggctggtcttgaactcctgacctcaagtgatccacccgcctcagcctcccaaagtggtgggattacagacgtgacatgagccactgcgcccggccttcatgtttagctctttaactttgcatccaccc

SEQ ID NO: 97216 - DNA, 170497 bp, Homo sapiens
ggccaggctggtctcaaactcctggcctgaagtgatgcgcctgccttggcctcccaaagtactgggattataggtgtgtgccactgtgcccagctgacatagacttttgttcaagatagactgtgaagtagaaaaagcagcttacaaatgcagtatttttaaattattaacattttttaaaacatatatatgtatgtatatctatatgcacacaacactacaaaaagacaactcaatttaaatatgggtgaagaacttgaattagttctccaaagcatacaaatggccaataaacacatgaaaagacactcagtatcatcagtcattagggagacacaaatcaaatcacaatgcgattccacttcacacctactaggatggctataattttaaaaaatagaaaataggaagtgctggcaaggttgtagagaaattgaaaccctcatacatcattggtgggaatgtgaagtggtgcagctgctgtggagaacagtttggcagttccttaaaaagctagtcataaaattaccatatgacccgacaattccactcctagatatatacccaaagtattgaaaacaagaactcaaacaaatacatgtacacgcacattcatagcagcattattcacaatagccacaaggtggaaacagcctaagaccttatcactggatgaatgaataaggaattatggtatatacacacaatagaatattattcagccttaaaaacgaatgaatgggctgggagcgatggctcaggcttgtaatcccagcactttggaaggccgaggcaggcggatcacgaggtcaggagatcgagaccacagtgaaaccccgtctctactaaaaatacaagaaattagctgggcgcagtggcgggcacctgtagtcccagctactcgggagactgaggcaggagaatggcgtgaacccggatggcggaacttgcagtgagccgagatcgcgccactgcactccagcctgggtgacagagcgagactccgtctcaaaaaaaaaaaaaaaaaaaaggttaattttatgttatatgagtctcacctcaatttttaaaatctatatctatatatctatatatattacatgttatatatagaaactggaagggcacataatatggtaatagtcttgctgactggtagaattacaggtttttgttttcttatttattttgtttcaataatgtaagtttcattcataataagggcaaccgatttttcaaaagttattgtcgtgtgtagcatattgcatcttgcttctacttccagaagatcaggctacagtcctaagcagcatctattatattagtgattaccagccctttagaatcagatagcctataactttctacatgactgggagtatttttgtttggtttggtttggttcagttcagaaatgttctgtccaagtaaatcaaaggagaaagccagagaagaacctcagtgatggcagaatgtactggctatcctagcatagcaaaaattgtagccaaagcagaagaacccaggcctggaagtgaggggcaatgaggaagttttccagcctttttgttgctgtccttaagggaaggggaaagagctcacatcttttttgcacctactgtgagcctggtgctgctagagtgttttgatactgccatttgtccttgagcaagcctctgaatccctatgggcctctgtccactactctgtaaaaatgcacagattagactacggtagcccttagacccccttcgcctgtaatgtgctaggaccttacactagtgctatgccttattctgtccctccctgaaaacaggctctctggtcagcctctctgcttctgagcctaagtgtgcctagccccattccctgtgcccaagccccagccaggctgattccaggtggcagagcaaggcctggggaaatggggcttggggtgtaggggtgggggagctgcaatatctttgctttgagtagcctccaagttcttactcttcatctcttccagggattacagtggcacctgaggctgtggcaactgagcatcttgtttttctttatctttaggagcactctctcacactcaacagatccttattttattttagggttttttattctcttacttggttatgttcagatcactttataaaataagctctaattgaaacccaataaacaaaaccagggtacagtcaacacctgtgaaaaggagaaaaaaacccaaaaagcaaaagctaacaaacaaaatacggtaaagcctctaatgagagattctatgtaacgctaaggaactaagcttaatttcactttttttttttttttttttgagttggagtctcgctgtcacccaggctggagtgcagtggcgcgatctcggctcactgcaagctccgcctaccaggttcacaccattctcctgcctcagcctcccaagtagctgggactacaggcgcccgccaccacgcccggaaaatttttttgtatttttagtagagagggggtttcaccgtattagctaggatggtctcaatctcctgacctcatgatccgcccgcctcagcctcccaaagtgctgggattacaggcgtgagccactgcgcccggccagcttaatttcactttgagcatataaatacaatttcatttataagcacatttggagtatgtcctttgccataaagtatcatctccagcaaggaactggtgaactttattccatttaaggcaaatcctcagaatccattctgcctttccaaacacttgtctcctaaaggctagtatctgggccacacatttctccttttgctacaccttattgaacaacttgcatttccaaaactgttggctgcagcttctgtaagattgacatagaatctctgctagaaaagaccctccccagaataaaacaaaccaaccaaaaaactaccacatacatccatttaggacagagtatatcaaaatgagaaagaacctcctcattttcacacagtggattacttatttagttactgcagtaactttagagaaatagtttagcagtttaggccaggaactgtggttctcacgcctgtaatctcagcaacaaggccgaggagggagggaggatagtttgaggccaggagtttgagaaatagtttagcagtttaaataaagcagtggcttgtcctaagagtctttcagttgattctctctgtgtttcttattctggtcaggtagctctggacaaatgacagtatttcagtattttaatttctcgtttttaaaaatagagttatacagccaaagaaaaaccagtaaaaatcttgattaattgcaaaatcattgttaaaatgtttcacagcataaataacagcttttgtgggcggggggggggggtggtggggtgcaatttatcaacatcttccaaaatgttaaatgcaaatgtcttttgactcagcagttctacttttgaggtatctgaagacccacacatgcctgagagaaatgtacagatgttcagcgcagtactgttaaacagcaaaaaataggaaacaatctaaatgtccatcagtaagggaatgatgaaaaatattatggatcatatacaagtgagatcgaaaaaagaaaaaatatgtattatggagcaccatactgtggaatgtcacgtacatgactgaattatgtgactaaagagaacaatgaatatgagtacataatttacaaggatctctctaatcccttttccacttatttttaaaatggtatttagtatatctgcaaaattatttatttctagtagacaaggcctcactatgttgcccaggctagtgtcaaactcctggcctcaagtgatcctcccacctcggcctcccaaagtgctgggattataagtgtgagccactgtgcctggctttccactgactttctatttctggattccagagtctgcatacccttgcccaccactgctcatgctcacttacaggtttagtcatattattgcagattttattcctacttccttcttttcagtggatgcccaataaattcaactatttaagctaagcacagtggtgtgtccctgtaatcccagctacttgagaaactgaggcgggaggattgtttgagcagatttggagaccaacctgggcaacatagagattctatgtaatctctcatgtcaaaataagtaaaaattcaactaattagaaggtccaaaccaatgcacatgtctaaagtcatctagcatttcttcctggtagagattaccttagactgaacccccctggaagacgagcattacatattctggagtgtggcatattatgtttgtgtcattccatgttgtatggttatctgtcatgatgtatcgtgaaacaagcaattctataacagagcactattttgcctcattactctgggagcaatgtggcatagacccatggaatttcccaagttgtggcaagtgttattagcactgccttggtattaagaggacaagaaaatgaaccaccttccatcttttgctggatagacaatcaaatcactttctggcttttatctagttttaaaatacatttcaagggtcatttgaaaatgacacaaagcacaaatatgaaaagaaattcaaatattatcacactccctaataaaacagcctaattaccaaaggctcacattttagcaagttaattctaagacttaagctgtgtacggtgtgtgcaaatttgcagataccttaccatcacatgcaagtgtcttactgctactgaaagctatcagaccctttcaggaggcgtgttgtaccaagcagacctaaatgtgaactttcatcaaggacctttttaggaggcgtattgtaccaagcagacctaaatgtgaactttcatcaaggactatgtgatgtcaagcaaggcagtacccatgtatttcattcaaaaaccagttgtctctcctgtgtttttttttttttttttgagatggagtcttgctctgtcacccaggctggagtgcagtggcacaatctcggctcactgcaacctccgcctcccgggttcacgccattctcctgcctcagcctcctgagttactgggactacaggcgcccagcaccacgcttggctaattttttgtatttttagtagaggcggggtttcaccacgttagccaggatggtctcaatctcctgacctcgtgatctgcccgccttggcctcccaaagtgctgggattacaggcgtgagccactgcgcccggcctctcctgtagttttcaacatagttaaatcctacaatgtctgagcaatggttacaattccttaggtagtaagggaaatacctgttgaatggcagtttgtgttacatgggcgcttttcttatctttatcatttaatcattacccctcgggtacacaggacacacaaatttcatttttcagatttcactttaagaaaattaataaatacagcaaacattaacaacactgtgatgggacgatcatcagaactgtggtaactaatcagcaatagctctcaacctttgcacagcaaagttaggaaatttgactcgttaatcaatatgccatatgcctatctttaaaatacaaaaaaactaagatttatacatcttagttcattagttttaaaaagcatcttcattttaaaagttggcccaattaattatagatttagtcttttcttgatgtcaacaaagtctttaaaccccacagcactgtaactatcttggcattaaaatagtttctatacactttctaaaaaaaatcatcttcagttacaaggctttacacttaattatctaaattgcctcccacttccatttacttgagttttagacatccaacttctaggggatactgttagaacaccaaaccatactaatcttcagattgaagaggggttttgtccattttcttaagatctgtggtcaagaataaaccctaaaaaaactgttcccattctcaacatcttaaaaaaatggtagttgtcatgacgtacctactaaagttacaaattctccttgagccagaattcattttaaatggatcagaattattaatgttggtgattaatggtgatttctatacagtagaaacttccatctaaatcagattgagtcatttgctcctcttaacaaaaaatctgatgttcgacacaattgcagcctatcactaaccctgctgttcgcttgcatgtatcttgtttttaaaaatcttgtttaaatcattctgaaagtaaaactagtttttcctcctttatatatagcaccgaatacttgcaatgtttgacaaaaccttttatcagcccattaacctatttataagcataaagtgagtatttttaaagggaaaaactttgccatcccttatacttatttaaaaggtactgctaagaggtattattagaaacaagatttaaaaatatgtaacaaaatcttaagttcttaagtgaaagccatttaactagtatttaaaacctctgcaattattagtttattagtatcatccaggactcagatgttcagtattcctcctgaaattacataaacaaatgcaaatggaaagaatccaagtctaaattatataacaaaacagcactccatcacaaaagcgtgtaaaattacaagaacgctattttaaaatactggcactttaagaaaacgataatctcgaaaaccacaaaattgccaaattgttccctaaactcctaagcagataaacatgactaatgaatgagtttgttttgtaaagaaaaatcattcaaataaattgaataattcatactgagatgcaaagtttgtcttctttcttcctatctacttggatttataaaggggcaaaccgtaatataggaaaatataccctattttgaatgtggcatctttgtttgaaaagctggcccaattaattaaaaatacttgtaatggaaagtctcgtttcctgagcagtccatatttagataaatgggaaaagacatctatagccagcattttcatagtcttcactgagactaatgtcaacaaaaaatttaatatggcagtcttgtattttaagctcacgcttttggggatacattctcaggtcttctttaatgtgggaactgcaaaatataactgccattacatggtaatgggagttaaagaatagagtcctcatgtaaaggttagaacatacttttctattagtccttcaaggacagactttcaaaatgtttgattctagtaatcccatgctttgagtagattgattactcttcagtttgtaaatgtaagtgggctatgtgaaatttcttaactgatcaagattttggatgttcagttatggatgaaaactatctcaacttaactttacccccattatgatatgcagggtgggtagacaaaagctttttattagctaactatatgaaaggataaacactgtaataattcatgtgattcaaaatgggcaaaagcaaaagactagcttcccctcaagaagaaaaatttcagacctatgaaaaggacaacaatactaataaaaaaattgtatttacttagaagcattcagaatgtcaacaaaacagctgcaacttttttttttttttttgcaattacagagtggtattcagttaacagaacaacaattatttcgtataagctgcatcagagacaactgaagatgaaaaaactaccatccccatatataactaatttgtgctgtgcaccaacaagaacctgctttaaatttccatgccaatttacaacccccatactgtaccaggcaaggttagtggctattgaaaataccaccaggacagggctatctaaagacacattcggtagtgtgttaactatacaaaaaaagacactgtacagtttaaaaacaaatcttacacagccttacatttcaatttttttctttaaaaggagtgagttgtgtacaggggggttaaatgctttatagacaagaaaaaaaaaactgcgctagaaccaacttattcatcatcatcatcttcttcttcatcttcatcttcttcatcttcctcctcctcctcatcctcttcatcttcctcatcttcctcctcttccttctttttcttgcttttttcagccttgacaactcccttttttgctgcatcaggctttcctttagctcgatatgcagcaatatccttccaaagcaaagggaggataaaacagtagggaagaaaaaaacattaaggaaagaaatagaacatggcagaactttatgaaagaaatcaagattctagttataccaaaatatcacgtatctgtagatccacagcaactccagaaataactagaacttcaataaatgaacataaaaatacaagatcattataacaatctataactcatgaaatggcatagtctaatatttgcaaagttatgcctcattgaggtgcaattatgtaccacatcctaactctattaaaaccagaatgtagagactttgattaaagggtagacactgccaccttctgaatgcaaaaaagcactctacaggtttacactgtcagaccttaatccttagtaggaaatgtggtcttaaaaaaaaaaggtaatttgtcaataaacatgcaattaggttaagaaacatctagaaataaacacttttcagaatgactaaagctgaaaattaagtatttaatatttcaatttactgaactataagagttatagatttccttaatcttattaatttactggacagagcagcagacttgtaatttaacttagtgatgctgtggttttttgagtatctaaaggaaaagaacataaatgtttcaggatatgactaagaaaaatatagcctatattactttgtctagcctgtttttgtactgtatgccaagccatttgaaaatgctcatttttgacttgaagtgactaccaacattttcatgaacttcaagatactggggaataacaaaaccaacataaatgtacacagcctttgtctgagtctgattacattttagtcaaaaaaaccctaatttatttggtcctctgcattctttgaargatgargacttatatcaacaccatacttaatgtagctgttaccctaaaaacttattacacctcaaactaagtacaatcatacatctggcgtacttgtsatcattttaccaagcaaacccacacttcttaccttttcrtatttttccttcagcttcgcagccttcttttcataargctgcttgtcatctgcagcagtgttattccacatctctcccagtttcttcgcaacatcaccaatggacaggccaggatgttctcctttgatttttgggcgatactcagagcagaagagraagaaggccgaactaaaaaaaaaattaattttargattttaagttaacagatcacaaaaacaaatactatcaagtgtacactgcattgctatttaaagctgcctgtgaatttctgtgatgcattggacagggtgcaaatactataatatactaaatatccttcacaaccaaagcttaatttacaactatttaatttatactagctagaaccctagatgaacattctacaattacactatttcaaagggatagtatttttcaagaaataaaaagatcaaaaggagatacactgggcaaaggagaccaaatgtctaattcaaatgctctgggaacactcccacccaacaggaattttatactatttaaatataaccartatgaacaagtattagctaagaaactttgattgtacatttacactctaaactgacaaagtagcttgctaaatttctctcagattctactgtaaaacgtgtctgggaagtaaaaacaggcaagatactcacggargcctcttgggtgcattgggatccttgaacttcttttttgtctcccctttgggagggatataggttttcatttctctttcataacgggccttgtccgcytttgccatatcttcaaattttcctttctctttagcagacatggtctacaaaataattatttgtaagtttaagttgtaacatttaagtaaattatcctcaaaaccaatgtcttttgctatgtaatagcgtcccactacgagaatgccaactaggcttttttttgcatcctcaattggaaactgtcttttaattaccttgttagcatgttttaagccctcttaccttccacctctctgagcacttcttagaaaactctgagaagttgactgaagcatctgggtgcttcttcttatgctcctcccgacaagtttgcacaaaaaatgcatatgatgacattttgcctctcggcttcttaggatctcctttgcccatgtttagttatttttctaaaaaataaaataartatttgatgttrgcaataaaattatgacatataagaccttaaagtacttagtaasggaatgaaaaccaaagtactggttatttaacacagtagcgacatcaacctccgtaaaatcagacaagaatatggccgagagattaaattccttgaaggggctatgccaagcaaacaaaacaaaacaaaaacagtccttcagggcgatctcaaraagtctagacacaaagatatacccatacagtattccctatctatccgcccgagtctgctctgaatgagtatctaactggtcacttaaacgattttaaaatctagaacaccattttaaaccaaccaaaccaaaggtcagaaaacatgctgccaattcgtggctttgcactagatagggaataaacaagggcctaagcgagtcgactcttcctaattatgggaccttaaaaaaaaaaatcaccgtgcaccgaaagtttcaaaaaacaccctctttgcataaaactttgctccaaagagggagcagcagccagctccggtgctcggaacccggttggggggtggcggtgccaccgcgaggcagcctcgtttcctatcggtttggccctgagatgtatttctgttctgactaaacacgtccggtctgaagtttctccgagtaaacaaggatgagggacaaaagccactcctgctcgtggctcggtggccccctcccccaactcgggaagtattttttggagccgtgaaagttggggtgactcctgcgcggggcgagccccccgcccctagaacttcgccggtggccgcgcggccgagragagaggacgcggcccggctcccaggcccgaggccgccacgtgcgcccggcaggccctgcaggcccgcgccgccgccgcccccattttgtcaggctcggcgcagggagaagccccgctcgaaatgggggctggctccgcccgcggccgccggggccggcgcgcacggaatggccgctgcgcgtcttctccgcctgcgccgccgccgccgcgagggcgagcgcgagcgagaatatggctccttccctttgtgtgtgtgtgtgtgtgtgtgtgtgtatgagagagtgtgtgagtgcgagggtgcgggcgcggcggcggcggcgggcggggtgcgagccgcgctctggcgcacacactcggccattacggccgggggaggggcggggggcgcgcggccgggccctcccctccgcgccgctcccctccccccgccgcggtgggggccgcccgagggcccacccgcccgccactccccgtctccctccgcgcgggccgcgcgccccgccgcccccgcacggagaacgcggggctgtgaaaagagagaggaaaaaaaaagttgcctcggaactgctgcgcccagctcccccgcccgcccgccttgttttctctccagccagcagcgccgggcccgagtcagccatgttccagcgagcgcagcggcgccgctccccccgccgcccggccgccgccgccgccgcgaccgggccgaggccggccgggcccgcactgccgcccccaggcccccgcgccgccctcgcccgccgcggcgccccgcccgccccgccgcccgcccggctggccgcgctccccgccagcgcccggctcgctgcggcggcggccaatgcagcccggggaagcgccgccgctgccctcccgccgccgccgccgagccgcgccggccccgccgccccggccgcgctccgcgcacgccgcccgcccgaacgcccggcccgagggcccaaaacacgttcaaaatttttttaattaaaaaaaaaatttttttttttgcgccagtcagcgcggacgccgccgggggtggaaactcgcggggcgcggggctcccggcgcctcaggctgcctgagggccggggcaccggcgcggggcagcgttcccggcgcccgggcagaggctcgctccgtgcgcagttccccccacggtcccccctcatttgcctttgtgtggatcctgacccgccggctcccggccgcggggatccggccgccgcgcgggctggggagctgccggaggcgctctccccgccgcggcgctgccccagactcaccctcagcgaggcacagagtcgcccagtgcccgtccggctctcacttgccccggygctgtctctatggagctcaatgtactgcaatggctgtgagagcgggagccagacgcagcctcctcactctctccgctctgtaacattactctccagccagcgcggctcctattggctaccgccaactcacggggctcgctcattggcccgatacctcccattgtcctgmccagagcccgtttgctattggctgtctccggggacacgtcatcaaggattgaaacagcgcgcaaatctgaatgtgtgtgtatgccgggcaaagaggctgaggcgggagaggcagaggcagaggcagcagctgctacgggaaagcagagctctatggtgtatgtgtgcatgtgtctaacccaagccagccccacaccggagcggccgccggagcgaaaagggcctgacttttccacaagtgtctccaactcctcaggcaaaagagacacccacaggtctccccccccccttcttgccccacattcacgcccaaagccgttgagataagrggccccaggcttttaatggcccttcaaaagtgagggcgacactatgggatcatgtcccctgaaaactggggtctctgctggtgctgaggggcggaagccgccgagcctcgagcccctcaaaggtctctgattgcgttacactttaggtctctggaaaggcagggcttctataagaaagtgacatgatccagccagccgggtttaaaataccccttttctgggctcataagccgtcacgtcaggctcgctgagcagctgaaatcttgagtcagtgagcaggcattcagtttcaccctttttcttggtttgatcgagtttcacagcatgtctagaactttttatttaaatacaaagcactgtcttaacttcctggaaatcaaataattattccatgtaattaaagaacagccacttggtttgatatggggtactctagcaggaaatgtttgtgaggccctggyagaattagcaaattcattagagaccacattctaaactgtttggctattttatttgacttggtgtggattactgttacaatcaaacgaatccttgtgatgctatctttccctcccatcacaccacttagtgcatccatgtaactgctctaggattacaggagttgtaggtatatggttacccgaaggattagatgcaggcagagagtgcatgtgcccaaatccacaggctgtggtttctctaactcaccaagctggctggtattaatagacatacttacgtctgtagagaaaatgtgctggctgtagtggccagttctgaagactctacagttatakcagtcctttatgaaactactatctattccttttagcctgagcagaccacgcccctattcagttataacagacttcccttttttttcactctctaatggtattttgtacacttctaaatccaacaaccaattcctccaaatgtaacagatcaaatttggaataaatcacctacatcgtgttaatttgattttttatatcgcttataagcatccataacctaatttatttcctcaaatgtattaaactacttgagagtaagcttagataatctttcctgttttaatgttgatttctttttaaaagaaaatacactatyggactcagggattatagtcttggtgaatggacaatatatcacacatgcacatgaaaaagactataatattaaagaggatataaattggtatactgcacatgcagtgtttaaagataatatatctaaagttaacttttatgttattattttcacacatatttactatcctctgcttccctctactaatcattcaaattttatattttttaaatctagatatttatttcaatactgtcttatcttctcaatgtctcatattacaaaatattcatgagaatgattaagatactttcagtggcatcgatgatattaaaatttgaygattagttgaatatggcactatcaatattttccaggagcagtgttggctttgtactggcacggccatacactttactggttgtctataccagcttgctcctgccagggtgcatttatggccacaggacatcttgagagcaatgggcccacacaaggtttctattttgacaggatgatatggtgagtaataggcactggaattgaatagacttgggtgcaaatcccagctctgctacttactagctgtatgatcttgggcatgtttttaaacctccatgcttcaattctctcagctataaaatggaggggaccacagggttgtaaagattaaactttttttaatgtttaaaattatatagaccccttcaatcccataatttagaaaacctcaagtgcagttaaccttgagtttttcttcatattttaatcttatatgaaggcagtgattgcaaatctagtgaattttttgttgttgttgttattgttgttgtttgagacagagttttgctcttactgcccaggctggagtgcagcgktgcaatctcggctcactgcaacctacacctcctggttcaatcgattcttctrcctcagcctcccgagtagctgggaatacaggcatgcgccaccatgcccggctaattttttatttttagtagagacggggtttcaccatgttggtcaggctggtcttgaactcttgacctcaggtgatccgcccaccttggcctcccaaagtgctgggattacaggcatgagccactgcacccggccttgttttgttttttttaaatcctaacctcaaacaatgctaatcttcccctagtctggtgatagtacctttatttattcccaagtttaacagagactatatcagagagaagagtttaaaaaccaccacttgcaggcaattcatttcttatatttgattttctgtgatataggcagggaagaacataaaaaagacagaaattttaaaataaaaccaacatcttctagctctaaccccacaatcttgatgttcctttatgatattagacgcttttcttcttccacatgaatccttagtcacaagttgacatattttactttacagttattgggtttttgttgttgttgtttttgtttttatgagacagggtcttgctctgttgcccaggctggagtggaatggcacgatctcagctcactgcaacctccacctcccgggytcaagcaattctcgtgcctcagcctcccgagtagctgggactacaggcatgcaccaccatgcctgggtaattttgaatttttgatagagacggtttcaccatgttggtcaggctggtcttgaactcctgacctcaagtgatctgcccgcctcagcctcccaaagtgctaagattacaggcatgagccctggtacccggccaagttattgggtgttttatcccaaattacaaagtcatccagtcgaagaggcctgaacaccctctcccatgctcaatttaaacaactgaattacagatcgtcattaatgtactttatgcccttcctccatcccctttaggataggggaagtacctcttttctgtaatcctgtaatattgtgtatattaattactgcaatcacaattgtggttctccagttgtatctgcttgtcccactgcactgtacaccttaaaggcaagaactctgtattttttggcacaatcttggatcactgcaacctctgcgtccttggtttaagtgattcccctgcctcagcctcccgaacagctgtgactacaggcgcgtgccaccacgcccagcttatttttgtatttttagtggagacggggtttcaccatgttggccaggatggtctccatctcttgaccttgtgatccgcccgccttggcctcccaaagtgctgggattacaggcatgagccactgtgcccagccccagctaatttatttttatttttattttttgtagagacaaggtctctccatgttgcccaggctggtctcaaactcatgggctcaagtgatcctcctaccttggcctcccaaagtgctgggatgacaggcatgaaccaccgtgcctggtgctggctatttttttttttgtagaggcagggtctctccatgttgctcaggctggtctcaaactccttggcctcccaaaatgttgggattacaggcatgagaaactgagcccagcccctatctttgaatcccaagcacctagcagagtacttggcatacagcaggcattaaataaagcccgttgcataaatgaattaatagctgaaggagtacgtattgcaaattattgttttaaccttcctcttctatctttagatctaaaagcatttaggtctttctaaatcaaaaggcaggaaaatagaataagaagcgaatgttaggatactaagattgaggataggtgccaattacatctcattgacgtaacttaaaaagggagaggcacagttggagggtgagaggggatctcaaatgtagagaaacacatatagtctaagcatttaccagtttccaattaggccaagattattccttggtggatacagtgaactatggcaagccaaattagactttatcacagaaaactgcaagattgtctgcccaaagattgttaccaattggctttttattgttttattttattttttttttgagatggagtctcactcagtcgtccaggttggagggcggtggcgcgatcttggctcactgcaacctctgcctcctgggttcaagtgattctcctgcctcagcctcccaagtagctaggatcacaggcgtgtgccaccatgcccaactaatttttgtatttttagtagagacggggtttcaccatgttggccaggctggtcttgaacccctgaccttaggtgatccacccgcctcagccttccaaagtgctgggattacaggtgtgagccaccatgcccagacttatttatttatttatttatttatatttaattaattaattaattttttgagacagaggcttgctctattgcccaggttggagtgcagtggtgtggtctcagctcactgcgacctccacctcccaggttcaagcagttcttctgcctcagactcctgagtagctgggactacaggcacgcgccatggctaatttttgtatttttagtagagacagggtttcattatattggacaggccggtsttgaactcctgacctcgtgatccacctgccttggcctcccaaagtgctggaattacaggtgtgagccagcgcgcctggcctattttattttatctttaatttaatgtttgtctcccatgttcaaccaaaccaatggttggtttttttgtttttttgttttttgttttttgtttttgagacggggtttcactcttgttgcctatgctggagtgcagtggcgcgatctcggctcactgcaacctctgtctcccaggttcaagtgattctcctgcctcagcctcccaagtagcagagattataggcatgggccaccacacctggctaattttttttttttgtatttttagtagagacgggatttcaccatgttagccaggctggtctcgaactcctaacatcaggtgatccacccgcctccgcctcccaaagtgctgggattacaggcatgagccaccgtgcccggcctttttttttttttttttttttttttttttttgagatggagtttcactcttgttgcccaggctggagtgcagtggcaccatctcggctcactgcaacgtccacctcccgggttcaagcgattctcctgcctcagcctccagagtagctgggattacaggcacgcaccaccacgcctggctaattttttgtaattttagtagagatggggtttcaccatggccaggctggtcttgaactcctgacctcaggtgatccgcccgcctaaggcctcccagagtgctgggattacaggcgtgagccaccgcggctggccaccaatgggcttttaaaacttaaaaggtgaccaggtgtggtggcttatgcctgtaatcccactactttgggaggcagaagtgggtggatcacttgaggccaggagttcaagaccagcctggccaacacggcaaaaccctgtctctactaaaaagaccaaaatgagtccgggtgtgatggcgcatgcctgtagtcccagctacctgggaggctgaagcacgagaatcacttgaacccagggggcggaagttgcagtgaatggagactacaccagagtgccacagagtgagactctgtctcaaaacaaagatacaaataaaaaactctgacgtaaaaaaaatacgacatgcaaggccaggcacagtggctcacactggtaatcccagcactttgggaggccgaggcaggcggataacttaaggtcaggggtttgagaccagcctggccaacatgttgaaaccgcatctctactaaaaatacaaaacttagccaggcatggtggcgcacacctgtactcccagctactccggaggctgaggcatgagaatcgcttgaacctgggagacagaggttgcagtgagctgagatggtgccactgcactccagcctgggctacagagaaagactccatttcaaaacaaaacaaaacaatacagaaaacaacaacaacaacaaaaatgcagactgggagctgtaagtttttcattggttgaaaatattgatctctcccaatgcaatgagtcctaaagtcaagctatatgaattctcttgtctgctttgcaaaacaggccagtttcggaaaaggagaggaaacgctaacccaaaatgtctgatgaggtcaaccatataaccatacaaccatactaaggatcacacatactgaaaactttttttttttttttagggcagtgaaaataaaggaatgaggcatttaggaaaagaagagagcacaggtttgtgaactccagactagaagcaaggatactgacatccaatcccctcaattcactatgcacggacctctcatagtcaccgaggtctatgctcagtttcctcaacatttccttagggctgtcactaccttagtctaacttgaaaggatgtttcatgactaaatggagaggcaagaagaaagaccagaggcraaagagagggagatggtgctatatgtgttcatgtatggagaaggagaacctcttccccagctgcttaagtacctcctgcctcagcccgagttttccggggggaaatcagcagcttctccgtgggcagcattgatgatagccatcaatgctatggcacagaaaattgtaccaaagctaatttatatcaataagttctctagaattggatgattttactggttagtaaggggaaaatatcagacctttccttaagaggcctgtcctctggttagtcaaagaatggtacacatgacgagtggaaaacgcaatagtaaaagttcttacagaaaggtgatctaagttcagaaaagatccctatattaggtcttgatctcaataatcacatcaaacatcaaattcagctgctctattaaaactgccttacaccttcagaataaatgcttatcacacacccacgcagatggctataatcaaggagatagacagtagcaagcatgggtgagcatgtggagaaagaaactggaacccttatgcacacttgtggaaatgtaaacgggcaggtgttttggaaaacaagctgacagttcctcaaaaggttaaacacagatagatagcagttgacccagcaattccactcctaggtatatacccaaaagaaacaaaaacatgtccacacacacttgtacatgaatcttcatagcagcagcatttgtaacagtcaaaaagtggaaaacacccaaatgcccatcaactgatgagtgrataaatcgaatgtggtatatccatacacatacatatatatttgacattatgctaagtgaaagagcccagacataagaaggccacatattgtatgattccatttatataaaatatccagaacaggaaatattatagacagggaagtagattagtggctkccagggtttggggaaaaagagagtgcctgctaatgggtatggagtttcttttaggggtacaaaaatgttgcagattagattatagtaatggcagcatgacytggtaaatatgcccaaaaccattgaattgtacactgtaagtgggtaaattacatggtgtatgaatcatattttgataaagctattttttaaaaagcaataaatgtcttacgagtggttttggttaactaaagacaggaacaatggaacactccctcgccaactttgcctatttctttcctgctgttcatggtgtttaacaccttgtgaaaaagatggtcctcttcattaggtagaattttcatctattattggagttacatattctgtgcttaaagtatatttttgctgcaaaatattatagtaattttaaacaagcgcttttatagggataccgtgggaggcttttctggagagccgggggtgaccgtaatragtatgcccagccatgaagggttaggactgacagcgtaaactggcccctctctggccttatctgacccacagacgtttcattcggtcaaagcggtgttttaaaaaggtagacattgggcaggtatggtggctcacacttgtaatyttagcactttgggaggccgaggcagaagaggagttcaaggatgcagtaagcagtgaytgaaccactgcactccagcctgggcgacagagcgagatggtctctctctcctttttttttttttttttttttgagatggtttcgctctatcgcctaagctggagtgcaatggtgcaaccttggcactctctctctctctttttttgkttttktttttttgagacagggtcttgctctttcgcctaggctggagtgcaatggtgcaaccttggctcactctctttctcttttttttttcttttctttttttgttttttttttttttttttttttgagacagggtctcccttaggctggagtgcagtgatgcgacctcagctctctctctctctctctctttttttttttttttgagacagtctcgctctgtcgcctaggctggagtgcagtggtgcaaccttggctcactgtctctctctctctctctctctttttttttttttttttttttgagacagggtctcgcctaggctggagtgcagtgatgcgacttcagctcactgtctctctctctctytttttttttttttttgagatagggtctcacctaggctggagtgcagtggcgtgacctcggctcactgcagtctcctcccacctctcccctcccttcaccccaccccaagtagctgggactacaggtgcacaccatcatgcctggttaattatgtttttgtattttttgtagagatgggggtctctccatgttgcctgggctggtcttgaactcctgggctcaagtgatctgcctgtctcagcctcccaaagtgctgggattacaagtgtgagccaatgtgcccggtttgagaccatctctaaaaaaaaaaaaaaaaaattccctgggtgtggtggtggcgctcacctgtagttccacctactcactcagaaggctgagataggaggattgtttgagcccgggagtttgaggctgcagtgagctatgatcctgccatcacactccatccagcctgggcaacagagagagaccctgtctctaaacaaacaaacaaaacccagaaaacagtagaaatcttcacaataaaaaatccagatatttggcttcttttgaaaagtgagagatctgataaggttgggttcacatttccacatggggaggatggttggaatgaagagtaactgcctccctcaaagaggtcagggttctcaagtttaccacagtccccgccattccctaagtggttagcctgacttttcacccaatcayatcacctccctggcccctgcagacatttgagttggggcctaagcatttcatatgattgtaaactgtaattctgaaattttcttgatcagagattctttttataggaaacacttattgtcatcatacaaaccatagagtgggaaactgagaaacagaactgttgtgatatcgcaggtggcatgyactttttttttttttttttttttgagacacaggtagcatgtactctctctcagtttttttattttgagacagagtcttactcttttgcccaggctggagtgcagcctcattgcgacctcagcctctcaggctcaagctcagcctcccgagtagtgggattacaggcgcaagccaccacactcagctaattttttgtattttcagtagagatggggtttcaccatgttggccagactggtctcgaactcctgacctcaagtgttctgcccacctcagcctcccaaagtgctgggattacaggcctgagccatcgcgcccagccagcatgtactcttgagatgaggaagagagtggctgtgctgccaagagaggatgtcttatggcccagacaaaagactagacaacaagctttatttagcatgtgtctcccatgtgctaagcactatacatagagtattttgtttatggctggtgtgatggctcacgcttgtaatcccagcattttgggaggcagaggtgggtggatcacttgagcccaggagttcaagaccagcctggccaacatggcaaaaccccagctctactaaaagtacaaaagtattagctgagtgtggtggcgtgtgcctgtgatcccagatactagggaggttgaggcacgagaatcacttgaacccaggaggcgaaggttagagagagccaagatcataccactgtgctccagcctgggcaaaagagcgagattctgtctcaaaaaaaaaaaaaaaagattttgtttaatcctaacagtaatcctataaggccaggatgcttatctgtcttttacaggcaatactaagggaggctcagagagattcgttgaattgtccaaggtcacacagctagttagcaacaatattgacccagttctgagtccaaagccttgtgttttctccactaaagccatatgatcttgcggttattagcctagctaataaaataaaaacggtatcacatttccccacctaaatatgcatcacagccccataggaatactgacatacgtttgaaatgcacagttcacattcttggctttcaaggtctttgaataggacccttacagtttgcatatataaaatctgaaaaaagtttaatgaaacaatacctaccattgttgcgatggactccgatttttttttccttcacattttaaatttacttcccaatccatccataggccctgcggtttgtgaaacatggaattagagcaacagtaaagaagttccatttcccatccagggtaacatcaggcctaactgacaagtgcaggtgctgaggctgattgaataggacagaaaggagcagccaggggagatgccgagcacccagagcctgcagccaagctccccagcagaccaaatgaagcttgtgccaacacagtgggcctgtcccaagcccagagaaaggctctgaagacagaaaaggggactgccttgctctgccagggaggcccaagacaaaaaacagcattccaggccagagaatgccaggaaatgcaaagatgcttgcaaatttctgaagcctgggagagaaatcctagcagacctgacaaatatcttcctcacctgagtgaggctccccaccttggatttgcctctaactaaaatcacaggctggaaatgcagaagtccctctgccagtgaggagctggaccggttgggacagacagccttaccatccaagttaccaggcctctttgtttaaaaaacactgagtgcccaaagcggtttgtaagggtaaacagagggtgactgctaacccatacctgaaggtgttaaagaaaaaaaaaatcaacaacaaaaaacgtgtatgctttttctgaaaggttgctgttgatccttgttgtaaggtttccttttgacttacaagaatggaaatgaggaagtaggaaagagatagcatggttcactacagtctaacrtaagtactaccagcaaattgatagtcatgttcagaaatgaactctgcattgaacacactcatggcatttgaccagtgattttgcttctaggaaatattcagaaataagtaaaaagtggccaggcatggtggctcactcctgtattcccagtactttgggaggccaaggcaggaggatcacttgggcccgggagttcaaggctgcagtgagctgtcattgtacctgtgaatagacacactccagcctggggacagagtgagaccctgtctctaaaaagaattatttttaattaaaaaaattatgaattgcagcattatttataatgtggaaacaacctagatgtccaatgagaggtttggctaaatgcattttaatctgcctttatgatgcattattatcattataacactatcaaattcttatgaatactaaactgaatgccttgcaaaaatatacacaatatcttgtgagaaaaactattttcagaaggatccctgtttgaaaaagagtatgtatgaatccagaaaagactgaaagaatatactaataaatgttaatcatatttatttctgatggaagataatctttgctttctttttcttttcttttttgagamaggttcttgctctgttgcccaggctggagtgcattggcacaatcatagctcactgcagcctcaaactcttgggctcaagtgatcttcccacctcagcctcccaaagtgctgggattataggcatgagccacacggtgcccagcccccaaatcccaatttcttttttcttttcttttcttttcttttttttttttttttgagacagagtctccctctgtcacctaggctggagtgcagtggcgcgatctcagctcactgcaacctctgcctcccgggttcaagcgattctcgtgcctcagcctcccaaatagctgggccaaatcccaatttctaagagaagaaatgtgctactagaggactcaaagattcagataattttacaaattcagcattactctagaaactgttccctatggggaaatattccctgtaaagataaatatgcacatttatcatagctctaaacttttacctcttgtcactattgatgtgtcttctctaatagctgttcattctttccctgtaatttggaccttagtccgaatctttgcttctcttctgctctctttaagacctcagtgaccaactcttcttagaggcgttttaaacactgtcattatgtaaatgacccttgatttccattccagccccaggctgtatcctggacttcagactcctattcccaccactcaccagttttgcaagctctccagtttgccctctaaaccttacctctttccgatttcactacctgcagaattcccacactggctcaaattctagcagttgtttttgactcccctttctcctctcccctcacaccaacttcagtaacatttaagtcacaagagtttttgaattctttttttcacttcttttgttctggcatttattattttgtggttaagaatggaggctttggaaccggacacctctaagtttaaaatcctggtcctggtgcttactagctgtgtcaccttgggcaaagtgaatgaacctctctgagcctcagctgcttccataaaatgatgatatcacctttgcaagagtgttgtgagtttcaatgagctcatatacctaaagagctcagcctacagtgtaaatcgcttagaacactgtaaatgatcaacagatgttggatgttattataattttcctaatgcatacagctccactgctttaaaaactttttatttaattacaatgttttcttccaaattaactacaaaatcctcttctggccctcagggccctccctaatctggcagtttctctcttgctttccctcctgctgccctcctgatttctaatcaaactggaccttgtactttcccaccttcragattctggtcacactgtttctctggcctgtaatgtccttcccsctcctctgctgctaaaacccaatctctccttttaaatatttactgtgtgacaataaagatgctttcggaagttaaagcatgtgattttctacatataaccagaaatcatagaagttcatmaactccttcaaaatgtattgccttgtgtggaatatttactttgacaccaaaatatgtattcgttaaattcaatgaattcagtctacgtttcatttatttatatatttgttcatttattttaattttagagatgtgtagaatattcactttgacaacaaaatgtgtattcactaaattcaatgaattcagtctaggttttccttamatatatatttgtttgtttattttaattttagagatggggtctcactatgttgcccaggctcaagggatcctcctgcctcaggctcctgaatagctggaactacaggagaccactgcactcagctgtaggttttacatttggatgaaacctatttagatttgcatgaaattagcccagtttcacaggagcagtgtgggtgatgtagatgccctgggtgaagctggtagaactcagagaaggagagccaggcctcagtgaggacctgctcccttctatgtcggtcgctctcacgcagtgctatggttcctctggcacctagtacagccactttccctccttccctcgctcctttttctgtctcctcccctccccgcccttctctctcatgcttggcaaacacagtgcctaaagtacctagttcctgggatttatacgtgccaaatggctttggggaacaagtttttctcaagtccaagcatcaaaaggcacttatttcaacacttcagggaaaagtagtaactaaggaaatcaataatctcatcccaagcagaagaatggatttttgtgagactctccctatggtttcctgctctgccttttaaagaggtgtaatattagtctcttgaatctttttcctcttgtgtgtgtttttttttctttaaccttaccttaagaaataaatgtaaacttgcaggtagaaactatgtcctgacctaagtattatatgataacaagttgttttcaagtactgtatgtttgttaaagacaattagaagactcaaaaaaacactttcatgtatctatacattcttcagtggctagaactgaactttcgatctttttcagagggattttttgatggagaaaaaaaaaacacacagatgagattagaagaagatctgctacagcaacagaaaaagagaatgccaagaaggggaagagtgaaggctggagagcggaagccaatgccaaaacattccgaagctacccaacatctaagaaaggtggcctgagggagattgcaagcactaaccgctaaacgctaaatgaagggttagatcttatctatgtccagaaggagtaataagaaagaatgcgtatctccaaaagctgaaagatttggacaggacccaaggcggaggcctggcatttttctaaattgagatgccaatcccatcataccttaggactataagattcaaggatgaagactggctcccccggtggggcaaaatcagtggatgggacacaacacatctgccatcatgatgaaaacagtaaacctctactgaggctccactcttgaagcgtgcctctgtcagaccctagttatccaaggctggtgctcaagggaaaaaggacgcagtcttggaaggccaggaagcttctgtcttactcattagcctgatatgccagctccatgtaggtattcttaagtctttcttttttttttcttttgaaatggagtcttgctctgtcaccagtgcagtggtgcctcttggctcaccacaacctccgcctcccaggttcaagcgattctcctgcctcagcctcctgagtatctgggactacaggtgtgtgccaccacgcccagctaatttttgtatttttagtagaaacggggtttcaccatattggccaggctggtctcgaactcctgatctcaagtgatctgcctgcctcgaggtattcttagtcttaaatgtgctactgtagacacatattattgtcacataggttaatatytctcttggagaaagaactgaggcaggacacctgaaggtactctttcaggcaacattttcacttaggaaagttctaaattgagtttgtatcattccgtgtccctcctcctctccctttctcttttctcttcccttctctcattgtccgaaagattaaataaaacaaaaacctacacacaaaagcaacagggagatcaagatggtaaagaccaagctcatgttttattagttagcagacagtggggctcaggctgcaagcgtctatggtggggccaggagggggcagaaactaatatttactgggcattcaccatctgctaggatcataaatactttacctcattataattatcacatcaagcctttggggtgggtgttattttccttattttacaggtgaggaaattaaggttgcctaagcttacccagctagtgttccaaacccatctttctggctctgaagccaagtctgactcgacaccttccatgtctgtctctttcccgttctggcctttgtcattaaaaccaacagtatcagaaagatgcactccaaaggtagcaaatgacattggtagcgacttcaagggtctttgcgggaaataaaaaaaataaaataaaaagtgaggtctttaccaattttttttkttgttgttgtttaaatagagacagagtcttattctgttgcccaggctggagtacagtggtgtgatcatagctcactgtagccttgacctcccgggctcaagccatcctcatgcctcagcctcctgggtatctaggactacaagtgcacaccaccaacaccagctattttttttttttttccgtagagacagggtatagctatatcctgttgcccaggctggtcccgaacttctggccttaagcaatcctcctgcctcggcctcctaaagtgctggaattatagtgtgagccaccatggctggtcctttaccaattattgaggagcaattgtcctaatgttaagatgacaggtcagagaatatagccaaggggtagcagcccagcactcctcacccacaggtgagtgagcaaagcaaacacaagaccccactccattctgcatccaccagggcttggaagcctggcacggccataaagaatcacctttgtgctcatcattaaaacttcctctgggggtcctctcactcagttgcccggcccagaaacctgagtatcatcattaactcctccctttccctcactccccgcaaccagcaaaccctccagtcctagggatcctacctctttaatgtgtgtctctgatccctgtcacttcccttcatttccgaggccaccttctcctgctcactctactccaaccctgggccttagtgttaggaaactccgagtgacgtttctaaggtaaattatgacattatgatcgtgatgttcctctgcttaaataattcctgcatgactccctgttgcccacaagagaacgtgcaaatttcttttttttttttttttgagtcagggtctccctttgtcaccaggctggagtgcagtgacatcatctgggctcactgcagcctctgcctcctggactcaagcgatcctccctcctcagcctcctgagtagttggggccacagacacgcaccaccacacccaactaatttttaaattttttgtagagatggtgtctcaccatgttgcccaggctggtctcaaactcttgggctgaagcaatcctcctgcctcagcctctcaaagtgctgggattataggtttgagctactgcacccagccgaatgttcagctcttagcagagcatcctaggccactcatggtcaggccctgcttctctgtcctgcccatgctgaagctcccatcctgagccactgggaggtcctgggatggtcatgctctctcaggccttgatgtctttccagcaggataaccttacacctgtccaactcatgcttgtctttcagctctgagaagctgcccctgaccatcccattcagagcttggctgtgggggaagcagtcccttggtaccccccatcccagcctgagctgcccctccttggcaatgtctccagggccagggtctgtactacccaggcgtctgtgaccttcacctctgtaagcccctgcagggcagggtgtgctttcttccccattttccccagcatctaacctccaggagccactcaattcataattaaatgtctaaaatgataaagtgggggaaagtaatgaaggaataagagtctattaccagctttgctaccaactactctatacctgctactaaaactgagtgaagcaggatgctattttgccattcctgaagtaggatcttcaccacgttcctcaccctccatcccccaacaaccgctactctgtctcagggactgggatgggtataagagcttattacattgttttgttttttgttttcaccattaagaaaaaatgggccaggcgcagtggttcacgcctgtaatcccagcactttgggaggccaaggcaggaggactgcttgagcccaggagttcaaaactagcctaggaaacattgtgagaccctgtctcaaaaaaagaaagagagaaagagagagagagaaaagaaggaggaggagtaggaggaagaggaaagaggagaggagaggagaggagagaagaagagaagggaagaaaagagaagggaagagaagagaagagaagggaagatgacatggaagtggaaatacacagtgcaatcttttattctatagattactcttcttccaggagacaaagagccaaggggataaacagccaaaggacctctcacagstgggtaaatgtgcaaaaaatgggagataagtattaatatagcaaagagtgaagcatttcatggaaaacatttctttttttctttttctttttttttttttttgagacagagtctcactctgttgcccaggctggagtgccatagtgcaatctcggcttactgcaatccccacctcccgggttcaagtggttctcctgcctcagcctcccaagtagctgggactacaggtatgagccaccacgcccagttaatttttgtatttttagtagagaagggtttcaccatgttggtcaggctggtctcaaactcctgacctcaaggaatccacccatattggcctcccaaagtgctgggattacaggtgtgaaccactgtgcccagcaggaaaacatttcaaatgtacttttaagatgagagaccctaactcccacttataacataggaaggcaacttgggagacactgggggyagcccccaaagggcaccagctcagcatgccgcagccatcacaaagccaccaaactgtgtggtgtcaccggaaaacacggaaaacaccagtgtcctgccttgagtacctatgactttttttagagcgagrgtctctctagagatgggcaacaaaaataatcaagtgcatgctgagacttataaataaaagtagataaagagaagaaaagacagcagatctgcaatcactaacatcaaaggaaaagcgggagcatgaggaagataagtcatgaaaagcacaggtagggtgaacctacaagactagaaatagtggaattccttaaagtttgaccaaagtaacttagggacgcttatggggaaaatattacagtatcttacaatagtattttaaatactctttgctgttcattagactagtaagtagtagtttaaggaagatttatggaattttagaacacagttataatcaaatccagcatccctatgtcttagatgaaagaaattggatctagagaaagtcagtgccttgcccggggccatacaccaccttacagcagagctgaagctcgaacccttgatttctattcatgctttttctattagattatttaatatgaaaacactatgactgatgatagaggcccaagatagggatgttggagacaaggccagataaataaggtattgttaaggaaaaccaggaatgttgtgtggcactaccctaaaagtttgaggctgacatggtacagcaacaatgttctctcacagaatggccctttgcttcacggtcagaggctggcatatagtctggtctgctgatctgaacccatttcgatttcttactccctcaagctcgaatcacccatatggtcccacatgggcagtgcactggctggttcactttgctgcattcccttaaaggttggatgttcaagtcaattctagccactctaggaatgctgaggtcaatggaattctaccaacatttgccggctctgggggagaggagacagctgccaatggcagtggtatggatgacgggagggcagtccatcctggaaaatctactgctgccacagcccacaatctggtagtctgaatgcttagtatccaggaaggctgggagtggaaaatatcttaagtattcctcgmctcttggcaccagggaagcaagagaaaaataaagcaggggaacctgttggacaggactgtcaaggccactcttgctggaggctgcctgctgctagaaggagctggatggttcttcctccccagcagagaagagggtaggaccagagagactagagtgaacgggattcctatttgccaagacctccagggaagtgctgggaaatgctctatctctgagaaagagcaagcttgagccttgttgctctcggttggggtgacatttacaaatgcctaaacaacatgatcatgggaagaaagggaagctgctccaacagatacagtctgctgcagaggagtgctgcccgagggactgcaccgcattccaaatgttgggtgcgggaggggaataaaaacctcatttcacctttttcttcatgccggtcttatttcctctgggtcattttatttttatgaaagaattgtaacaggagaaaaaaggatacaagggacatgatagggagagacctgagccagggagctgaacagcagagatcaatgcaggtgagtgtgagaatgcagtgaatgtggtcttgtgttttggggagagatcctggtgtctttttctccaacactttgtggatggaagtggctttttccaactacctacaacatctacacagtaaccacctatactcttcagaggccagtgcccctagcttgccaggcctgagcactgcacctagtgagttctgctttcaacacttggtgccttcatctgcaaggagcgccatgaaatacttggcaaagagcagactaggaaggatggctttgttgaacaggcttctttatgtggtgatcgaatgggatgctgtttcacgtatcctttcctcaggaaggttctgggactcttttgcatttatgcagagggttgcagaaaaaataagcacctgaactgaattctgacttgatgatttctaccaacctatatataaactttgtgtaattcaatatccaagacatacagtatgtcttttccttgtaagagggaagcaagctaaatgacttttttcccccttaccatttcctcccctttttctttcaaaaagctgccgtatctattttattttacgggctaaaaaaggttgcaccacatttggtattccacaaagaggaaatggaaaaattattaaatagtgaaggaaaacagtattgcttgcttagaaaataagacatatgaacccttaagaatgggaaaacaccagctactatggcagggagaagacattttgccaaatttagaacccacttgaaaatcacgggttctaagtttagaactgaactaaaaacttgagctcacattgcatttggcattggtttaaaaaaaattctaagctactaattaaagggaaaaaaattatactcttagtagttctagaggctgggaattattttcaaacaaattctttattggctcaatggagaagcctgcacttagaaaagaaacaayttttttctaattaaaatttcgttacaaaacaatgatttaaaattgaggggagaaaacatttgccaaagtctttaaagaattacagaattgttgtgtaatctttgaacccatccaaatacaccaggtggtcatacaaacttcatatactaaatagcgtgtaaaacagacaccattaattatagccgaccagtaaacttcaaataataaaaattcaataaaaatttaaactatcactaaacaaaacaaaaacaaactcttaccagcatttttattttctaatttggatattatgatagttgttgtaacatcactaagaaatggatctgaattgctgctatggcaataattacaaaaattttagacccaaaagattcaaagtagtaaacagacatccactggcttaatgtgattccagggagctatcaactttctcttttcttttctgtttgagacagggtctctctctgttgcccaggctggagtgcagtggcccaaacccagctcactgtagtcttgccctcccaggctcaagcgatcctcccatctgagcctcctgagtgactggggctacaagcctggctaatttttaattttattattattattattattattattattattattattattattattattacttttagatacagggtctcactatgttgcccaggctggttttgaactcctgggctcaagagatcctcctgcctcagcctcccaaagtgctgggattacaggtatgagccactgtgcccatacaacttttcaattatgggaaacttaaagatagcttatgctgtcctccacacacctaacatacatacacacatacagaaatgcatacacatacatatatacatataataataatgacctaaaaggaggacctgaaatgaaataattagacaaaaggttaaacatgaacattcagtgccaatattcagcacagcaagcattcagaaacacaaatgttgggaaaaataatttttcctttatgttgattgccttggagtctaaatacatttttgagtgactttaagggagcaggcttagcaactgatggatttgacactctttcttcagaaacaccattaactcaacagtacaaaaccctagaactttaatttctaggcacttctaaaaactcttgttgaagcctggtgcagtagtacgtgcctgtagtcccagctactcagtaggttgaggcaggacagtcacttgagcccaggaatttgagaccagcctgggcaatatagtgagacccccatctcaaacacatgaacaaacaaaaaaactcttattgaaggatataaaattaattcctaagttaactattttcttaacaagaagatgcagttgtactggtgggaagaggatagaaatttaaagttgtaaaaacaaaaaatacagcatgtgtaagtggaaaaggatttgttcggtacatatttttaacttactcattttaaataagcatagttaaacagtagctatgtatttgacctaatagcacgtgtagctctcactaggaggaggaacagaggttaacactgttaatatgtgtgccaaagtcaggatacgaatagattccttggcccactgggtcactcacttctgaatgcatgttcttcagcacagtcttctatccttttaaatgaccaattcaaatggaatttctttttttttttttttttctgagacggagtctcgctctgtcgcccaggctggagtgcagtagcaagatctcagctcactgcaatctctgccttctgagttccagcaattctcctgcctcagcctcctgagtagctgggattacaggcatgcaccaccatgcccggctaatttttgtaattttagtagagacggggtttcaccgtgttggcctcgaactcctgaccccaagtgatccgcctgccccggcctcccagaatgttgggattacaggcatcagccactgcgctggtctcaaaaaaaaaaaaaaaaaaaaaagctggagagtttgctgatgtccagatcctgactgtctgccccaaaagcctccagatcctttagctatcttccaggcattttcaattctttgacctgtaaatttttttcacagaaataataaatatgtttagtgttgtcaagaatcaggtatcccaaatactttttgccattatgccttcaccaagtctgaaccgaggttttaatattttcccttgccttatcactgtaggtcttggctctacaaagagtcatatgagataagtatttcaattaagaatttaggaatttgggctgggcgtggtggttcatgcctgtaatcccagcactttgggaggccgaggtgggcagatcacttggggctaggagtttgagaccagcctggccaacacggcaaaaccctgtctctaatagaaatgcaaaagttagttggcgtggtagtgcttgcctataatcccagctacttgggaggctgaggcgcaagaatcacttgagcctgggaggcagaggttgcagtgagctgacattttgccactgcactccagcctgggcaacagagtgagactgtctgaacagaaaaaaaaaaaaaaaaattaggaattcggcgaataaaaaagaatttaggaatttgggaggctgtggtgggaggatcgcttaagcccaagaatttgaggctgcaatgagctatgatcacaccactacattccagcttgggcgacagaataagaccctgtctcttaaaaaaaaaatcaggaaatgatatgcaaacttgatgttggtaggtaggctttcctgaagacgtgcttttctctgtgtgtaggcaaaggtacactgctggtattcagcaaaaaagtagctctaattccctctgtcacgcattccactagatatcttcacctgcaagtgaatagacaccagaaatagtcccagacatatatgttcaattcattttcaacaaagttggtaagacattcagcacaaaaatactttttttttttttgagacggagtttcgctcttgttgcccaagccagaatgcaaaggcgcagtcttggctcactgcaacctctgcctcccagattcaagcgattctcctgcctcagcctcccgagtagctgggattacaggcgtgtggcaccacgcctggctaattttttgtatttttagtagaaacggggtttcaccatgttagccaggctggtcttgaactcctgaccttagatgatctgcctgccttggcctcccaaagtgctgagattacaggcgtgagccaccgcgcctggcccataggaaagacttttcaacaaattttactaaaacaactgggtagtcatatggaaaaagaaacaaaccttgaggctgggcacggtggctcatgcctgtaattccaacacttcaggaggctgaggcaggcggatagccagcctgggcaacatggcaaaaccccatttctacaaaaaatataaaaattagctgtgtgtggtggtgcacgcctgtaattccagctattcaggaggctgaggtgggaggatcacctaagcctgggaggcagaggttgcagcgagccatgatgatgccactggtctagcttgggtgacaaagcaagaccctatctcaaaaaaaaaaaaagaaaaaaaaagaaataaactttgacttttacatcatgctacatacagaaatcaactcaaaatgaatgcgagacctaagggtacaatctagaaaactccaagagttaaacagaggagaagtcttaggacaaaaaaagcaaactttcacaaaagagaaaactgataaactaaaccttgtcaacacttaaaaatttgctcttagaaagatatcattggccaggtgcggtggcttacgcctgtaatcccagcactttgggaggccgaggcgggcagatcaggaggtcaggagatcaagaccatcctggctaacaaggtgaaaccccatttctactaaacatacaaaaaattagccaggcgtggtagtatgcacctgtagtcccagctactcgggaggctgaggcaggagaatcgcttgaagccaggaggcggaggttgcagtgagccaagattgcaccactgcactccagcctgggcgatgagcaagactccctctaaaaaaaaaaaaagaaagaaagatatgttaagtaaatgaaaaggctaggcacagtggttcatgcctgtaattccagcagtttgggaggccgaggtgggagggttgcttgagctcaggagtttgagaacagcctgggcaacacagtcagcctcatctcaaaaaaaaattattcatacattaaaaaaaaatgaaaaaagataaagcatagaatgaaaaaatatttgcaatacatataatggactggtatctagaatgtataaagggctattagaactcagtaagaaagcaatgcaattttttcagtaggcaaaagacaaacaaatgctttataaaaagaagttacatgaaaagatgctcaatattgttagttatctggaaaacacaaattaaaaccacagtgagatgccactacacaccaatgagaatggctcaagataaaatgatgacaataccaagtattggtgaagatgtacaactgctgataggaatgtaaaatggtacaagcactttggaaaactgatagcttctttaaaagttaaacatggccgggcacgctggctcatgcctataatcctagcactttgggaggctgaggcaggcggatcacctgaggtcaggagttcgacaccagccaggccaacatggtgaatccctgtctctactaaaaatacaaaaattagctgggcgtggtagcgtgggcctgtagtcccagctactcaggagcctgaggcaggagaattgcttgaacctgggagggggaggttgcagtgagccgaggtcttgccactgcactccagcctggccaggtgacgaagtgagactacatctcaaaaaaaaaaaaaaaaaaaaaaaagttaaacatacacctgccattcaacctcgtcgttctgcctctgggtactcagccaggaaaaataaaaatatatgttcacacaaagacttgtacagcaatgttcattgtaggtttatttgtaatagttaaaaactagaagcaaaccaaatgttgaacaactggcataaaccaatttgtttatgccataaacaaattggagcatagtcaaaaggtgcaacatgagtcagtaataaacaggaatgaactactaatgctcacaacatggatggctctcaaaatctttatgcttagtgaaataagtcagacctcctcacaaaactacatattatatgttttcatttatagaaaatgcaaactaatcggtaagtggcagaaagctcagttgttttccggggcagacatggagaaggataagggaaacgagaaaatctgggggatgacaggaatgttctgaaccttggttgtggtgggttcacagatgtgtgcattgaactggctgtgtgcggtggctcacgcctgtaatcctagcactttggaggccaaagcgggaggatcacttgaggccaggagtttgagaccagcctgggcaagatagcaagacctcatctctacaaaaataaaaatgaaaaaattagccaggcgaggcgcacacgcctgtggtcccagctacttgtgaggctgaatgggaggatctcttgagcccaggagtttgaggctgcattgagctatgatcacaccacagcactccagcctgggcatcaaagcaagacactcatctcttacatagaacaaaacaaaaactctttgaattgagccaggtgtggttgtgtgcacctgtaatcccagctgctcaggaggctgaggtgggggagggttgctgagcccaggatttcaagaccagattgggcaacgtagtgaaatgtcattaaaaaaaaaaattgggaaaatggctgtaataagcatctaataaatgctagcctttattaaaaaaaaaaactctttcaatggcacactttaaataggtgcaatttattgtatacaactcagtaaagttgttattttaaaaatctcccattgagtgtttggcaggccactcaaacttcacatttctccaactgagctcctaatcatctgtttgtcctcttggttaatgttctctttcttggctaatggcctcatcatctacctaatcagctaagctagatagcttggcaatcacctttactctactttcatttgtatctttaaactctttctcaaatttatctctaaccttgtttgttttaaatttagaagtgttttttactgtggtaaaatatacataacataaaagttaccattttaaccactttttttttttgagatggagtttcgctcttgttgcccaggctggagtgcaatggtgtgatctcggctcactgcaacctccgcctcctaggttcaagcgattctcctgcctcagcctccggtgtagctgggattacaggcgtgcgccaccaagcctggctaattttgtatttttagtagagacagggtttcttcatgttggtcaggctggtctcgaactcccaacctcaggtgatccgcccgccttggccttccaaagtgctggaattacaggcgtgagctactgctcccggccttaaccacttttaagtgtacagttcaattgcattaagtaaattcacatgattgtgcaaccaatagtaccatccatctccagaactttttcatcttccccaattaaaactctgtatccattaaatactaactcccactcccctttccctcccccaacccctgtgccaactaacattctactttctgtctctatgaatttgactactctaggtggtagagtatgtaagagtatatattccaccgcatataagagaaatcatgcagtatttgtacttctgtgattggtttattttacttaacacaatgtcctcaatgttcatccatgttgtagtctgtgtgagcatttccttcacctttaagatggaatcatattccatggtatgcagagactacattttgtttctccatttatccatcgacggacaattgggtcatccctaattcatgatgcccactgctactaccccagtttaaggcctcatcatcttttggctggactatttcaatgggctattcactgccatccttacctccttttctcacgcaccttctagcttgccaccagtatcgtttttctaaagcaatgatcctgtctctccactgttcaaggacttctgtgtgcaatttcaaagtcaaataggattgtacttctaatgctgttctgcagtttgcttttttccactctccttttgaacaactctaattcgtagaaatttctttcttattttaatccaatatatatttcctggtcactccctcccattggtcctagctctgtcctccagagcgacactgaatatttcccttttctttttcttttctttttttttttttttggagacggagtctcgctctgtcgcccaggctggagtgcagtggcaccatctcggctcactgcaagctctgcctcccgggttcacaccattctcccgcctcagcctcccgaatagttgggactacaggcgcgtgccgccacgcctggctaattttttatatttttaatagagacggggtttcaccgtgttagccaggatggtctcgatctcctgaccctgtgatccgcccgcgttggcctcccaaagtgctgggattacaggtgtgagccactgcacccggccaatatttccctttactatgtggcagacaaccctttaatatataaagataactatcagtcttctttttccaggccttgagtcatttctcaggtaatgtggttcccagaccctagctgcttttctctgattgtggttcagttggtcagtgtccttatcaaaacaggatgcctaaaacagaatataatcatctagactctacaaccatctagagtgggaccattgtatcctttgctctgctgttttactactataactcagcctaatatgcctttaacttttttagttttaatgttgatacatattaacttggagtcaactcaaacacttagggttttttaagaaatacatttttatgacactattgggcacctgaagatgggggtgcccaaaggaaggaaaaggaaaagaattgaagttaggagagcatttttttccttagcaattttgcctatttattcaatgtttcttgctcctgatagcagatgcagatcatctgcacaccagtcctccctccaggcttcatatcagtaatgtaccaaacaccaaggcctagtaaacaactgcgtttccaacaacctgcctagactcacagcctggcacatgggcctccccgctgcaccctcagttctacccctgatagctatgggacacctgtggcaagtgattagaagaaatggtagcaattgccataaaacacacacacccaggaaatgcacttttgcaaaagtacatggcagttcagacactgtgcatcaaacaaaaaccttacctaaaagcgtataggggaatggaccaagaaagcagcgtcctagcttgcctttctctaggcagctaaaaatctaagccatcaaagggggagattctttattaaaaaggtgttgcatctttgttgttggcttttcaaaagtaaaatgcagtatctttaatgggtgaggaagaggattgcttgtccaggcaaattttcttgaaacttggagtcatttaagaggataagactcagttgaatgtgttttgggattttttactggtcaacttcaggctggtggctatttactcttccacacagacattccttccatcagatcaatgcctgctccctgcaacacacacaccacacacaccgcccaccaatattcccgtcatgcccggagcctcacaagtagtgtctcttttattcttctcttcttagaaattcagtgctcatattcctctacacacgaaagccatcccctccccagccttcagtctttctccccttcaattataaactgagaccttgatcctcagtcatctcattttccaaaatgatcccctatctctttycgctggctccttcctcttcacgtttcactgtaaccaggacccttcaatgcagatgtacttgtcaatactactgcaccaaccctgccctctcttcactcacactgaacacttcraatgattatgccgcactcattccatttttggatctaccactgattctctgtcacccgggcttgagtacagtggtgcgatctcggctyactgcaacctccgccttccgggttcaagcgattctcctgcctcagcctcccgagtagctgggattacaggtgccagccactacacccagctaatttctttttgtatttttagtagagatgggatttcaccatgttggccaggctgtttttttttttttttttaactttcattttaggttcggggatacacatgcaggtttgttatataggtaaattttgtgtcatgggggcttggtgtacagattattttgttacccagttaataagcatggtgcctgacgggtagttttttgatcctcaccctcctctcagcctccaccctcaagtaggccccagtgtctcttgttcccctctttgtatccatgtgtactcactgtttagctcccacttatagatggaaacatgcactatctgactttctgttcctgcattagttccctcagggtaatgacctccagctctatccatcttgctgcaaaggatatgatcttattcttttttatggctgggtagtattccatggtgtaaatgtaccacattttccttatccagtctaccactgatgggcatttaggttcattccatgtcttatgctattgggaagagtgctgcaatgaacatacgcatgtgtgtgtgtctttatggtagaatgatttctagtcctttgggtatatacccagtaatggaattgctgggtggaatggtagttctgttttaagttctttgaggaatcgccaaactgctttccacagtggctggactaatttacattcctaccagcagtgtgtaagcatccccttctctccacaacctcgcaagcatctgttattttttgactttctagtgatggccattctgactagtgtgggatagtatctcattggggttttgatttgcatttctcttgccagctacttgggaggctgaagcaggacaatcacttaaactcaggaggtggaggttgtagtgagccgagattgcaccactgcactccagcctggggaacagagtgagactccatctcaaaatatatcctcccaaggtcaattaagactttttgttggacaagtttgatggtattctcttggaatttatattctcactgacttttccttgtcccactgggatgcagcaggagcgggaggggctggagagggataagagctgtggtgggtatcaggagagatggctaggcttgcttcctttgcaaggtctacatcactcactctatccctttatgccccccaccaccccacgtctagctatagagtaggacacaatttcaatgattcttgccccaaatacacaaatctaggcaaaggaatcagcaaattattattattattattattattattattattattattaagacgaagtcttgctttgtggcccacgctggagtgcagtggcatgacctgggctcactgcaacctccacctcctgtgttcaagagattctcctgccttagcctcccgagtagctgggactacaggcatgagccactatacccggctaatttctgtawttttagtagagacagggtttcaccatgttggccagactggtcttgaacttctgacctcaagtgatccacctgtctcagcctcctaaagtgctgggattacaagtgtgagccactgcgcccagcctcttttttgtttttttttttttgagaaggagkcttgctctgttgcccaggctggagtgcactggtgcaatctcggctcactccaacctccgcctcctgggttcaagtgattttcctgcctcagtctcctaagtarctgggattacaggtgtgcactaccatgcccagctaatttttatatttttagtagagacaaggttttgccatgttggctaggctggtctcaaactcctgacctcaggtgatccacccgcctcggcctcccaacctgctgggattggctcacacttacaggtgtgagccaatgtgcccagcctggaatcagcaaattcttcgccccgaagatgggttcagaaatcatcccaaaccctttgggttttcctactaactacaactgaatgataggtgtgctttggcctgaaatgggtctgttgaatctctgatctccagattgggtggctcttcaccagaaagtctctcgatcattacttctcaaaaattgcaactctcacccttccttcattttgtccttcccgtttctcttttttcttgtttcaaactgagtttctctttgtatcaggcagcctcacagtctgacccaacactgatctttccattgtcatgaacatttcccaaaccacatttaaaaatcacaatacccttttcttgttctcgcagaagcacaaagtatgagaaataaaccttcattaattgtagattccctcttctttaaaaaccatatttgctagtcttggacttcttaggatcwtaagaccaaaaaggaaccttgaaaagtcaatccattagttatatcacatttaaataattatgtgactttgtttgaagaattaagaaaactgctgaattcaattaaacaaaactaaaccctgccccaagccactgggatttggttaaagtgaatctgaagcctgtctgtcaatcatcctagagccatctgagttcctcgggcctggggaaatgtgtctccccaaagttcctgtcttggaagcttaattgccaatgtaacagtattaagagatggggcctttaagagatgattgggtcatgagggtagagccctcaggtataaattaatgccatcaggtgaagtgagttctcgagggagtgaattggctctcacaggagtgagccctctccagagcaggttgttataaaagctagcttggctcactcttgcagtctcttttgcatgtcctgcttgtccttctgcttttccaccatgttaagatgcagyacgaaagcttgcaccagaagctgctgccatgttcttggactacctggcctcctgaaccataagtcaaataaacttctttaatttgtaaattacggagtctcaggtattctgtcttagcaacagaaaatgaactaagacaccaggaggtgcaagttgagtatgatattcttgtgtgtgtgttttgagagacagggtcccattctgttgctcaggctggagtgcagtggtgcaatcatggctcacctcagccctgaattcctgggctcaagcaatcctccccactcagcctcccaaatagctgggactacatgtgtgtgctccctcacctggctaatttttttttttttttgagacagagtctcattctgttgcccaggctggagtgcagtggcatgatctcagctcaattcaacctctgcctcctgggttcaagcgattctcctgcctcagcctcctgagtagctgggatcacaggtgtgcagcatcacacccagctaacttctgttttttaatttctttttttttttttttgagatggattcttgctctgtcgcccaggctggagtgcaatggcatgatcttggctcactgcaagctccacctcccgggttcaagggattctcctgcctcagcctcctgagaaggtgggatggggtttcgccatgttagccaggctggtctagaactcctggcctcaagtgattttcttgccttggcctcccaaagtgctgggattacaggtgtgagccactgcactcagcccacacctggctaattttttaaaaaatttttttgcagacatggggtcttgcagtgttgcccagactagtcttgaactcctcctgaagtgatcctcccaccttggcctcccaaaatgtgagattacagatgtgacccactgtgtctgagtataatattctaataaatgaattggataccctgaagagccacaggttaaatgtgaaagtcaccatcaatataaaaagctaggaaccttggtcaaattacatacttttaagctatatatatatgtaaaattggatgtggaagtatctatggatagctccatgcatttgaatgatttagaacaagagttattaaccttaggtttggaaccatcctcaactgtgtacatctagtttagtttagtttagtttagagacaaagtcttgctctgttgcctgggctggagtgcagtggctggccttcactgtaacctaaatgtgtacgtttttacagtgcaaggcctcactgcttttatcagatccttaaggatctccaaaaggcttaagaacccctgttttagaagaagggtaagattaaaatcaatatattattttatatatttataaatgcattaaatagaaattaaaaacttccattttagcaatagcaagataaaaggttgattgttgtaaataatcatcacataattagtaaccacatttaaacactaatagacaatattatttcagcattttagatatgtgtcaacaagtatttaccttaatatacrtgcargtacatcagrgaaggaggtgttcagatacagattttaacctggattgcaaactactggtaaatttactttcactattgtttaaaaaaatcatcaatcagataatgtaaaggcaataccaaatacaaatcaagtcactattgaacatagttacagctatgttcagttacaacacctcattttctcatattagataagaaaaataaatgattgtacatgctttatagcagattgattaaaagatatactggggaaactcctttcatagccaaattttacagccaaaaatcaaattcagtgcttggattttttaagccaggacccattcagagtattccaagaatagttctcaaattgctaaaaagcattggttccataaatctattttagaaatgaattttaaaaattagaaagtttgagtcagccatacacaaaccaatcaagttattatgtactccatttgggtttttttacatttaaagtataattcatttatttattcatttaacaaatatttattgagcctctgctacgtgtaggcactgatctgggtgctaggattacagcagtgaataaaacagaccaaaaatatacaagttaacacatatgctcactggaaaacattcagatacagaagtgcacagataaaaaaaatcaaacttgttctccttaaggcccatcccccatctcagttccttccttgcaattaacagttattctagacatttttagtttatttacatagaaaaccttacataggattttaaaaccagttttattgagatataatgtacatactgcatggatgtataggcacatcataaaattcacttgcgtaacatgtacagtcacattttttactgtatttgcagtgttgcattataatctaggtatgcagattttactttattttattttatttattttattttattttattttattttattttattttgagacagggtctcactctgtcacccaggctgggatacagtggcacaatcccggctcactgcaacctccacctcactgcaacctctgcctcctggattcaagtgattcacctgcctcagcttcccaagtagctgggattacaggtgcctgccaccatacccggctaatttytgtatttttaatagagatggggtttcaccatgctggccaggctggtctcaaactcctggtgtcaagcaatccacccatctcccaaagtgctgggattgcaggcgtgagccatggcgtccggccttagtctccacactcttaacagagttgatgagatataaaggaggtgaaggagagggatacaaacaaacagataaaagtttaggataggccaggagcggtggctcacacctgtaatcccagcactttgggaggccgaggcgagggatcatgaggtcaggagatcgagaccatcctggctgacatagtgaaaccccgtctctactaaaaatacaaaaaaaaagaaaattagctaggcgtggtgccacatgcctgtagtgccagctactcaggaggctgaggcaggagaatggcgtgaacccgggaggtggagcttgcagtgagccgagatcgcgccactgcactccagcctgggtgacagagcaagactctgtctcaaaaaataaaaaaaaaaagtttaggataaatgcaaataaggtaatgtagataaagtgtttagcatagaggctgactccttagtaagcacacaataaaaatatatgaataaataataaaataaatcattttattaaataataaatcgttattatagtctgtatactgtatcttttatggataaggttcctcttctgttaggaaagtaacatttctgttgccagcctacagatttgtttaattagccatcttcatttgcggctgctataatacaattctgtagggtcaccgatcctactcagcttctttttttttttttttttttttttgagaaactcctaggtgctaagcttaggtgctgcacaggtcaacaagactgtccgagctcaaagaacttgcagcagggaaaacaataataaaggtattgcagggctgggtgataccgtagtgtctgtaattccagctactggagagggaggccatggagtgaggactgcttgagcccaggagtttaaggctgcagtgtgctatgatcacacctgtgaatagccactgcactgcagcctgggcaacatagcaagaccctgcctccaaaataaagacatacatacatacctacatacatacagaaatgtattgtgtattttggtgttttgggagcacccatggaaaaaatcaccattttttttttttaaggggagtcaagaaaggcttccaagaaggaaactttgagatacaaggtgggagataggtagagtcatcttatattccctttaagaaattcaggttttatcttgaagctaatgaggagccctgaagaaggtggaatgagatgggttgggcctggagggaaggacagttagaaggctggatgtgaattaccccaccccagcctgtgacaaaagctccacccaaaacatctgctgttcttgctagttggtttcttatcttttgactcatgaagttactttgtcttcaagtttctcaatcacaatgtggtttcaatccaagataatctttcatatctgaaattcgtttttcacgcttaatattgctaagcatattttcagtgctctgatacttcttttggttttgttttgctttttttccccccaacagttctctggttggttatctagatacttcttttcaaaacatcagagacctttatgataaagctagacaaaaaaaattatttatccaagaggggtaatttgaaaacaagtatgacaaccagcaactccccatcacatcaaagtcatagctgcagtggaaagaaaagcttagatcaggggaaggtttaggttaggttgaaatcgaagttccttacactaggattatccttacagatgaaaaacagatgaaggcaagcatgctcagacaggaggaatgaagttgaagggtaactctgattaaaaccaaggaggggtaataccagataatactggccaaagactggagttggaggtgagagaacgaaggagagctacaaaccagcagtgttcctacaaaacagttctttgcttttttccccctacactggtaaataatacgtttatcacatgactggcaaaaatgaagtattagtgtcaattcacagcattttcaaaataccaacgatttatttttcaatttttttttctttttgagasagagtctcactctgtcacccaggctggagtgcagtggtgtgatctcggctcacygcaacctctgcctcccgggtttaagcaattctcttatctcagcttcccaagtagctgggactacaggcgccgccaccatgcccagctaatttatatatatatatatatatttgttgttgtcgttgttgttgttgttgttattgtttgagacggagtcttgcccttgtcacccaggctggagtacagtggcgccatctcagctcactgcaacctccgcctcctgggttcaaacgattctcctgcctcagcctccctagtagctgggattacaggtgcrtgccaccaggcctrgctaattttttgtatttttagtagagacagggtttcaccgtgttagccaggatggtctcsatctcctgacctcgtgatcagcccaccttgacctcccaaagtgctgggattacaggtgtaagccaccrcgcccaaccatttttatatttttaatagagatgggtttcaccatattggttaggctggtctcgaactcctggcctcaggtgatccacccaccttggcctcccaaagttctgggattacaggtgtgagccaccatgcccgacctatttttcaacttcttattatggaaaattgcaaaagtasagtataacgaaaccccctgtacccgttattcaacctcaactgttctcaacacagggcccatcccgtttccatcttactcctatctagtggattagtgtgaagcaatgatttcatctgcacttacctcagtgcacacaatcaccttagagccaagcatgctttttggatcccccctttgtcttcactcactcccatcctctcagggggcagtctgaggacatcaagtagrcagtttttttgtttttttgtatttttagtagagacagggttttgtcatgttcgccaggctggtcttgaacccctggcgtctggtgatcagcctgcctctcggcctcccaaagtgctgagattacaggtgtgagccactgcacctggcctggagacagatttgagaagagaagaaaacagtccccacagaaagactaaactggctgaccaaggcagagagctagaccttttgaatcaggatcggatcgggggaggtgcagccaggcctcaagccctttccagccccttcccaggtggcagcatcaggggacctgaacaggtattagtggggccttgcagggaggaatgagctgagtgggcaggggtggcgtcttgggtggaagcatttgagatctgctgacattctttctagcttctggactgaagggcatattctcctcagttgtggagagggctacagccagaggaaacaggaatctggctgaggaaaggtcagctgcgttcccagacccacccaagtgtagcacggaggctaccctcttaaccgatgactgagccaacatttattgaacccttctctatcactgacccctctgtaccccagcctgtagtcccatctgccctcacacttctccttccatctcacacgaagaccggtccttgttgtttctggccaacgtgtccacctccaccttctgtcagtcattctgcctctccgcgggcactttctctgcagcacacctagctaggtgccattgatccatccacactcgagctgcccctctcagccttcccttctctccagctctcttggcctggctggtttggcattctcaaagcctcacctgctttaggaaagtgccagtgacacacatcttcctgctgagtggggtgcgctcctgcaggctctggggttacctggcacttctgtccccaggttgcacagctgtgtgggtatcaccctctcccagtggcagaggctgtcttatttctcccacacccctagttctcatggtgctcactccgaaggtgctcaggaaatgtgtgtcagaaaataatggggctacaaagatgaataagaccatcctcactctgaaggcgactcagtctatagggaggcgatccctccaaagcaaagcgatcagggtgcttgcctccttgttgttcatattcagggcaaaattccaaattcatcagaatggcattcaaggccctcctgagcctgactaccactccagctccatcttctgtcactcactcataaaagtgcagtcttccactatagctcaaatgccttaaccctccactaagctctctccctgttgcctggaattccaactcccaatctaatttggccacttcctgctcatcccataagactcagcttcagcgtcacaacctgtgtgaagggcaacctggccctaaccctgggtgggcatttcacctcacacacgtattcagaggtggcacctggaacccagtattatcttctccactggactggaagattcctaggagcaagaactattactccatccacccctctccagcaatcaccacactctctggcacaaatgtttgatgaatgactgaatgagggaacaaagtatctggtttctttagcttctgtcaccgcagaaagacagactgactcttcacagtcattcctggggtctaaggaagactagcacagcagaattactatttcaagaaactaccccaccttgttttcctgatagcagagtaggcaaatctccagttccgggataccattcttcttcctctagttaacttctgagatttggttacctacacagaagacatccctacgcacccatcaattacaagagccagagttggaatcccagctgcttgggaggctgmagtgggaagaacatttgagcctaggagttcatgaccagcctagaaaacatagtgagactccatctctacataaaattttaaaaaattagccaggtgtggtggtgtgcacctgtagtcccagctattaaggaaggctgaatcgggaggatcgcttgagccccrggattcaaggctgcagcgagctatgacggcactactacattccagcctgggccacagagtgagactctctctctaaaaaagaaaaaataattaatgagagccagaaaattaaatggagtggctggccatggccttgaactgttactcccatatcatactggatgaaaaattaaaaactgagtataaatatgttccttatttccccaggcaggttctaattcatggagttagagtaacatcattcaaaaaatagattaatctaagaaagtcgtgtttataccatgtcttatggaattgaaaatgacatgccaggcggagtggctcatgcctgtaatctcagcgctttgggaggctgaggcaggcagatccgctgaggccaggagttcaagaccagcctggccaacatggtgaaaccccatctctaataaaaatacaaaaattagctgggcgtgggggtgtatgcctgtagtcctagctactcgggaggctgaggcaggagaattgcttgaacctgggaggcagaggttgcagtgagccaagatcacaccaccgcactccagtctgatgacagagcaagactccctctcaagaaaaaaagaaaagaaaagaaaagaaaatgacaaaaaagtaggcctttgaaaacattccttggtcacctgtttgatccttgtactcagttaaaacagtgctcctaaacctagtctccaccaatttgctttgaatattttcctaaaggtacctggttttctcaccgcctttcattttgacaatcagggagtctaatcataacctgaatttttctctcaaatttctctaaatttcccctccccttcatttttcaagggtcagactatgtgcaaacactttttcacattaatcattcattagctgtgcttttggaaatcaaactcaacaacagcaccaccgttctgccttgcataattatctttctgccccagttcctgatcagatacacctttcatatctaaaatatattcatgaattaatccaatatttttgttttgttttgagacagggtcttgctatgtcatccaggctggagtgcagtggtgctatcacagcacactgtagcctcgacttcctgggttcaagccatccttctgcctcagctgctggagcagctggaaccacaggtgcgccaccatgccctgctaattaaaaacatgcttttttgtagagatgggggtctcaccattttgcccaggctggtctctagctcttgggttttaggcatccttcctcctcggcctctcaaaatgctggaattataggcatgagtcactgcgcccagcaccaatattcttttttttttgagatggaatctcactctgtcacccaggctggagtgtggtggtgtgatcttggctcactgcaacctctgcctcctgggttcatatgattatcgtgtctcagcctcctgagtagctgggactacaggtgtgtaccaccacactcagctaatttttgtatttttagttgagacggggtttcgcaatgttggccagctggtcttaaactcctgacctcaaattattcacctgcctcagcctcccaaagtgttgggattacagatgtgagccaccacgcctggccgtgccccaatattcttaatttctattccaaagcccagatgtcaagacctattcatgtttaactcttaacctttgcctggggatatgaagataatgagataatgcaggaatatgagtgcaaaactttggtttttgaggaatttactaaactgatgggcgagacaagatgcagatactatagtggtaaaatattggcaataatattttcaacatatataatgcactgctgtattcaaggtccatgcatattcactggatctaaaataaacccgcggtgtagatactatcttcttcatttcccgtagcaagaaactgaagctctgaattgttaagtatcttaaccaagatctctggaggttacctaatccactctcagttttaactcttacctataggctaattaatagtctatttcatatcccagacctctgtccagagaaagctaacctttctgtaaaattgcctacttgtcaatttcacctgtgtgtcccatagccctcccaaatccacagggtggaaacccaaatcccctggaacctgaacaaccacctgcatcccgtactcttcctcyaccacctcctgctcaggccgggcaccgtaactgacctcatagcctcagccaggtatctgcaagcccagtaccagtggatagacaggacacataatatatcctcaacaagtatttgttgtatgagtgattttatgagtgaatgagtgagtgggggtaggcatctttgcctctccctcacccttaaccagaagattaattggtcataaaatcctgctgtttctacatcataaatctctctcaaatcctttccccatttttaatccccaccttgcctcccttgctggattgtgtcaaagctaaaatgagattaatacacataaaagtgttttgcaaagaataaacctctgggaaaaaaaagaaaggataaatccctctggaatccgttactaaacttaccagccccagtttgcctattcctttcaagctatgattttttttttccatccttctgaccttgttgttgtctctgccatggcttccagaggctcatcactcagtttgtatgaaaataccactggtctctatgctctggcttagcggcacggttccatttccttttatgttgcttgcttctggttatttctcagagtaagatctaactcgcgaggaggctatgaagttcctcatgaaaagaagctgttacatggcttttgtagcttccacagcatctcgcacaatcttgggcatatagtaagtgcttaataaacgcttactaattgagagatcaattctcctccagccctcctcaatcagtccagtatcctcagtttctctccaaattctattccttattcttcaaaatgtattgtgtatatcaggaacatctcttcctaagatgtttgagaagagagtctagccaatagatagttttttacaagttgctcattcttttaaatgtactaagtgaaccagagtggaggagccagaccctattactcatcacactgaggtaatacggctttacacatatacagtgcttataaacacacacctaaaaccaagtataatggtaattaaagatacctgaaacgctgccagtaataatcatagaactaaagaaaaacagggcatcaatgttttccttttcattatccactacagcccagcagtcaccaaatgatacggtttggatattgcttctctccaaatttcatgttgaaatgtcatccccaacgctggaggcagggcctggtgggaggtgtttgggccatgggggtggatccctcatgaatggtttggtgccctccctgaggtaatgagtgagagctggttgtttaaaggagcctggcacctcctcatctctctcttgctctatcttgccatgtgacgtgcctgctcccccttcatcttcttccatgagtgaaagcttcctgagactgagcagatgctggtgccatgctttttatatagcctgcagaatcgtgagccaaataaacctcttttctttataaattaccagcctcaggcattcctttatggcaatggaaaacagactaatacaccaagtcttcttgcttctctctgtgaaatgtctattgaacgcagtttttccttttgggattttggcaccatcttaggctgggccttgcatgtcccatctatctcccttgccctggcttcttacctgggctctcggcctttggtttctccttactctagtgcagtttacctgcaggccccaaacattgatttcatcaagctgtcccactgccccaaacacacacctctagaggttccctactattcagaggacaagtcataatctccttagctacatcttcaaggccttttcaaccttagcctaccctcctggtctaacctctctgattcttctttgtgggggcgactgtggcctaccctttaagagctaaagttgttacctgagatgcacctgattaaatccacacaccatagacataattggggccaggcatggtgactcatgcctataatcctagcacttggggaggctgaggcaggaggatcacttgagctcaggagttcgagaccagactaggcaacatagtgagagcttgtctcttaaaaaaaaaaaagattgattggcaagagtaaatcaaaaggatgcctgctctgtaaatgagtgactgaggaggtcaaggtaacccaaaactccaatcaaaatctgggagtaatatcagggaagtaggatttgaaggtgattgtaatttagggagcagaggcaaacactgaacatgcttaggggaggagtgtgactagaagggtcagaaaagggaacccaaggagtgaaaagtaggcaacacccatctgttaagtcaatgaggatgtctacccacatccctgaagaatgaacgtgacagttcaggctctgatgcgtgaacactgaaatcacctaacaatgcccttcagtagtttgattccacagcaatcctggagcagcttgtttttcatggcatgggccctgatcagacagacaggctgccagttgcagatccccctgcagaccaaatgcattggccttcagctgcatacatatgcgtggataatcagttttgatgagcttggctaaagtaaggccactgctgagaaatggagccgcttccactcagtaataataatgataattaacaagtaaatcacatgtctgagcctgaggaacagctccaggaccacggtaaactgaccgaggtaaatgtgctctaaggggcctctgtgtggacagtccatgcaccttttgagccagtctcctgcatccttcaatactgagtgcacgattgtaaaaccacatgactagggccgcacacagtggctcacacctgtaatcccagcactttgggaggccaaggtaggcgaatcatttgaggtcaggagttcaagaccagcctggccaacgtggtgaaaccccatctctaatacaaatacaaaaattagcaaggcgtgatggtggacacctgtagtcccagttactcaggaggctgaggcaggagaattgcttgaacctgggaggcagaggttgtagtgagctgagatcacaccactgcactgcactccagcctgggcatcagagtgagactgcatctcaaaaaaaacaaaaacaaaaaacaaaaacccaaaaaaccccacatgactaaacaacaggattttaacctggattccattttctctctggccaccccagcttttggctctttagtcacttttcatgtggtctgtagaaggtctcttcaatttttccctcctggttttactctcatctgcctggagtcctctgcttcaggaagtcaccccatgtgaatgctctcattgtatgctatgcatgtgctcactgtaacaccaaaacatctgcacaggtgtgtgtgagttcacatcttctctatggcacgatctgtatcttcatatttgtatttctagggcctagcataaggtagtgggaacttaaatacaacagtgctgaaatcattccagagcactgagattccaaaaatctgcctctcagggaagacttctctgctgagcctcaggcctgtatgtccaagtttctactggtcatctctacttggatgtaatacagataactcaactttaatttggccaatgccaagttttcttgacccactctcttgataactaatccactctcatgataacccattaatccatgtatggattaacccattcacaaggcttctcatgatccaatcacctcccaaaggccccacttctcaatactgttgcagtggggatcaagtttcaacatgagttttggaggtgacaaacattcaaaccatagcaatactatgcatctagcgagtcaccagatttctttttgtctttgtagaaatggggtctatggggtgtctctatgttgcctaggctggtctcaaactcttggcctcaagtgatcctctcgcctcagctcccaaagtgctgggactacaggtgtgaaccactgcatctggccttcccaaatttcatccatccactctctcttcatatggtccacctctcatctaaggcccttgatagctctcatctggactgttatggaagtcatctaactggttcttatctataaaatgggagtaaccgtaggatttttgtaatgattgaatgaggatgcacattacctcatgataataatagcaatggctagcattgattgagttataaacccctagtactgagctgtactgagctgcagtaggggtttagagctcaatcaatgctagccattgctattattatccctcagggtctagttcaatcttttttttttttttttttaagagatagggtctcactatgttaccgagtttggactcaaactcctgggctcaagtgatcctcccacctcagcctcccatgtagttaggactacaggcatgtgccaccgtacctggcaatttttaaaaactctaggtgacctktctaatcaatctttttccattgacaatcacctttttataaacgactgcagcactgattgtagtattcattttaaactgtacattctggtcatatgtgtgtatctatttctcactttttgtttagtttttttgagagagggtctggctgtgttcctcaggctgcagtacagtggctattcatcagcaccatcatagctcactgcagcctcaaactcctgggctcaagccatcctcccgcctcagactcccaagtagctgggagtacaggtgtgtgtcacaatgcctaactatcatcttttaactgttcaacttgggagtactgggatgtgtattacactttgtggtaggcggaactctaagatgatcctcgatgacctcccctaagcctcatctttagagaatcctttctcctttgaacacaggcagagtaagtgagtatgacgagagttgactcccatgattaggttgtgttagatggcacagctgaagttaatgctacaggagattacccaggtgggcctgaccctcatcatactaaatcattaaaagcagagcgctggaggcagatggaggatcagagattcaaagcacaagaagactaggactcgcccttgctggcttgaaggtgttgggggtcacaggaaaaggacctgaaagcagcttttagaaccagacagcagtgccctactatggatcagcaagaaagtgggacctcagttacagagccacaaggaagtggattctgccaacagaacctgaatgagcttggaagtggatgtgagctcaatttggccaacaccttcatttgggcttgtgttcccttgagcagagaacctgactatgccaaactgaacttctgacctacacaactgtgtgctaatacgtgggtgctgcttgaagcctctgtttgtgatcatttttgtcatgcaacaatagaagactaatagtacttctcttcagtgctttcactattgaacaaaacgtaatttaacattacattcaataaatactcactgagaaaacattaataattgaaataactttatcttatcgccagtaaggtcataatgccagctggccttttctgcctattatcaacattaaaaactattttaacaaagattttaatttgaacaatatctgtcatgctcattttatatttattgaattgctaaaaaaaaaaaaaaaagcccacattattctagaagggatgtttttagaaaacatgaaaggaattatttaaagcagagatgcaccttgaaacatttaatacacccaggggctacattgtagtttcaggacaccaaaaatgagctagtagaatattttacaaactaaggtaatcatcaaaagagtttacaggtaaaatttctttgcatgaattaccattacaaagaaagattctatataacaaacctacttccgaggtccttagaaacaatggtttgttggtttctaaaaatttttatttaaaaagtctggcaaatgctacatacaacactccaccttcccccctcacccccggagatttacagtccatattaccgtattaaaaactctatgaagtcatgaagtgaatctacccatttaatttttttaatacagcatctcccaaatatacttacgacagaatctttctttgagaaataatttttgacctcttgcagaaatgcaatttgggaaatgctggcctgaacaaattcctccctcctgaccaagtattaaatcaaaatagtaggactacaaggaatatttcagaagttaaattgattcaagatattcaagagctggtaaagtgtcttcctcctttccttatggactatagtaacttttcactaatttttttttacttgagtcaacaaatttgaaaagtgatttttaacaactgtattaattttaacaaaatacccatacagcaaagtaaatgttccaaggaattttctagaatagtttcagccataccatatatgtatttgtgcattatcacagtgaattttttttatataagaggttgttttgtcatctaatactttataatttaatgcagaaaacacttaaaactgacaaacttttaaatatatttttagtcgatgttaaggaggaggtagaaaaatagaatcagggctgggcatagtgcctcctgcctgtaatcccagcactttgggaggctgaggcaggaggattgcctgagtctatgagtttgagaccagcctgagcaccatagtgagaccctgtctatacaaaaaataaaaaattagccaggagtggtggtatactcctgtagtcccagctacttggaaggctaaggtgagaggatcacttgagactgggagatcgaggctgcaatgagctgtgatcacaccattgccctccagcctgggtgacagaacgagacccagtctcaaaataataataataaggttcagaattttaggctagggttcttgtgcttttaaatacataaatgctaaaaaaaagttccaagtatataaaacatgaaaataagtatttcgaatgtgaagaaattgaatttgaaatagagctgtgatgtacttccaaaaagaaggaatgaccttagaatcctatccaaattcttggtctagttcagtggttctcaaactttagcaggttttagaacctcctggaaggcttggtaaagtacaggttgctggcccctgccaccagaatttctgatccaatggtctggggtgagacccccaaaatatgcgtttctaacaagttcccaggtgatgtgaagctgctgtccaggaagcctattttgagaaccactgagaatgcagttcttataccaacctgctctgagattctcattcaacagctgtctgggaaaagctgcataggtggttttaatgtgtaccaatttctcagagcctttttgtttgtgttttgagacggagtctcgctctgtcacccagactggagtgcagtggcacagtctcagctcactgcaacctccacctccagggttcaagcgattctcctgcctcagcctccagagtagctgggactacaccatgcctggctaatttttgtatttttagtagagatggggtttcaccatgttggccaggctcgaactcctgacctcaratgatccgcccgccttggcctctcaaagtattgggattacaggcatgagccactgcgcctggcctctgagagccttctgctctgaagttctgtgatttgggattttgctgtaggttatgcttgttctggttctgcatctcaaatcctctgtagttctctccacgggtatttcagcatacaaaaaccaaaaatcagaaaacaaaaaaacccagaatgctgggacaatcaatgtgaaagaaactttattttatatctcaccagcagaatttacaggagaacactggaaactataactgtagattctcacttgtgtttgctttgacttccatcgagtaacatggaaaacccagagctggccaakttgactgttagtgtagtcagagaaagaccagaagtctgcaactgccttctaactcttatatctggctgggtgtggtggctcacgcctgtaatccgaacacttatgggaggctgaggtgggaggatcgcttgagcctaggaatttaagaccagcctgggcaagatagcgagacttcatctctactaaaaataaaaawaaaaaaatagctgggtgtggtggcacatgtccatagtcccatctacttgagatgccaaggtaggaaggttacttgagcccaggaattcaaggctgccgtgagctgtgttcacrctactgtactccagcctggacaacagagaccttgtctgaaacaagcaaaacaaaacacttctatatccagctgtcttttcctatttccctttgtgttgaattgtctgtgattttcaagacccaatttagatcagccataaaggtgtcctggcagaacatcgagggcatgatcttttggagtcagacagatccaggtcctagctctgtcatttagttgctgaaggactctgggaaagttatttaatattccttaacctcagtttcctcttctgtaaaataggagaaattgtattataccttctacatattattattgttaggtgccaatgagaaatgcttgaagagcatttagcacagtgcctgacacagagtaagggagcaatagatagcacacagctcttaacattcatagaaacctttttttttttgattcagggtctcactctcttgcctaggatggagcacagtgtccacaagcatggctcactgcagcctcaacttcccaggctcaagcgagcctcccacctcagcctcccaagtagctgggaccacaaaaaaaaaaaaaaaaagctacatgccaccacacccagctaattttttattttattttatttttatttttatttttgtagagatgggggctggtcttgaattcctgggctcaaatgatcctcytgccttggcctcccaaggggttgggattatgggtgtgagccactgtgcccagcccaaataaacattctctagacagtcctggaataagtgtcaacaaatttcaatgcttgagtagtgagaattatgctataataattttcaggctggatgcggtggctcatgcctgtaatccctgcactttgggaggccgaggcgggtggatcatttgaggctagcagttcaagaccagcctggccaacatggtgaaaccccgtctctattaaaaatacaaaaattagggagacgtggtggcacacatctgtagtcccagctactcgggaggctgaggcagaagaatcgcttgaacccaggagatggaggttgcagtgagccaagatcacaccactgcactctagcctgagtgacagagtgacactctgtctcaaaaaaaaaaaaaagwaaaaaggccgggcgcggtggytcacgcctgtaatcccagcactttgggaggccaaggtgggcggatcacgaggtcaggagatcgagaccatcccggctaacacagtgaaaccctgtctctactaaaaatacaaaaaaaaaaaattagccaggcgtggtggcgggcgcctgtagtcccagctactcgggaggctgaggcaggagaatggcgtgaacccaggagacggagcttgcagtgagctgagatcgcaccactgcactccagcctgggcgacaaagcaagactccatcaattaaaaaaaaaaaatcaacatagcagctaaagatgtcacattgaacttagaaaacagttcctgccaccctcaagaactatctttcataataaatactaaatatgatcaaatgtaagcccattgatgcagcattatattatgcagtccttagaaaggaaaaatgttcctttaattaaactaaacaatgagatgatgcttccttatcacttaccattttatactttttgaaattgctcttttagacttagatttttaaaatatttaacactcttttgcatacataaaaaggaaaatataggcaaaataaatggatttaaaatatccctaaattgtcttcttggccaggcacagtggctcatgcccataatcccagcactttgggaggccaaggcaggaggatcactggagctcaggagttcgagaccagcctggccaacacggtgaaaccccatctctactaaaaatacaaaaactagctgggcatcgtggcacatgcctgtaatcccagctactctggaggctgaggcacgagaatcacttgaacctgggaggtggaggttgcagtgagccaagatcgggccactacactccagcctgggcaacagggtgagactccgtctcaaaaaaaataaaaataggctgggcgcagtggctcacacctgtaatcccagcacattgggaggccgaggcgggcggctcacttgaggccaggagtttgggaccagcctggccaacatggtgaaaccctgtttccactaaaaatacaaaaattagtcaggtgtggtggcgtatgcctgtaatcccagctacttgggtggctgaggcacgagaatcacttgaacctgggaggcggaggttgcagtgagctgtgatcaggccactgcacttcagcctgggccacagagtgagactccgtctcaataaataaataaataaaataaaataaaataaaattcccaaattgtcttctcattcagaatctcagccttgtgaatcacttgtttgactcagagtctgcttcactgcttattcactcagtatcgtcctctgtgccaccaagggcactggtgatgcagcatttcttaagagaatccaacagtactaaaagctcttggggctgggctctttgcttgcctatttttgattcctgcttgaagattattggcaagcacgtgatgatttatcattctccccacctcttttcccataaacatttggttcccaggaaggaaaggagcgcttcactcttccttctgggattttattccaggcaactgatacccattttctaagtttggacactagtgcttttgatgttcatggacatgacgactgtggcctggcaagcagattgtgagacctcttccattatgtgtcctgaatttcagacatgttggtaagaggttaatcaagcccagaactgatctttgctggagttcagttccatttggtcatttgctgaaaacccagtattattatcaatggcctttgtgttgcccttattttttcccagaacggttttattgaaatgaaattcacataccatacaatctacccacttaaaatgaaaaattcaatggagtttagtatgttgagaatgtactgataatcaattttagtacaatttcattaccccagaaagaaatcctggaccaattagtagttagtatccattcctcccctgactccaagcccctggccaccattaatctactttttatctctatagatttgcctattctggatattttgtataagtggaattgcaatatgtggtcttttgtgactggcttcctttccttagcataatgttttcaaggttcatccatgttgtagtatatgagcccttcatatccttttattgttgaataatatcagttgcatggatatatcacattttatttattcactcatcagttgatggacacatgagtggtttctgcttttggctattatgaataatgctgctataagcattcatgtacaagattttgtgtagatacgtgttttcacgtctcttgggtatatccctagaagtagaactgctggatcacaggataagtcaatatttacctgtttgaagaacagccaccttgtattccaaagcagaggaaccattttacaatcctaccagcagtatatgagggtttcaatttctctacatacttgtccaacacttgttattatctgtttttgtgattagaaccatcttagtgggtgtgaacttataactcattatggcattgcacttatttttaaagcactttcacctgcattttctcatttgatccttgcaacatttatcaacattccttatacacagtcaatgaaacaaacattaagagtaattcactgacttgctcaagatagcttagtgacagaatgtgagttaaaacataattatgatacttttttttttttttttttttgggcaagacaaggtcttgctctgtcacccaggttgaagtgcagtggtatgatcatagctcactgcaatcttgaactcctggactcaagtgatcctctcacctcagcctcttgagtagctgggaccacaggtagatgccatcatgcccagctaacttctttattttttgtagagactgggtcttgacatgttggtctcaaacttttgggctcaagtgatcctcccatctcagcctcttgaagtgttgggattataggtgtgagccactgtgcctggacataatctcgcttctagtttctgagaccattgcctttttacccctccgggctgttccaaccccaggatagctacctaactgtgatagagtaaggtcaagagtgatgacgaattagaggtaaactggggagggggaggactgggtgcagaaatgctgtcaggacatagtatgacaacaccactttaggtgatatggcatggctactggcatctgcaagacagcaatagctagtgaaaccatatttttggtttgcagcagctcagtaagacggatctgatattgggaaaaggctcagttatagcttgggttatgaaggcaaacaagtctaaaagtcttttttttttttttgagacaaggtcttgctctattgccctggctttagtgcagtggtgcaacctccacttcccaggcacaagcattcttcccacctctgcctcctgagtagctgggactacaagcatgcactgccgtgcctggctcatttttgtatttttagtagacagggtttcgccatactgcccagggtggtctagaattcctgggttcaagcgatccacccacctcggcctcccaaagtgttgggattacaggcgtgagccactgtgcctggcccaacttgcaacaaattctatagccttgccttcacagcctacaggaaatggctgtaccatccaggttggtctacttttggtacaacagttcttgtagttataacattggggaagaatgactttctagctctgcctatctcccagcaggtacagtagacatcagcctcggttacaggattcattactttttgtgtttatgaactgagagaactgaaaaaattttgcttacgcttacattttctattcatgaactatctcctttttgtgcataaaaatcaatattttatgaaataatctccttggaggttaagtgctacagcaccactccttcctagtcaaagaaactctgcacattgctcaaccctggctgagcaagggaaaaggcctctaaataaagctttcctactttgctaggaaaagtcarcttcgaatcactggaccataaaatcttattggagttacagagtgagataggttaatcagcatgtggtacatctatctactgaagccaagttttttttttcaggatttgtccaaaagatgttaccactctttgtacaacaaaatgatattaggatagggcccactctctgcatatgctggtgtggttgaaagaaccagtgtccttttcacacgtaagccatgctcagsctatcccctcatcttgcttacagcagctgctacttgtaccatctggtgcttcatttggcatttgtttttgttgggcccctttttttttttttgctttgagatggggcctcactctattgcccaggctggagtgcagtggtgccatcttggctcactgcaaccccaatctcccagactcaagcaatcttcctgcttcagcttcctatgtagttgggactacaggagagtgccaccattcccccgctgttttttttgtatcttttgtagagagggggtgtattagtccattttcacactgctataaagaactgctggacacatatacaccatggaatactatgcagccataaaaaaggattagttcatgtcctttgcagggacatggatgaagctggaaaccatcattctcagcaaactaacacaggaacagaaaaccaaacaccacatgctctcactcgtaagggggagttgaacaatgagaacacatggacacagggaggggaacatcacacaccagggcctgtcaaggggtggggagcaaggggagggagagcattaggacaaatacctaatgtagatgatgggttgatgggtgcagcaaaccaccatagcacatgtatacctattaataaaacctgcacgttctgcacatgtatcccagagcttaaagtatattaaaaaaaaaaaagaaaaaaaaaaagaagaactgcctgagactgggtggaaagaggtttaatcgactcacagttgagcacggctaggaagacttcaggaaacttacaatcgtggtggacggtgaaggggaagcaaggcaccttctttacaaggcggcaggagagggaatgaatgcaggaggaactaccaaacacttataaaaccaccatcaggtgcctgtaatcccagctacttgggaggctgaggcaggagaatcatttgaacccaggaggcagaggttgcagtgaaccaagatcgtgccattgcactccagcctgggtgacaagagcaagactctgtctcaaaaataaaataaaataaaaaaaaataataataataatttggtgaaattcttcaacagacttggctaactgaaactggtatatgaagttaccaatatttatgtctgtgtataaccatctgcagtttatacacttgaaaagatatataaagatttggtcacattgtatttcaccacaggcccctcctaagatttatttcttaattggaaccttgcctgtggttatatatgcgttgtttttttatcacatagtagatatccaacaaataagtattaaacaaacaaatacattcttatttgtagaccagacagaacaaatcggcatagtaaaatggttacaaatatggctttgaagtctaacaggattgagtttaaatccgaactctgctaactattaaaataatagaagtttcttaatctctctaagctcagactccatgtataaaatggcaaaaataagaatagaaacctcagagagtaggtggaagaactggatgatcattgaaagcatctgatcatttaaagataaatgatcattcagcacagtgctttgacattgtatgttcctgataaatgacaggtgtaattttgttgtcatcaccattgttgttatttagaaatggcctttagggatgcacaaaatattgcagcaaaatgtctcagtattcttgttctttggtgtactcccaacccccactggtttttgtgacatcagatgtgaaccacagcaaaggaagagatgaaagaataaagtatctctcaagacagactcaaagatccttgacagtagggctctgtcctatgactctttagcccagttgttttgcacatggaggtagtcactaaatgtttttgataacaagaatattgaggttcttaattatgtaaaaaaattcaacatacttaaaagctactaaatggcaaactaataactttttgcaaaaggaaactaatactttgttgaaaattcttataaaacaagttgtatttcataagattgcacagaaacaaaatattaaactccattattaacataaaaaaaaamccatcaggtctcacgggaactcactcgctaccataagaacagcatggggaaatggcccctgtgattcaattacctccatctggtctctcccttgacaggtggggattacaattcaagatgagattgggkggggggacacaaagcctaaccatataatgggggtttcgtcatgttgcccaggctggtctggagcttctgagctcaagcgatctgtccgctttggcctcccaaagtgttgggattataggcatgagccactgtgctcagcctggcaattttttttaaaattggaaggcaatatgcaacattaaataacccacatctaacaacttttatttcttttttttgagacagggtcttgctctgatgcccaggctggaaggcagtagcatgatattggctcaatgcaaccaccaccttccaggttcaagtgattctcacgcctcagtctcctgagtagctgggattacaggcatgcaccaccatgtctggctcatttttctatttttagtagagatggggtttcaccatgttggccaggctggtctcaaactcctgacctcaagtgatgcgcctgcctcggcctcccaaagtgctgggtttataggcgcragccactacgcctggcccaaacacatattatataccacagacttgtgaattattcattatttctctaactctatgagattgtattttttattcccattttgcagatgataaatgaaggctgagagacattaagacagagaacagtgagactggttctgcctgcatatcatttcacctctgagtctgagattcttcatccaaacagagagatctgcaacctcaccagataacctaaaaaaaattaaaatcaaattgctataatcacagtgcctgcctcatagggctattgggacatgacgtctacgaggaacctgacagtgcttggcacacagcaagaccttgatatggggagacagcaagcctgccaccacgagccctagctccaccatcactaaatgacttgtcccaagacaaccagaaaggggcctctgccctctgtcgccaaagctcctctccataccacagagccttcctgtgagagagtctgtgtgtctttatttctcttgctgttatccacaagtgttctaatgatttagcagcacttggcactgttttgtctcagatcacaatcagcctgaggtccgtgctccattaggaatgtctgctcattcctaaccgcagtgttttccacacatccttctgatggcctttggctttacatcctgcagctacgcaggctccttggccaggaggagcccggaggggccgagcccgccttttaacaagtagcatgggtcattccccgctagaggctcaagagtcctcacagagcaggggccgcagcggctgtgcatccggtgctgaaccttctctctccagggaggcgggcgagaaagctgagaaggagcagtgatctcaaaaatggaatgggacctgcctgggaaggcagttgctgggcctaggacttaggtccgtagtctgtttgccagaactgaaacttcagttgtaagaaacttcagggagaagctggcctgtcagctcaccaaggaaggaacctctcgggatggtgggccccctgacctttgtccccaccctgagactgccatgtagctcggtgagtaacgcctgagttggggtggtagctcctacctctgagcctcttcccaccttcctcagatgtcggtggtccacagtggctggggacttgcttctatgaatgacatatgattgcctgtgtctatgccaccacttcccctgagaaagtgggctgtcacttcctcagggtcagcatcaccacgacatccagcactgcccttaactgcagaaacagaaggcgccgatacagtgtgacacaaaaagagatggagaggagatgggcaagctcacckttactcagccctgaccccacacccagccctatgctgtgctgaagttattattcataaatgtccacaagactccaaaggagtcttattcctgctcccagagaagggaatcaaagcttaaaaataaccttcccaaggtcatatagccaaatgtttagtgaagtcaaggttcaaagtcaaactctgaaagatgtgtgctcttccccccatagtagaatgccttccatagccccctaatctataccctcctgctgccctgtctcttttaaaattgaaattttaaaaaggcaaaccaggtgttatttcaaaattttatttaaagttgagaacaactgtttgaagagagctgtcagtggatttatgcactctggtgaacctaaattggaaaaagcaggcacttttacagcagcgcatcctcatgcggtcttaacaacctgacccagagcagggaactcggtgtgctgcagcgccagtgaccaggcaacccgtctcctgggctgttttctacgtacaggttttgactcagggctcccatcgccagcaaaatgtaaatatgaaatgtcttttttcaggtggggaatgaggtgcagtgatcttgagccatttaccttctttcatggccaaccacaaccaactgggaccatcagagggatgggatgaaggagatttgtaccattcagaagggataactgaaggggttcccagcccagggcccttcccttttgaggaacagaaagatcactactgtggtggggggagggtgagatcatattaacccataaaaggactaccgtattgcgctcccttgcttttgactgagtttacacaaacttgtgaggtcacgtttgttgcctctggttgaccagacgcccgcatatgcagttatatacatatttgcttaattttctaaaaagagaaacaatgagttagttgtgtatgctgtgtgtttggaagataacatytcaaggcatgacatccatagagaacagctgataagttaaaamcggagaactactgggatgtggaagctgcgaaagaatcaggggaaacatcctcaactgaagtttgcataagattgaattttggggccgggcgcggtggctcactcctgtaatcccagcactttgggagaccgaggtgggctgatcacgaggtcaggagatcgagaccatcctggctaacacggtgaaaccccgtctctactaaaaacacaaaaaaattagccaggcgtggtggcgggcgcctctagtcccagctccttggtaggctgaggcaggagaatggtgtgaacccgggaggcggagcttgcagtgagccgagatcgcgccactgcactccagcctgggcgacagggcgagactgcgtctcaaaaaaaaaaaaaaaaaaaaaaaaaaaaagattgawttttggatgtcttgggtagtcagaaagaatcacatcctttataattcggtatttctggatggtgaaatgaagaaagcagtaaagacatcctaaatgatggaaaaggcaatggtgtctgtgagtttctttacccacatctccatcacaatgtgaccctgcacagtctctctgcgtgccccctttagggacattacctgctcagagaggtttcacatctgccaaggccactcattctgaaagggagaaataatgtgtattggaacaaactttatcattgacttatgctgggtcacggatgtcctatgaaccaaggacaactaatgaggcaagaagtaactgagctatcaccaaaaagctgtttgcaaagttatctgaacattcttcctacatttaaggccctgtccacattttgccacattttaaagtttctttatagttgtttgaaacatgaccatttcaaactatgattttgaaatgaagttccatgaaatcccttaggcatacgaggcactgctgggtgatgaacgcaaacttgattcacttgtattggctcctccagatgctgagtcattatgatgccagatttcagtgagaaaaagcacatagagaatattggacacgatttctatcgttgtgaacaaaggtgaatagatagatggcccatttcagccaggcggattcagggatgctgaaacagcagccatacagctaacagatttctatgcaaaaaaatatgccactatccaatctgtctcccacacacatcttctctctctgcttttcctcaacattctatccaggaccacgtttctaagcatattatttccctgccaccatctaaccaaactctaggccagacttccaattggatttgcagaatgtgcataacatttccaaatggatggtggcaataaagaaatgatgtcttcagtctgatgaaaaaaattcaaattcaacaatgacacccattatttcacatactgaattaccaaagatttaaaaataataacaaataaaagcaataataagacaataatatataatacacaatacagttgagcatccctcatctgaaaacccaaaatccaaaattttctaaaatttctaaaacacctgacttcttgtgatgggtcacaaaaattactaagaatgttgcataaaattaccttcaggctacctgtatagagtgtatatgaaacatcaatgaatttcatgtttagatttgggtcccatgcccacgatatctcattatgtatatgcaaataytccaaaatcctaaaatatctgaagtctgaaacatgtctggtcctgagcattttgtgtaaagaatactcaacttgtgcaggtaaaagtgtgtaggggaaaaggaactcatacatgtactgctgggaatgtaagtcagtgcaacatgataacaattatccacatggataccctttgaccaatactagttcccctgtaggaatttatcttacagatctgctcactgaagtgtgcaaatatataggtaaaagtatttttgtagctctgctaacaatagtgaaaattctgtcaataagggaatggtgaaataaattacatctacaaagtagaatattatgcagttcttaaaaaagacatagtatatataaatctctgttgtggaaagactttttttatatgcttcatgatcttattggtgcaacaagaacacaaatgcaagctgggcatggtggctcatgcctgtaatcctagcactttgggaggtggaggcaggcagattgcttgagcccaggagttcaagaccagcctggccaacataacgaaatcctgtctctacaaaaaatacaaaaattagctgggtgtggtggcacatgtttgtagtcccagctactcagaaggctgaggtgagaaggtcacctgaggccagaaggtcgaggctgcagtgagctgatattgtgccactgcactccagaccgggcaagagtgagaccctgtctcaaaagacaaataaaaaacaagtgcacacacacatttgcatatgcacagaagctgtgaagaccatacactgaaccactgccatctttgggtagtgggactgaaaggcatggtgaaattgatgactttaaggttttactttactaactgcagatttgtttttcatgtttaggatgagcttaaattgctactataattttaaaaattaaaatgaatgatggcatcccctgtgacaggtgccccgagcctgctgattaaagctaatgaaagaaaagagaacaaggcctcaactgaaataatgaatctatcaagaataaaaaaagagggtatgtattcacacagaaaccctaggcacagtggctattcattgctacaggaatatttaaagatgtagcgcacccacgctggaagtggaactctcataacaaccactaactactcggaactgctatgctaggtaacatatacgtgtgtgtgtgtgtgtgtgtgtgtgtgtgtgtgtgtgtktktkttttcagcgaaatttttttcctgaatatgaaagtcacacatgctcattgtaaaatattttacagctggtgcggtggctcacgcctgtaatcccagcactttgggaggccgaggtgggcggatcacctgaggtcaggagttcaagaccagcttgaccaacatggtgaaactctactactaaaaatacaaaaattagctgggcgtggtggtgggcacctgtaatcccaactactcgggaggctgaagcaggagaatggcttgaacccaggaggtgtaggttgcagtgagccgagatctcaccattgcactccagcctgggcaatagggcaagactgtctcaaaataaataaataaataataaataaaataaataataaataaaacattttacaaaacagaaatctaaagtccttcataattctacttcccaaagatagccacgtttatggtattatagatttctttatgcatgtccataatctatgtatttttaaaaaatcaggccaggcgcagtggctcacacctgtaatcccagcactttgggaggccgaggcgagcagatcacaaggtaaggagttcgacaccagcctgatcaacatggtgaaacccgtctctactaaaagtacaaaaattagccggcatggtggtgtgcacctgtaatcccagctactcaggaggctgaggcaggagaatcgcttgaacccgggaggcggaggttgccgtgagctgagatctcaccactgtactccagcctgggcgacagagcaagactctgtctcaaaaaaaaaaaaaaaaaatggggtcaggattttgcaacttgttttttttccactaagcagtgacgcagatatctttccatataagtagacctaggtatacttcattcttttaaatagctccatagtattccattatattgctatgtcataattaaaaataaatcaatcctttattttttatatatgttttttgagacggagtctcactctgtcgcccagggtggagtgcagtggcgcaatctcagctcactgcaacctctgcctgccagattcaagtgattctcctgcctcaacctcctgagtagctgggactacaggcatgcaccatcatgcccagctaatttttatgtttttagtagagatggggtttcgccatgttagctaggctggtctcaaactcctgacctcaagtgatccacctgcctcggctgggattacaggggtgagccaccatgcctgccccttattagctttttaatctccttccagatgtttggttttataagactgcaatcaaccatccatgcatgtgaatctgtgcacatgagtacttccacagatgagctcctagaagtagaatacagcttgattggaggtgacatatattctttaaatcctcattacaaccctatgaaataggtgttatttcccccacttttacaaaagaggcaatagagtatcacaatagcttcataacttcacctgtaaagtaaggggctgaactaagcttcacacccaggtccagctgagcccaaaacacgtattttttccaccatgagacccagattcacatgcagcaggggagacagaaggattcagcagcagtgggcagtggggccaagcaaagggccctggagccaatgtaccatgcagggaggcactgggattggagcctggggacatttgtgaaaccacagcccagagacttcacagtctggtgctgttctccaatgtggctcagttagggcttctggagttctcatctataacagaaccataacgcttcctctatatcagtgtctttcaaactttgttttttgttgtttttgagacagagtctcactctgtcacccaggccagagtgcagaggtgtgatcttgggtcattgcaaccttcacctcctgggttcaagtgattctcctgccttagcctcccaagtagctgggattacaggtgtgtgccaccaggcctggctaacttttgtatttttagtggagacgggatttcaccatgttagccaggctgatctcaaactcctgacctcgagtgatccaccggcctcggcctcctgaagttctaggattacaggtgtgagccactgtgcccggcccaaattttggattacatgactctcagtaagaccaatatttgccttgtgacacaggtatacacatgtataaaactaaaacagaagtgtcataaaataataattctattagctaattgcaatgtattgtaaatttttcccttacataatttaaaaaaaaatccccaatttgaaaattctgtagtaaatcctggtaaagactatctttttttttttttttaagatggagtttcgctcttgttgcccgggctggagtgcaatggtgtgatctcggctcaccgcaacctccgcctcccaggttcaagcaattctcctgccttagcctcccaagtagctgggattacaggcatgcaccaccacacccggctaattttgtatttttagtggagacagggtttctccatgttggtaaggctggtcttgaactcccaacctcaggtgatctgcctgcctcccaaagtgctgggattatatgcgtgagccaccgcgcctggccctaagactatctttatctccctaggttggtgaacatgtgaaaaagatgaccgtccaaattcctcattctgattcaagttccttcctgagctggtcccatttcccctgctcactcagccagttcagtcacactccacggcccaggccaaactcagtctcgtctctcactttagcctcccatggctcccttctttgggcgaaagctctgctctacaaaaatggatgcgagcacaatataatacccttcacgttggacttgtatagcttgatcattaaaatggtcatttttttttccccacacatatttaaggagagccttgtcaactttccaaggactgcccttaaatttttaaatattcttgtcattctttttggaagcacctattatgttatcatccttatcttactctttttttctatgttgttaattagtttaactctagcctatggttcaagctgcttttttttttttttttttttgacaccatctttgctcattgcaacctccgcctccaggttcaaactattctcctgcctcagcctcccgagcagctgggattatgggcatgtgccaccacatcagttaacttttgtacttttagtagagatggggtttcaccatgttggctaggctggtcttgaactcctggcctcaggtgatctgcccgccctggcctcccaaagtgctaggattacaggtttgagccaccatgcccagccagttcaagctgttttctaacatcactttcagaggctccgtgacattttccaccttctagattagcattttcactgtgctatccatttgctgtgctttaatgtatacagcactggagagactgttcaatgacttacagatgctaagaggcaagagatgcttgaatgaggactaatttcacaagtcggtattagattatttgttaatcttttctgcagggactctcataatgaatctttggataaggagggtcctctgtacaaccttccccactcagcctttctctttctgccctatcacagaattgtagcctctgtcttgacaagccagccagcagcacttgatggagttcatccgaagctgtgctttgccagtactttgaaaaggagggaacttcagtgtttgcttagttcattctcaagtttcttgccaagatttggaaacaacaaaaatagttttcatgagaatgattgagaacttctgaaattcaatattttggggaaaaaactgtgtttgcatatgtatgtattgctactttctctaagctggaaagatgattgatactagtaactcacaaaaaaggtgaacatcttttcctccatgcttctctttaccatttgaaattctggaagtttctaggattaattgcttcagcaggaaaactgcaaagataccatgcttattgtatcttaccattccacttatttgaattaatgtgcacttttaaaaaacctgcagggcacagggactcacgcctgtaatcccagcactttgggaagctgaggagggcagatcacctaaggtcaggagttcgaaaccagcctggccaacatggcgaaaccacatctctactaaaaatacaaaaattagccaggcgtggtgccacatgcctgttatcccagctacttgggaggctgaggcaggagaatcacttgaacccaggaggcagaggttgcagggagttgagattgtgccactgcactccagcctggtgacaagagcaaaactctgtctcaaaacaaaaactgaaacaaaaataaacctattttctgctcacgattaagacaggaatataggcaaaagctaagcaacacactcaagtaatctaagtccatttttgtaattattaccaataacgtaattcagaaaatggaagcatattttaaatttgattttcttaccgtgtacactacagaactagataaaaaattaaagtgtacttaaaggtttccttcagaagggatagaaaaatgttttattttctcaaattaaatagaagttactgcaataaacaattctgtgttgcagattaaccaattatttttctcctcatagtgtttttaaaattatcaaaacaacatatatgcatagtatataaaacataatattgacttcctatcatagggtattaggattcagactttttttttaacttttgcttcacaatgcaatgtactttcccccttctcctctcctaatttcccaatatgtatatttttaaaaactaattttgtttttgaactggagtgcagtggtgcgatctcggctcactgcaagctctgtctcctgggttcaagtgattctcctgcttcagccttgagagtagctgggactataggcacatgccaccacacccggctaatttttgtatttttagtggagacaggctttcaccatgttggccaggctggtctcgaactcctgacctcaggtgatctgcccacctcagcctcccaaagtgctgggattacaggcgtgagccaccatgcccggcctaaaaattaaattaacattcatattattcaacaactgtgtaaatattgttcactgtagtggaccctcattgcatttcctttcttgacatctttttgttttccggtagctagtaattatcttttttgtttccatttgcttagctttctaggttcctatcgctatttgtcaccatactctccaacagaactttaaaactcctctcgtaccacttgggctactgacttcttggcagcatcctcgatcctgctccacagggcctggattcatctccaagcccgcagctctacagctgcttccaaccatcattttggaaattctcttcccttcttctccgttccatgggtcctctgtcttccctgttcgtatatttgtgatgtcttctagaaacttcctgagaaaggatgcacaggcagaaaattttttgagactatgttttatgaaatgtctttattttaccttctcagttgattgacagtttggacataatttccccttagaatgttacaggcatttctccttttttgtttagttcccagtaatacttttaagaagtcttaagttattctgtcttgatccttttatctccccaccgtcacccagccacaaccaaagctttttgcatctcctctctatccccataaatttcactatggtgtgttttgatatggaacttagaaaaacgttgtttttactgaagtataacatacagaagagcacaaatcattttacaaaatgaacaaacattttgtgtaactaatacctagattaagaaacagtgctaccaagagccactacctgctcctcgtgagaactgctattgtaatttccagtaccatagatcagattgcctgtttttgaatttttatagaaatgaaatcattgtaaaatgtgtattttttaaaaaaaatgtactcttttgctcctggtctctttcattcaccattaattttgtctgattcacccacgtcgctgcatgtggtggcaattcattcattcttgttcmtmtatatatatatatatatwtatatatatatatatatatatataaaattgatgtatccaatgttaatgaggatggacttgtgactatttccattctggggatactagagatagggctgtcataaatgtttctgtacacgccctctgttgaacagatgtagttctgttggacggcataagacatttttcattttcaatctgaattcttccttcagtttggtgaaaattgctggaattaattctttcgtgatttctcccttcttctcttttttaaaatttattttttaacacaacatcaagtttcctttatcatctataatacagttatacccaaactttctaagaccaaacagacagtcccctgcccagagcaggaaattccaatgagcccctaaagacacacaaaggtgaatgtggaagatcatagttccagctgcaggtcacaagtcttccattcaaacactccatgcttttcatttctgtttgttaaagaaagcgtcttacaggacgttgttgaaaataatttcatcccagacaccgggtttcttcaataatacacagctccatgaaatctgtgtttccatccgactgacaggaatacaaagtaatttttattgttttattttaattttttggtggtatagagaagtaaaactatcagtcagattcctttagtaataaagaaaaggaggggaaagaaagcatttgggctttgctggatgctggtttctacttgtctgagggtatgacttcaatagttaaatcaccctgacaccactgcagtaactagtactagcaattctttctttctttctttctttctttctttctttctttctttctttctttctttctttcctttctttctttcctttctttctttcctttctttctttctttctttttctttcttctttttctttctttctttctttttctttcttctttttctttctttctctttctctctctctttctttttctttcttcctttctttctttctttctttcctttctttctttctttctttcctttctttctttctttctttttctttctttcttctttttctttctttttctttctttcttctttttctttctttctctttctctctctctttccttctttctttttctttcttcctttctctctctctccccctttctttcttttttctttttttcgaagatgatacaaagaaaaacacccccatggacataaaaatggcccaaaggtgttttgttttgttttgttttttgagatggagtctcgctctgtcacccaggctggagtgcaacggcacgatctcggctcactgcaacctccacctcccgggttcaagagattctcctgcctcagcctccctagtagctgggattacaggtgcctgccaccatgcccagctaatttttgtatttttagtagagatgcggtttcaccatgttggcctggatggtctccaattcctgaccttaagtgatccgcccgcctcagcctcccaaagtgctgggattacaggcgtaagccactgcgcccagccagcccagaagttttttactgaagatcaattctccccctgcccgcckccgctgaaaaggtacaaaatgaacattttgttttgagatggcagctccatcaggcattccaattcacccagccacttattctcacagaggtgaggggaacaggcattaggttttattagtcatgttgtatttgtaaccagatgtggcctcggcagcttatttgaaggccattgatcctttgaacacgtgtagagaagcatggctgtccttcactgactgtccatatctgagcatattcagctaccatggaaactacgaaggaaggaaaaatatatttactccaaaattcatttactgggagttttaagtgccctttcttccacagagccccagagtagtgctaatgtgctgggggcagctgtattttccagcatgagctcccatcctctgagggtcctgaaaaggattggtcctggagtcttcatgaaaggaatgaggtggaacatgtgtagccccaaacctgatagtacggggagtggtgggggtggcagggcaatgttcaccacagtggtggaggatcacttaggggtaggctgaagtagctgctgcaacaggaggaagagctcatggcagtcctggaaaaggctctaacttgatcccagagtatgtggttccgtccttctttttcttttcctctggctgcttgagatcttcttgatttcacgttgagtctgtggcgattgcaatcaacttattaaaggacttctcagcagccatgtctgtagcctgccttgtggaaaactgggtgaaagcaccctgctgcttctgcattagagtgatggtcaatctctcctaactggtagaaatgatttctctgatctgtttcacccagaccatccacgtctaatgtggtgagagtcttgtcctctggtgggtccagatgaggcatggttgaagtctgctttagaagcttatcagctatagggtcattgattccataatatgagtcttcaacattttgatcagcaaggggatcatccagatctgtaggcttcttctgtctgtagggacgctcctcttttctctgacactctcctttcacctagcaggagcaaatgtgaggctgattcctttgatagtagggtatggtccaggccagtttgagcagcacgacactgggggatgtgtctttccccagcatgctaattagacgtgttccatcagagttacagatctctctccatattctgtgtgtagaaccctcggttgacatctgactttggcacattactttcaaaagacaatgctgtgtcatgaacctggatgtgctggccacactctacgtctaagaggcaggtctgacattctccaatttactgcaaatttggcacactttagtcttttttttttttttttttgagatggagttttcgctcttgttgcccaagctggagtgcaatggcgcgatcttggctcatcacaacctctgcctcccgggttcaagcagttctcctgcctcagcctcctgagtagctgggattacaggcacctgccaccacgcccggctaattttgtatttttagtagagacagggtttctccatgttggtcaggctggtctcgaactcccgacctcaggtgatccgcctgcctcagcctcccaaagtgctgggattacaggcgtgagccactgtgcctggcctagtcttctttaaaaaagcatgtggaccccagggcaccagtgaaacactgggaatggcctggcacagagactgcattccttcttgtatgtttttttctcttttgggtgtgtgtgtgtgtgtgtttcttttatttcttgatacaaacacataaatggatcaaaaaatatgttcatctagaaaactggacgtcatccaaaaatgaaaaacaagtttcaatgaatttagatttcctagcattttactcctaaccctaagggttaaatttattgtccacttacatgcccatgtttctgacccaagctaaggggctggaaaacraaactcagagctagtgtgtggtggcacatgcctgtaatcccagttacttgggaggctgaggcaggaggatcacttgagcccaggagttcaaatccaacatgggcaacgtagcgagactccatctctaaaattaaaaatcagaacaatctcatgtaaatatgggaagtcttagcattgataaaacctaagatttcctggaagtaagtgggaagcctctaatcctacctggatagtgcttttctgggggatttttcagcacaagtctaaatctcacaaagcaccttcaaaaactgggctacgcagtatcacaggcatggcagtaggtccaaaggctggattcaggggccatgtaaataacaggaaaagcaaatcaaggaccagatgctgagatttccccttgagttccacatttgggagaacaaggagttgacccctaagtagtcttctgcttcttggtaaatggttgctcagctacatcttgtgcttcagctaccttttgtttgaagaactttgtgttctgggtactctcttggccccgtgttgggtagaaggaagtggtatctcaatgcccaccatgggtgtatttggtataaccagagtgcccaaagttcttgcatgactttaggaagcatggctttgttgaaatgatcctccagggtgggggcactgaaatctcttttgtatatttctcatatttgccctgaatggctttgctggtaatgaccttgccatatgcctgaagctcagcttgctgctcttcctcagccagcttccgcaggtgctcaatttctgcttcctccttctcaagctcttcttcctcgtctctgctcccttgtttgttttagcttctgaactttccatgcctcctgctcctcctgactctcctcttggtgttgagcgcatccagagtagtgcggccccgcctgctctccgcaggctcttccatggtctcctacagtctggagggggcaccatgcctcctcagggtgccttttgcctcctgctccagctccttctggttcaatgcttcagcctcaggttctcgaactgtcactcagcccttcttccttcccagtgagggcctgcatcaggcgaggctccgtctcatcctcactgtctgtggactctccatactcagatctgctctgagctccccagggcgcccctcctcaccgcctcccctgccacccctgtgcctcccacactcctgtctcctctcctgtactccctgacacagggtgctgcactgccaccccatctcctcatcctcggtttcttcctcttcttcttcactgacatccgctcattccgggcgctaggcacctgcttctcttctgaagctgcctgcttctatcactccaggctccactgttttccaatgccggccaatctctcttcctctcgtcactcacctggtcctgaaaatgccacagcctggctggctggctgagccctcctcctgttcctcaggctctgcttcctgttccttggatttcccaatgaatgaaaattcctcatccgcctcatcagaggactccacaggggcacagtctggccttcttctggacacacaacgttggaccttggaccttcactttctctgtggaagtctcccatttctcactgtgatgcaggacggccccagtgcagagtcaatgagcgactgcttcatgagtgcccttgggactgacaagttgatgggtggcgactcccaaaactgaaagattccaaactgaacacctacaatgtcaatggacagaaaaattcctttccgccaaggtgcacrgggcactgctacatagctgatcccttcccgtgcttgactttaatcattcagctatgtgggttttctccaaagcacatttggcacagatgggaagtccacacacatcctccaggctctgcctgttccaggtttttttttttttttttttttttttaagacagaggctcactctgttgcccaggctagagtgcagtggcgcgatctcagctcactgcaacctccgcctcccaggttcaagcgattttcatgcctcagcctccagagtagctgggattacaggtgtgcaccaccacgcctggctaatttttgtatttttagtagagatagggtttcaccatgttggccaggctggtctcaaactcccaacctcagttgatctgcccatctcagcctcccaaagtgctgggatggacaggtgtgagccactgcacccggcctgttccaggtgttaaaacccagagaggtcaccatcttgagagcgtctgaggtgggaagtgggactctccgagtcctggtgtcttcccctgtaaaggaggagaacttacatgtcacccacctgatcaaatcaggcccatccaggagagtactcctgttgattaatttaaggacttggaacttcacatcaaccaaatcccttcagggcagcacctgaactagctttgtttggataccagggagagggtgtgtctgatttcaactagggcagggatgctaaaagattctgggccctgaagccccaactgcaaaataagtctgtcaaggtctctaaaaatgtacacccatgatttctgatttatttccctaccttattgagagtttacagtcaaacaggaatgcccaaaactccagcctctataaaacgaactgaaattagcagtttttccttcaatctggaatcaaaataattcaggcataaagggtctttcccatggacaacagcaatagcatccttaaagcaactctgcttatattgtccttggtattgagatcaaacctccattcagagctttactggtctgagattttctttctggggatgggcatctggaatggttgcactcaactctcagctagatgtgtctgcacccacacctgcaggtgactgccatgtgggcaggttacccaccctggcaggtcctagcgatgtctctctgcctgggattgaacatgcaagtcagaggttctgaaccaaccactcctcacctcagaatgtccacttctgccccaaaagtgagatagtgggagccttccagtgatccactggccttcatctctgtttcctagccacagttcctcaagccctaggaacggccagaccaataagggtatcttgctttgctaatgagatgactaatggctggggacccctaagtagcttcaggatggaggctggcaccagaaagaacaaggcaagattggagagttagaatttcagtctcactcccccaacctccggggagggaagaggggcggaaggttgagttgatcagcaataggcaatgatgtagtccatcatgcctatgtaatgacgcttccataaaaccctcaaaggactgggttcgcagagcttccagacagctgaaaacgtggaggttcctggaacgtggtgcccctgaaaagggcatggaagctctgcacccttcccccacacctggccctatgcatctttcccatctgttcctctgtatccactataataaataggtcaacataagtaaaatgttttcctgagctctgtaagctgctctgtcaaatcaatcgaacctgaggagaaggaggtgggaacgcctgatttgtagctggtgggtcagaagaataggtaatcacttaaagatttacctccatttttattcctgagctttctctgcaactgcagggcccaatccaggacaggcagagaactggcgcttactgtgctctgttggaattcaggtaagtcaggaggcgcctcgatgtagaaacgtgttcctctgcactcctggcctccaatcttttatatagcctctgatcttgttttaggttgcaatatcttctctcttaaaaaaactattttttttcttatgttccctgtcatgtcttgtttcagttctttttcttctgtttgcattgatttccatttcagctgggcagctttccccacatgcatggtgatccttggctacctagtcggatttgagagcgaggcatttaaaatgctgatggatgtgaggctgaggatggaggattgcttgagccaggagttcaaggtcagcctgggcaatacagtgagaccctatctcaaaacaaaacgacaataacaaatgctaactctgtgtgagggtgttgtcactgggtgatgaattagagtgccggctgctctattgagaataactgaatattattattattaatatattaataatattaatattattctgttattcatataaatctggcagcatagttttgtcagaaaggaatcctccaacctgggccccatgtaatagaagaggttgacagatctcagcagtcacttgaagaattctactcacttcctgtttttctgcaaaagaatccatcccattctcagcagtgcccagtattcctgagtctagagcttcgctgtccaatatgtcagccactagccatatgtggctatttaaatcaaaattaaaactaaacttcatttcctcagtcacactggccatatttcatgtatttttgtttgtttgtgggtttttcttgagacaaggtcttactctgtatcccaggctggagtgcagtggtgcaatcatggatcactgtagcctcaacctcctgggctcaagagatcctcctgcctcagcttcaacttcctgagtagctaggactgcaagtgtgtgccaccatgcccagcaaatttttgtgttttttatagaaacgggttttcaacatgttgcccaagctggtcttgaactcctgggctcaagcgaaccacccacctcggcctcccaaagtgttgggatgacaggtatgagccaccacgtgcagccacactggctacatttcaggtggctattgagccactagttgttggacaatgcagatataaagcacttccatcatcacggaaagttctatggcacactgctggagactaaacctcacgttttgtttgtttgttttgagacagagtcttgctctgttgccaggctggagttcagtagcgtgatctcagcccactgtaatctctgcctcccgggttcaagcaattcccctgcctcagcctcccgagtagctgggactacaggtgtgcatcgccacgcctggctaattttttgtattttagtagagacggggtttcaccatgttggccaggatggtgttggtctcctgacctcgtgatctgcctgccttggcctcccaaaatgctgggattacaggcgtgagccactgagcccggccaacctcacgttttatacttggggagaagtggtttcctaactacactgttgaggagggaatctggaagtgtgattttcctctttttttagagactgggtcttgctctgttgtccaagctatagttcagtggaacaattaaagctcactgctgccttaacctactgggctcaagtggtgctcccagttcagccttctgagtaactggaactacaggcgggtgccaccatgcccagctaatttttgtatttcttcttagagatggggtcttgctatgttgtccagacttgtcttgaactcctggcctcaactgatcctcctacctcagcctttcaaagtgctgggattacaggcataagccaccatgcccagtccagtttaattattctttatacaatatttcattaattattgaattttcaatcctaccgtgaatccacctttaggggtacctgaaggctcccctttcttgaaacttgactcttaactaaccccctacaacacacacatttgtaggtgtaggtttcatgctgttaattaccactggtccatgtgtctcccatctttcaaaacattctttatccctatcctactccttcagcattactgatgggttttcagcaaggagcagagataatgtgtgtggcccatgccaagcctgaagtcctcctgagatgttattcacataactcatgacaaaggcaatggggaaaaagtgttctgctgcttagctttgtcaggttttgtccaaggtttgcttarttacagttttaagaaaattttatcatctctgatttctttatattccattgttttattcttttcccaaatattatttgagaacttactacaggtaaggcactgctccagttttaagttttctcactttaccctcccatttcataaaaaatattgttgctaaacattttcagtgaaagtttaataattatgtatgttggcaaaacctcatgaacaaaacacagggcaagcttattttcaactgactcaagattggtttcctctacccacagccttaagccgagtcaagagctgagcccattccatagatgctaaacctcagccaaccttaacctgtgaatatgagaacagatacgtgttgatacaaaccactgagtttggggtggtttgctatagagcattatgttgtctgtctaacaccatgggaaaagagtccttacaaacaggactttagattttttttttttttaatacaaagatatggctaggcacagtggctcactttgggaggccaaggctggtggatcacttgaagtcaggagtttgagaccagcctggccaatgtggtgaaaccccgtctctactaaaaatacaaaaatcagccaggcgtggtggcacacacttgtgatcccagctgcttgggaggctgaagcagggaggattgcttgaacccgggaggcagaggctgcagtgagccaagattgtgccactggagtccagcctgagcaacagagtgagtgagactctgtctcaaaaaaagatatgggttagtcaatatgtttaggagaaaataaaagttatcattctacaacataaaatgctattttattgcttgttgcattttatctaatggtgtttttctaagaaaatttgcaataggaataccactgtttcaggttttaaaatgatcataagcacctgatagagtttggctgtgtcctcacccaaatctcatcttgaattgtagttcccataatccccacgtgttgtgggagggaccagtgggaggtaattgaatcatgggggtggttaccctcatgctgttcttgtgatactgagtgaattctcatgagatctgacggttttataaggggctttcctgcttttgctcggcacttctccttcctgtcgccatgtaaagaaagacctttttggttccccttccaccacgattgtaagtttcctgaggcctccccagccatgctgaactgtgagtcaattaaacttctttcctttataaattacccagtcttgggtatatctttattaacagcacgagaatggactaatacagcacctgactaggaaactaatattttcctttcatttgaaaaggatatttcattagcgaacagtgtctattacacaagttacatcaagatctgtgtgcctctttccaaaagataaattacaagcattgttacaaaataaaagagtatgcggtttgcaaaattcttatgatgggagcccttctctgcccagaattatgcttgcttgcctcttaatgcttccactaattatgatgagatgtcactcagaacctacagtttctgccttgggggacgtataagaatgtcagaacacctctccatggtatcaggtgcctgcagagctttgctgtgggttatggaccaactcctcagtatctgttcctaagaccaaatgaaccacgctatcttggaagtgctggtcttggacagtaaaggacattgtgcagacagctggaagcggtccctattaacattgtccctgatagtgaataaagggacggtgtgagttcctttgggctgctttctttcttgatgtactgaaactttagtttcaatggaatcaaaagaatcagagacgctgggtgcaatggctcacacctgtaatctcaacactttgggaggccaagtaggaggaactcttgtgcccaggagttcaacaccagcctgggcaacagagtgagaccccatctctacaaaaaataagaaaaatagctggtcatgctagcatacacctgtggtcccagctactcaggtgctcgcttgggtccaggaggtcaagggtgcagtgagccgtaattgagccactgaactccagcctaggtgacagagtgagatrctgtctgaataaataaataaatamgaatgtctgaccagattggggcagcatctctgtatttgacagattctaaaacaacaacttagtaataaactctatcactcttacagtaatagtgatagtgttcagagtaataaacagattctcacgctgttgcccaggctgagagcagtacacaatcacagctcactgcagctcttgggctcaagtggtcctcctgcatcagcctcctgagtagcygggactacaggtgcaggccaccatgtctgagtaatttttgtactttttgtgtgtgtgtgtgtagggacagggcttcactatgttgcccgggctagtcttgaactcctggcctcaacagaccctcctgcttcggcctcccaaagtactgggattacgggcatgagccactgtgcctggcacaaacactaattgtttgttttttttttttgagatggagtcttgctccatctcagcctgcacgccaggctggaatgcagtggcatgatctcgactcactgcaacctccgcctctcgggttcaagcaattctcctgcctcagcttcccgagtagctgggattgtaggcgcccgccatcacgcctggctaatttttgtatttttagtagagacggggttttgccatgttggccaggctggtctsgaactcctgaccccaagtaatccgcctgcctcagcctcccaaagtgctggggttacaggcatgagccaccacacctggccacaaacactattttttaaagcatgtgatgttagattcttttataaattaatattcaaactcactagaaagactctggaatatgtgtatgtgtgtgtactagtttttaaaatcctatattttccttaacattaaattgaaactcattacaaaacaaaggttaatactagtgctgtcatgactatcaggagctatgacatccttttaggaagtcatgtatgttcatttgtccatttgttcattcatgtatgtaaaagttacagaacactgacattgtgctagggaccaatctaaacactgggaacacaaaggtgggtggctttcaaggggctatctaaagtccaaagaggaaagcagacaacgagaagctattaccagtgtgagcagtgctaacgactgaatggaatgagagtacatatcctccctgacatggtggggagggatgtcaaaggaaggctcttagacatagaatctaaatcgagtcctcgtgtttgtcgtayttccttaatgtagggattctctctgtrtaactacctatcattcatttgcctctttgctcagttcactacccaccagaggaactgctcccatgccgagggaccctcggatgacacactcgggccacctcctcttttgcctgtgtgtctgcaatatctaggtgagcttggctttggtaccatatctgttctgtcattcctgctccaaaacataagactcactcccaagaggaaatttttgcatttgaaaattcaagttgtatgaaatataaatgtttcctactttgtacgttctttaaattcatgtgtcatatattacatttactaagaagtagaaatacatgtactttctaaactgagaaaactagctggtggaagacaaaactgattctaaacacatctgatagattctaaaaagtgaaggtactttaagtggcactaccctggcacatgttcactttagattgccaggtaaaccagcccaacaggtgttaggagacagatgttcaccaaatgcttagccctcagggagaaaacattaaaatatacaacatatttcccccgagtatcagcaactgaagaaagcattttaccatctactatcatgatttctaaacacagtttaaaaaattttatcgaatacctactataatgcaagcagtactagttatggtgataaaagataaataaacccctgatgtataaactaagcaccttaattcattatttcatggttaaatacattctaaaactaatttttttcctccgcaagtcttccttctctttggggtttaaaaggctcatcactgaactgaaccaagtccatcttaggaactcactgagtataggggattgccaagtcctgttgactcttctgccctctgcagtttcaaagctgtcttcactttatcttggcaccattttccggtaggcctatagaacctgtaaccttaaataccataacataaaaactaaacttcttgccacagttttggccttttctaatccattctyattaaactgctgctaaagtgaccatttaaacacaaaagatgcatgaaattattcaatgtcacccaggcctctaggatgcagcccaacactctagcacagatcactcccttttcttgtctcatttttgttgcttctctatcatgagcatttatgtcccatggtgtcccactaaccactgcaatttatttacttttcttagagacagggtcttgctctgttgcccaggctggagtgcagtggtgcgatcatagttcattgcagcctcaaactcctgggcttaagcaatcctcccacgtcagcctcctgagtagctgggaccacagccatgtgccaccatgcctggctatttaatattgtattttctgtagagacggggtcttgctctgttgcccagactggtctcaaacgatcctcctgccttggcctccaaagtgctgggattccaggtgtgagccactgcacctggccaatcgctgcaattttaaaaatgccccaagcgtcctcaggtattggtgtccctctcacaagcccatcccagactgctcctccccaacccctgcccatggccctcaattaattttctcctctcctttttttatttcagaaaatttaaaaaagttgtaagattagtgcaataaacacacacatatcctttagttatattcaccagttattaacattttgctacatttgtgttcacttgcttttccccatccccaaatatttactttgctgaatcatttgagagtaagttgcagacattatgacactttactcttaaatttttcagcaagtatctcctaaaaataggacactctcttacataaccacaaggatcatacttaggaaatttaatattgaaatactaaaatttaatttgaatatagagttgatgctcatatttctcctcagttggctgacttctatttatctttcaagactaagctctaggaaaatgacctcccttctccccacaccccctctctgtccacacacagaatacactgggtatctctcttcgatacttttactacctttttgtatacttctattgaagcacttagcacacactatcatattgtctattttcttttctgtcgtatctgagactcagctagacccattttaattcttctatcacttcatatactacccagcattcgttggtgactgaatggataaatgaatgaatgaatgcatgatgagacattgaagattctcattccactctctcattgtaactggtcatgtgtctctaaacattctgagcaatatatcacgtgttctcaatttcacctcttatttcaaacactgctatggtacccaggtctctgtgggcttcttctaccttgtgcggatgcaacctcacagcacctgcttttggcctctgcccctagtttctggccccagggctacattggagctgtgacacaggagtcccatgggaaccacttggcactcagatatggacaatctggaaatgcaggacagttaaggcctgtaagcttgccctgaccactgagggacaggagctcatagaaaaaatgcttgtctcatttttagcccagggtggccaattctgagatgcatgttaaaaggttcctcagaagctcccacaggatcaagtagcagatattcataatggttgccaatttgaaagggacccttgggttggctttctctccttccggggggtcattcttctgtcttatcacagtctattccttggtgtcacattcccaaataaactccctacctacctccaagttgtttgtacaggctttgctttcgggagagcccagactaagacaatgtggtaacgtaaaagactggtggcttgggagccagacagacctgactttgaaaccaagtttgctcattcactagccatgaccttgggcacataatttaacttctctcagcctcactctcttcactttataatgaagataatactttataggagtatggtaatgacttcataggggtatggtaattagaaatttaccaaatatatatatgaatagaatatatacaacttccttgagtaatgattgactataataaaccacattgagtgtctgtccagcttaggagccaacctcactcttccatttctcttaagattcactatttgtcccagccatgcccaccatcattgagcgggagttcaaggagttggatgctcagcatcgctggcagctgccgtacttggaaattcgaaatgagtcycatgactatcttcatagagtggccaagtttccagaaaacagaaatcgaaatagatacagagatgtaagcccatatgatcacagtcgtgttaaactgcagaatactgagaatgattatattaatgccagcttagttgacatagaagaggcacgaaggagttacatcttaacaccgggtccacttcctaacatgtgctgccatttctggcttacggtttggcagcagaagaccaaagcagttgttgtgctgaaccgcattgtggagaaagaatcggttaaatgtgcgcagtactggccaacagatgaccaaaagatgctgtttaaagaaacgggattcaatgtgaagctctttcagaagatgtgaagtcatattacacagtacatctactacgattagaaaatatcaatagtggtgaaaccagaacaatatctcacttgcattatacgacctggccagattttggagtccctgaatcaccagcttcatttctcaatttcttgttgaaagtgagagaatctggctccttgaaccctgaccatgggcctgcagtgatccattgtagcgaaggcactgggtgcacgggcaccttctctctggtagacgcttgtcttgttttgatgggaaaaggagattatattaacattaaacaagtgttattgaacatgagaaaatactgaatgggtcttattcagaccccagatcaactgagattctcatacatggctataatagaaggagcaaaatgtataaaggtagattctagtatacagaaacggtggaaagaattttctaaggaaaacttagctcctgcttttgatcattcaccgaacaaaataatgactgaaaaatacaatgggaacagaattggtctagaagaagaaaaactgacaggtgaccgatgtacagtaaatgcaagatacaatggaagagaacagtgagaatgctctacggaaacatattctagaggacagaaaggccaccacagctcagaaggtgcagcagatgaaacagaggctaaatgagaacgaacaaaaaagaaaaaggccaagatagacacctaatattcatgacttgagaatattctggagctataaattttgaaccattgatgtgcaaaacaagacctgaagcccactccagaaactaaagtgaggcttgctaaccttctagattgcctcacagttgtttgtttacaaagtaaactttacatacagggtatgaggagcacccaccagcagaagactttgcagaaccttacattggatgtgtcgttgtggttttttttttttttttttttttttttgagacggagtctctgctctgttgcccaggctggagtacagtggcgcgatctcggctcactgcaagctccgcctcctgggttcacgccattctcctgcctcagcctccggagtagctgggaatacaggcgcccgccaccaagcctggctaattttttgtatttttagtagagatggggtttcaccgtgttctccaggatggtctcgatctcctgacctcgtgatccgcccgcctcggcctcccaaaatgctgggattacaggcgtgagccaccgcattggcctgttaagtgtttttaatgggtgtatgaaacgtagaaatatgtaaaagaaataaattaggagagattaatttgtgttgtactgccattcctactgtatttttatactttttggcagcattaaatatttttgttaaagagtcaaaaaaatttactacttgtcccatcagtttcctgggatgggttcatgtactcacaattttactagattttgtgactattagcaaccacaattctagctactgcattgactattacactaatatacagaataaacaatgcctataattatttttaaaaagaatcatcctaaatttacaaaaagacaaaccgcatttccataatatattgtctaaatttcaggaagaaattctcaacctttgaatgacagatttaagaaaactagtttagatatcaatatctcattggaatatgttgttttgtttatacctcaggttttcaaagctttgggacctcaaaagtagtccttatttaaaaactgctactcgtaaccatagtctccatcgtcaaaaaggaatgtataaggattattatgcttgaaatattaatctgtatgggtcttacaagatactccaggttgcttatatgcttagtgggaaatgagaattattcaaaagaaaaattctattttcccaatgggagaagtgtccaaaagtttcaaagatgtcagaaaaatcagcttttggaagctgctgccacaattgtcaataagcaggagataccagtatgtcttcaaagagagaattcattaaaacaagtcattgaggctgggcgtggtggctcacgcctgtaatcccaacactttgggaggccaagatgggcagatcacctgagactgggagttcgagaccagcctgaccaacacagtgaaaccttgtctctactaaaaacacaaaaattagccaggtgtggtggtgagcaactgtaatcccagctactcgagagctgaggcaggagaattgcttgagcccgagaggtggaggttgcagtgagccgagatcctgccactgcactctagcctgggcaacaagagagaaactctgtctcaaaaaagaaaacaaaacaagtcattgatagtataacgaagagatatctgcatcccatgtctactgcagcactattctcaatagccaagatatggagtcaacctaggtgtccaacaacagatgaatgaatgaagaaaatgtgatatatacacactatggagtattattcagccataaaaaagagtgaaatcccatcgttgatggaatatagatgaaactggaggacattattttaagtgaaaaaagccaggaacagaaagttaaacagtgcatgttctcactcatatgcgaaagctaaaaawagttgatctcatagaagtaaaaagtaggacagaggatactagaggctgggatgagagtgacagagagatttgttaaaagatacaaaattatagcgagataagagaaataagttctagtgttcgacagcactgtagaatgactacagttaataataatacaatatatagtttcaaatagctggaaggatattgcacattctcaacataaagaaatgataaacatatgagatggtggatgtgctaattaccctgatctgataactataaattatatgtatggaaatataattatgtgctctcaagaatatgtacaattggtatttgtcaatttaaaaaataaatttaaaaactgtatcattgaatccttaagatgctaaagttcatttacttatataacaaattaaaaaattatttcttatgctgtttttcaaaaatcatagcttttatgactttacataaatatatctaaaataataattgtatgatatgtttttgtagtctaataaaatttgcactgaattccaattttttaagggtatctttttccatgttttcatctttatttttatatgggaagttctaactgaaataagttgctcctcagttctaggagttaaccctaaaagtaatcaatgtgatcctcctcaacgcgagttccagagctaaaaagaatgcctagtctatgttcctttgcgtttttgttttattttatttaaatgtctgtctacctggtccccttgattagggagcaagcctccaagggtcaaaaccatgtttcatgtctctgcggcccagtgcctagcacagagctctgtccatatctgcactccaataaatgttgacctaagactcttacacttacagattcaccttgtagataaaagggctttggaagtcatctaacccattcccttaactctctatcctacttcaccaacaaccagcttttgcaagacacttccaggggaagagtctatgccgagacaaatgatttcattaaccatcacaaagctaattgttacctgattcttaaacttggtccaaccttgcctctttttagtctttgactgaatagctctagttctcacctaaagagttatatgaaatacagttccagaaagagaagcggatgttaagaagagagcgagacagggcacagaatagacttgaacctcatgtctatcaattcggtatgtgttcatgtggtttctgactctagaacagttatgccagtgtccctgaggttsctgtgcttggctccctccttttttcacatgtctggcatctcttgtgtatgcctgagaaggatccatgctaaaattgtaatgacatatatacctaaattagcagcatacaacttccaaaaaccgagcctatgcaagagctattaaaaaaaaaaggataatgaagagaacaggatttgagttgctgcttcttgtgtttcccttggagccttcccaggcaaatatggatcagaaagcttttcttgtcaattctaatttgtggtagtctagaaacttaacccttgctactttgatcgcctgatttcatctttcaatggaaaggtaaaaatgataaaataaaacaatattctagatacactgttctctgtaatttgatgcaattcagtttatattcacttggcaaaagtgaacagtgctgaattttaagaactagtgtctatatcttacatctcattcttagccaaaagtgtggagtttaaaaccatttgctcaccaagacctcagcagaaaattttttaaaaaaataactgaaatgaaaacataagtcatgtaaaaaaagattttttttttaagatgaaaaaatgttcaaccttgctggctttagagaaataggcattaaaatgtcygggcttttagcaataatcctagttgttagtgaaacaccaagtctgtctctaacagccatgggctatgaaaccttcctttttccaaaaagacattctgacagatagaatcaagccattcaagtgtcccccagatactgcaaatgttgatcctcaaaaccccaggagctttctttccttattcccctagagcaatagttttcaagtgtgatcctgaacttgttagaaatgcaaattcttgggccccaccccagacccactgaatcagaaactctgggagtagggccsagaaatgagtttttcacaagcctccaagggattctgatgcacggtaaaatttgaggaccaccaatgcagatggattataatcttcttgagggcaaggaccaaacttgttgaaggttaaccctggctcgtgactcayagtaggtgttcagaatgtgttgaatgaataaatgatctgtacacttttccagaaagctctgaatctatagttacttttaatttttaaaaatatcttttgaggacttctctagaaataggtgagtctgtttcttacattgccaaatgtacctggggtggggggtgcgggtggaggaaaaattgcccctgttgagaagcactgccttagatcattccttaccaaggtasgttaggcactggcctcactccaaggccagtgcttcctgtgcttctagagtggctagggaagcacactatgggacaacctttcctcaccattgacaatggtcatttacaagaccatggcttattttacagggtgaactcccaatcccggtaagatggcccgagtttcattgctggtttactagttttgcttccttgggcagtgaatttaaataacctgtcaaaagaatgaagtgatggaagccagactcaaaccaactgtgtactctgtccacacctcttcagcaatatggcatattgcaaagtagtgttcagagatgtgcgtgtagtaggctgcctgctctaacacatgagattaaatttagatagccacatagggaaatcagtttttaagaaagcggatggaattcagctgcaaatagatggacacctggaattctgggaagttctagctgctgctgctcaactaaggcataactgaactcaagatttacaaaaatgtatttcagcccaagtctctccataactactaacaagggactgaggagaagaatttatattaaaaggataaaaatatctacacttggaaacagcagattgtgaaagggtatgtgactgacaattattaaacaattaagagtatgactaagatgaatatgcattcattcaccaaaatctcatattcccaaaaagcaggaaaggtagtacagtgagatggatgatgccttcacatgactcagatgtcacgtgtttctcaccattgagacccccaaggcaccccctcccagcatttaccagaatgtgtgtgtaactatttacagtgatttgtgtaattatttgattgtttctcttgtatcctgtagcaatgagggtagagattatatcccacctaccactgcagctccaggatccagcttcacaaacatttgttgaatgaatgaataagaaaagaggayacccccaaagaggctgcaagggaaaaagctacaaagacagaagcaccaggaaaaagtagggtcatgtaagtcaaagcaggaaaaaagttccatggtggggtggtcagcagtgtctaatrccacgaaggcacaaagtaggataaaggttaaaaatcagcctttggttttggcaaatatgaagcttatcggtagccttagcgagaacaattccatcagggagcagaagctaactgcagtgggttgagtcatcaagcaggcataaggaagtagggataccccattataagctactctttcaagaagctcaaatctgaaggttaggagaattaggtcagtagctagaaggaaatgtggagtcgaggggctgtttttcctcccaaggagtataaaggtgtaacrttgcatgaaaccacttcagacaaaggccgatatcaatagagaagttaaaacgcacgcctcaagatttgggaaggcttggggttgggcttaaagaggtaggagcatatttcctatcctaggacagagaataaagaagaaaggataggttcccatggagataaatttctaagtgttaaagaagaggctcagaaaattctagcatgataggctcacttttttctttttccatgaaggagatggcaaagtcaactgacatgagaaaggtgacaatactgatgggttgaagagcgatggacatttgaaataacttcttagaccagtagaggctggagttcataaatcagaactggctacaggttatatatgtttttttttttttctccaacagcataagataacagagcgaagtctgtagaaatgaaagaagagtcagatgaggatagctggagctagtgcaaggagggaagcaccacggtgggagccaggtaccccctggatttataattcatactgaattccaacaacagaagggctctaagcaggagagtgacagatttcagaagactgagacacatttggtaaaaaaaagtaggaggaaaacctgattctggaattagggcagccaatagacggcagtattttcagaaaggagggaatggtcaacagtgactttctagtctggagctcaggaggaagaggcaactctacctgatggtattaagatcatggaggtagctgagatcacctagcytgtgtgtgtcaaatgagaaaagaagaaaraataggagaagttccccaggaacacagacattaagtggggctgtggtgacaacacaagaagagaggcttgcaaaggagcctgagcagctgtcatgagagaggtaggatggtggactcggagaagaggcagaagatgttcttaaaggaaggacactgctgccaastagtcagccaattggtgacaaagaaagaccctgttgcgagaaaaaaagtcagtgaagtagtaggaacgatgacagatgacactgggttgaagactgaggagagagaagtgtaagagtggaagcagagggcagaccactcttctgagacactgaagaggcatagttagaaataaaggggagtcgccagaaaggaatttgtggctaagcaagaggttttctttaagactgaaatacataagcatgatttaaatgctgctgggatggagttcacagacctggaagacagaagacaaagcggatcatcaagatagtggaatttactgaaatgagagaggaaaatcccatccacaggaaatgcagacatgagggaggggccagaaggacagtgaaaacatcagcaactggtcccccaacttctgagtgaatgtggagatataatcaggtaaaggactgcatcatctccctggttaatgatggagtcagagaaaagagtgtcttatacagaagttgtgatatacttggccgggcgcagtggctcacgcctgtaatctaagcactttgggaggccaaggcaggcggatcacctgaggtcaggagttcatgactggcctggtcaacatggcaaaatcccacctctactaaaaacaaaagcctgtaatcccagctactagggaggctgaggcaggagaatcgcttgaacccaggaggcagaggttgcagtgagccaaggtcgcaccactgtactccagcctgggcaacagagctagactcagtctcaaaaaaaaaaaaaaagatgtatttattctcactgtataaatttctgtgtaagaaatactctctcatatagaagtaaatttatatataaaattatatagaaccactataaaatactcaggtttataaaatttatatataaacttgttgacatataaaattccatgtaaatgactataaagtactcttatatgaaaagtatatgaattaaattatatatcaacttacttttatattacagtatttttgttatacagaagtttatatagtgacaataaatatttctcaagaacgatttcacataatagaagtataaattatccatttccaatagtgaaaaagaaaagcagttccacaccagtgacagggctacgaatctaagaggtacaaagacttcattcttagagacactgaggtcagggcatggccaacacatctgaagctgatagaattggcgctgggttggttggagacggtacggtattactattacaatggcagacgcttggccttgataactagccaatcagggggaaagattctggtttcctctgttattatctgaactagtgtgttcccaaagggttaagatggtttatggaaggcacaagatcagcaaaccataaaggattagcactaagaaggaaggaagtagaccaagtgttaatggcgatgccatgtaagagccaggtctgcgatgtatgttctacatggtttggggggtaaaaaaaatgtcagcctccagagcacagggctttaagcctcaagtactgttaacagtagagtttactagtctacagcaggaattacaaccagtaattctaaggccaattactcaggcaagttttactagaacaaggaagctctgcttcgaggtcaaatcgatttctgcatttatagaagcatctagatgttctctgttcaaacaatggggtaaaatccccacacattttatttctgacagagtgttccctatattgcctggccaggagtgataacattgcttggctattattaataaaacattgctgtggctgggcgcagtggctcacacctgtaatcctggcactttgggaggctgaggcaggaggatcacttaactccaggagtttgacagcagcctgggcaacatagcaagatcccatctctctaaaaaattttaaaattagctgggtgtggtggcagacacctgtagtcccagctcctcaggaagctgaggtgggaggatcacttgagcccaagcaggttgaggctgcagcgtgctgtgactgtgccactgcactccagcctgcgcaacacactgagagagactctgtctcaaaaaaatacatcaaataaaaattaaaagcccatttctttcttttggtacattacagccatgcacttcaaaggctagcacaattatttttctgcagttctatatttagattctagttagaagtaacctaggaccttcatgttagaggtgtctttggcaaaactgttatgtgagtgaaacgtttaatcaattgaggataaagatgcctcattgctaatgaagatgtggtttaaggattttatgcacccagttcatttattaacaacttgtttaagctttattagctgggtctctactttataactgtgttctttaatttacaagacaataaaaattaaaatggtaaatgggaaacctatcttgcttttcaataaataatttattttaataacttcgtgggcatggtggccaaaacattttagctgtgaaaataatttcaattcatatttttttggaatcaatattaaaaggtgatatattctcaaatgaaaagtggacaaatgatcagttataggacatgattaagaaactaaccatgagccacgtgcagtggctcatgcctgtaatcccagcactctgggaggccgcggtgagcggattgcttgagcccaggagttcaagaccaggctgggcaacatggcaaaaacccggctctactaaaaatgcaaaaaaaaaaaaaaaaaaaatttagctgggttttggtggcttatgcctgcagtcccagctactcgggaggctgactcgggaggctgaggcacaagaatcatttgaacccaggaggcagaggttgcaatgagccgagaatacaccactgcactccagcctgggcaacagagagagagagactcagtctcaaaaaacaaacaaacaaacaaacaaaccgctgccctgtgcttggagagatctgtttacctttaccactaaagactgttggaagtaaattttagaaggtttataatacctaaaagtaatcacttctgtcttatgaaaggttctgctgagatttttctattgtggccactagtggcaatattccagaagtcatatttaaagaatatctttagtggattcagcagtttttcaaatatgtacttttatctctccaacattcatgattgcaatttttcaaattaacctcatgatataaacaactgtactctatgatgcctcatagtacagaaactggaggcagaaagagaagttgaatgtctaagaatcggtaattctaaaactcaacatagaccattcagcattagtggttctaacaatcccactgcaaaatgagttgataatgtgtaacactttagtgaactaaagcataaagaaccatggtctcctaatgcagcaaattaaaacacatgatagctacaattaatgaagtacatagtcctggctgggcactatggtacgtcctttacatagattatctcttaaattattaaccccgttttagagatgagaacattcgggctcaggaaggttatgtaagttatataaaaatcacaaaataagagacagagctaagatttgaatccaagtgtgaccaggttcatatcaagcttccatttttgaatttatattagaggtcaataactcacctttgtccttttaaaataatttttggctctgtgacctacacaggcaagctgttatttacaaacaacccacacatctagatggtcactgtctcaccgcccacttttaccatcaggactcctagtgagctgtcaaggggaatgctataattttggaggttctaaatctgagggcttaagaaagaaagaaattgtaaaaagcaggcattactcaggggcatagattgtcaggcagatctgtcatgcttataggtaacctcccagggccaaaaatatatgtgcccaaactgcctaaatatttcctgtcacttcataatactgcctgaaatcctgccaaattagaacttcatttgtgttgcttgtcaatttttaacgcataagcaaatcacctggagatcttgttaaaatgcaaattctgattaggttaggtctgggtctgcatgtctgatatgcttccagagggcactgatgctgctggtccatggaccacacttaaagaagcaaaaaagatgtctgatatttactctctggctgcctaggagtgcttctcatttaagtgagatctctttgtgcatcataatgggagggatgagctgaaaagcagcaaattaagagtgagttaagtgtctacctcacttccctactatctgtaacaagcaggtttgggcactgtggtcaaccagaaaattctttccaggaccacaacccttgagattatgttgcaaagatgcaaggacaacttagaaataatttccagcactggtggcactggatgtctgtcagtggtgctggtggcagggtcctattcagactgtggtttacctgcctggcccgtttggttatgggccattttctgagtaccatggagcatcgcccagctgacaagggcttgtactccacccttggtgcgcagaagggaagcttggctgctactaagtttggtgcaaagtaattgtggttttgccattaatatttgatacagtgagtccctactttcctcaggtgaaactagaacttaaggggacacgctcaagttctcattatacagtactaagtttcaaaaatcagcaattttatcaaacacatgctctacagcagtggtcggcaaactttttctgtaaggggccagagagtaaatgttttagagtttctgggccacatatggtttctgttccagctataaactctgccactgtagggcaaaagcaaccctccacaatacatacatgaataggtgtgttccaaaaaaactttatttgtggaccctgaaatttgaatttcataaacttttcatgtgtcatgaaatattcttttgattttttcccaaccttttaaagatgtaacaaccatttttagcctgtaggccatatagaaacaggcagtgggctgggtttgctgacccttgctctgaagcaatgatatctcgatccaatttatacccacaaatttttctccttgaaaccatgcatttaattctcatctcttcttaccatgacaataagaagttattctatataacaaagagattgtacccacccaagccagcatttagatcatgtcatttgcttcctcaaaattttggtctttataaaaatcaattaaagcaccttaaaaggtaagcagtgatgaaatatttgaaataattggctaattaaacatcacctaaatagaaactgtgataagaaccacaaatgcgaaaaggaatcatgtagtaactaatgtggaggatatcttggtttagagatttgatgaacacgagttttgatttaaaaaaatttgtgcaatactcactgctttggtggggagcttgctatgcaagttggtagaaaaatttatcctaaagtcacagttctctaccactctggattttctcgagctaactaccattccaaactattttaggcacagttactagtttcaagaatcaggcaaattgccctggtattagcactgttctttctgtggtcacaagtcaaactactgtggtgaataaaattagatgatttctttagtctttcctttttcagcccctgtagtcaatttccagtgctccattcaaagaaaaaccaaaaatgtccagaatataaccttattttaaaacttgttaaccactgatttcacttgttaaccaaatttttttttttttttttttgagaatgaatctcactctgtcaccaggctggagtgcagtggcatgatcttggttcactgcaacctccgcctcctgggtactggttcaagcaattctcctgcctcagtctcccgagtagctgggattacaggtgtgcacccccacacccagctaatttttttgtacttttagtagagatggggtttcaccatgttggccgggctagtcttaaactcctgacctcgtgatccgcccgcctcggcctcccaaagtgctgggattgcaggcatgaaccactgcgcccagcctgttaaccaaatttctaatcacacacacttgaggcccagtaaatgcctgctgaaaagagggtgctggtggtgaggcaactgaggggctaacatactgatagctgctgaaatcttctacagctctttcttgttagaacactccatcacggctcccaggcccacaccacatgaaggaacttctagctctcttgcttgctctttacccaaatgtagttagcaagtcctgggaactaaacagcattgacacacttgaagaagacaattaggcaaatcccaactgctgtgctcctgcagctaaagatgaagactcgtccattgggcagttgattaattgtacctagaaaattaatttcaatggtcccatgacaacatacgggcagtgaagctctagtgttccccctgggtggaatcttccaggatgtatagtctcccataccagctcatcctcccatttttccagattctggttcttctctcttacctagtgtgtagtgggccaaatggtggtcccccaaaaagatatgtccatgtgttaaccctggaaactgtggatgtaaccttatttggaaaaatggggccaggtgcagtggtgtgcatgtgtagtcccagaactttgagaagccaaggtgggagaatcgttggagcccaggagttcaagaacagcccaggcaacatattgagacccccgtctctataagcaataaaaaattagctaggtgtggtggcatgcacctgaagttccagctacttgagaggctgaggcagaaggactgctcaagcccaaggagttcaaggctgcagtgagctatgatcatgtcaccccactccagcctgggtgacagagtcagactccctgtctcaggagaaaagaaaaaaaggtctttgtaaatgtaataaagaatcttgagataagatcatcctgatttaggatggaccctaaatccaatgacatttgtccttacaaaagaaaggtagagggaactgtgagacagacacagaggggagggccttgtgaagcaggaagcatagatgcagttacaagtcaaggaatgccaaggactgtctacaaccagaagccaggagagatgcatgggatgatttctccctcacagcctccagaacttctggcctccaggactgtgaagaatcaatttctgttgttttaagccaccaagtttgtgtgtcatttgttatggcaatggcagtattaggactctaatacacagtataaaaaaataaaaatagggccaggcgtggtggctcagacctataaccccagcactttgggaggctaaggcggggagatcacttgaggtcaggagtttgagaccaaccaggccaacatggtgaaaccccatctctattaaaaataaaaattagttgggcatggtggtgtgcatctgtaatcccagttactcaggaggctgaggcagaagaatcgcttgaacccaggaagtggaggttgtagtgaatgccactgcactccagcctgggtgacagagctagactccttcatcctaggacacagccaagtcttacgtagcaaaaagaagttgttaaaggtctgtagttctgcattaagcaacacaggcatgtacctatgaattatatgattataaaagtgctcggacaggcccatttcaaacttggcctctttccaccaactgtgtactgtttctcattccataactagagattatgtctttatatcctgtcaaaaaagtgaatttttgtgggctaagacattatccctgtgttaaatgcaccagtcttagtgtaaacaagcctagttcctttttcattttggctgtctagtatgcatttgtatatgctaggcagtgtactaggcaccttaaatacattaccttgtttaacctctacaggattctgggaggtaggcattatccccattttatagatgagaacactgagaagacaatgttcataagtgcgtcacttgtctgagatgacatatttactaagtagcagaaccaggcctcgagctactcagtctgatttccaaagcccctgctcttaatcacatcaacttctttcctatatcacctttcccagagtgcgctctcatggataaagagcagaagtataagttactaggcagcagaaaactgtagaggtgggaagattagataaaaaatgtaaataagaaggctttaagacaccaaaatcaaatgtaaatactttataacctgaatcagtgcttgtgttcatgaggctagaggtcgtgcattttatctctaggtctggtgatgccaatcctgatctacagccagcagcaacagttccctagcctgcctagaagtttgtaaatgcatgggctttggtaggaggaagacgagagaaagcagaacagattattacaaacccagtgcattcccccttgatgggtcaacagcgatttctttgtaagtgaaggacagcacactggttttgatgactcacgagagagtaggagggaaaaagaagtctraggcattgcctggaagcctcgctctgcttaaacaagtacactaatggctcatgcctgttactcccagcactttggaaggccaagatgggtggatcacttgaggccaggagtttaagcccagcctggtcaacatagcgagaccttttctctattaaaaataaagaagaaagaaagtaataatgattcaagttctcattctctacaaaattcacttatgactttccaaatgctagtgaaaacttttaggtattgcaaaactgccttaatgcataacgggattctcattttacttagtctaagatgactttttcactttgaacttctgcatctttatgatcgcttagctttctgacaagcaatttcagtaagtgtttatcaatttgcatccacacgctgacacataggggtctacttacatatccttcatgtaattgagcttttgtaaatcatctttctacatggtacacttctgattttgtgtgcagctttcttgtttaagcactgtattaaatgctctgcttcctacacccttaggaacaatgagaataaaagcgtaatgttggttacttcttcatatcaaaggaagttcatctcctggttattaaaagctattattaaatggccatctttttgtgcccctgtgttaagcactctaccaagataccattaaatagataagggccacactccatagagatgatggttctatattctgtattttctgggggagttctaatttcatgcaattccttcttcttaaataaaggcaattctctaaatatattacctaatgtgctttcactttcatattcttgtaagatttttcacataaatcaattctcaaaaaatagtatcataggccttttaaaaatagtcatgttcaaaagtcaggctcatgaataaatgtgtgcattcattacatatattttcataaattcaaatttaaaagaataagagtagctagaaggtggaaraaaaatcttattctgattaggaatgcacaatcacaagaaaatttgtgatatatatagtcattttattctgtattgttttattttgattttggtaagacaagaaacaatgtagaaagtttgacaacttaaaaaagtaatatgagtgtgagaaagtcctcttccaggattagcaaaaaaatggttttttttttttttttttccgagatggagtctcgctctctcgcccaggctggagtgcagtggcgcaatcttggctcactgcaacctccgcctcccgggttcaggtgattctcttgcctcagcctcccaagtagctgggactacaggcatgtgccaccatgcccggctaattttttttatttttagtagagacggggtttcaccatgctggccaggctggtcttgaactcctgaccttgtgatctgcccgccttagcctcccaaagtgctgggattacaggcgtgagccaccgyacccagcctaaatggccaagttttattatggacaattaagctgtagaataaaaatctacttttaatagctggcatagtgcctagtggttttgaagccacaagcaggtttacaaaaaacatttaaatccatctgaatctacagaaaactaagattacctaagcagaaaatgaaaatagttcaggattaaggaagattaacaaatgaagagtatatgtattttagaagtattactttatatttttatagtataataataatatttacgttcctacacttataatgagtttcgtatatatattaaaataatttaatggattagtatgtttatatttgcttttagtaaatttggtgtatgataaactcagttgtctacattgtgagactacacctgaggcaatttctgtgttgatatatacctgaatagcagatattacttgggagcaaataaaatagcttcaggcctaattttgcaagttcatgatgggagagtaagcatgacttcaaagaactgactttgagttaaaacttgaagaatgaatgtgacaacagcaagtataaaacaatgccaggcagaggtgggactgttcatgggtatcagggtaagtgtgttgataaatgctcaaagtaggaaatacctttcttcccccacacatgtcagaaaataactgcaatagaatgcaacgacatctcagagataaagtgttcaacttagctctcagagaccgttcagttacattttgtaatgacattggaattgattgcattttgaaggcaattctaaatgcaaagtcttcattttgttgatagaagctgggttatttattatgaaatttcaaaaattaagtaaaatatctaattaggattataccagcaaaggcaaatttagaattcaagacttcatgatccatggtaagattattttaatgcaactctgctaattaactgaaatttcctttaactctcacatctgccttttacttcttaagacatttttctagtatttcaccagagcaagatatcagaagggtaaatctcttaccaatgaactttgctaattcttagtgactccgttgaccctggtgtaaggatcaggaacaaagtgaatgaaatacattttaatacatttctgctttctctaattccaaagaccactctaaagaataagttatttgtgggtattatctgaaacttgggattaaaagagaccgtgattacccttcagggattttggcaaaacttaagccatttcatctgaagagcaaagcaagcctcccacactcttggcttattctcacaattatctagatatctagcaacaaaactcttgagtagtttgttaactacagatgccaagggctgacagtttcactttcagttttcagaatatcttttgtttcagtggtgtaagcacaccatcagaatctctactatttaaaataattaagttataattgtaacttccattagatgtagtacttaaaggaatctagaagacacaactcattaattataggaatttgactgcaaattcttctggggggtctgaattgcaaaggaggcatctttgtaagtcagactcaactcattactctgtgatgcaggctcctccaaatggcagcagaaacgtattactctctagaaacactacagtagtgctacaatttcagggttctgtagagataaggacaaattgacagaaacacattcttagaaggacagtatcatttaaaataaaaatactgtcataattgtacaccaggatagcttctccataataaattctttatgattttctgatttttagaaatcagaattgaactttttaatgtgaaaaaaatgagagaattgtttcaaaataggaccacatttctgtgtataattttaaaagtttaaaaatatttgattagtagactgataaactgaaacatttttgataagcttttcattacatacaaaccatataatttgtaaaaaattggaaattattcaaaacttcacataactaaagtgaccaaataaatactggagaggaaagaaaagragtcaaatgaatctagcattttctttttttttttttttttggagaaagggtctcactgtgccacccaggtgggagtgcaatggcacgatcatggctcactgcagcctcaactttatgggcttaggtgatcctcccacctcggcctcccaagtagcagggactacaggcatgcgccaacacgtccagctaatttttttggtattttttgcagagacgaggtttcaccaggttgccgtggctgatctggaactcctggtctcaagtgatctacccaactcagcctcccaaagtgctgggattacaggcgtgagccaccgcacccggcctaatctagcattttctaaaaggaaggacccagcagtgaacggcaatatcaataatcatgttcaagactatcagacatgcaagctggggatgaatgggtggaaggggaaaatgatgaataaatgatgaacacaagtatagacccagtggatttgagatgcccaagatgccagtgagatattcaaagtttaactcaaaagccacttcccatatgaaatcctgacaaacactcctacgtccaactggaattaatttctcttctgggctcccacagcactctgtatttttctaatagcataacactattttgtttgtagatatttctctgatagcattactatctttcctctttatcacaactgtttgaagttcttttgcctcttgcatccactgttgcccaatcccactgctggaaggctcatcttattaagttctgtattcctagtgctaacacactgtctaccatagatgatgttcaataaatggttgctaaatgaattctcttgtgataatagcactatggcaacataatcgacggtaaaaatttcttctcaatgtttacttttagcagaatgcattcatttatcaactttcattgagaatatgctaatttccatgaccctgctaggaaataggaaaataaagatgaatgtaataaggtgctcattctactgaaagtcttgactagtggagaattatggatccaacttttcatgaaatgccttcagtggtaagaattctcatatttggaataaaaaatgttatgggttgtgccaagatacctacatacttcataattttgtagagggctgtccttactgcagaaatgtatactactatagtcatatgtggaaattctttttatgatgctaactgcatgctaaccagactttttaatttaatacttgcattaaataaaccatgctaggaatccaggaatctagcttggtttattttccatacaatgtactctttgtaatatgcatatactacataaaaattctattaatggcctcgtactaaagatgtgtctgttggggaatcagttattctgtataattttatcttaattgatatattaaaatctaccaaaaatataaactccgagtaaaagtatctgcatggtgtgcatatgtttattattttaagtgtcagcgtatacattttcatgccataaagttataaaatgaaaaaatagtagccttttatattaagttcatgcttatktagttagtaaaaacaagaaagcaattaacatacaaaccatgatggtggttaaacttgcttcagtttgtgttttttaaaatttgaaagtgagaaatacagctcgaagtcagctcatattttcagtaagtactgatgaggatgtactggccctattgactacgctgaccccattaaaatatttgtgagtctaaaggttcatatgacgctgttccttcactctagcaacaggccatacatgtcttacatagggactctgttcaattcattaatacctcctgaagtgctcaacatcgtggttcatttatagtagatactcaatacatactccattaactgaattctaagataaactgtctgttactgacagaaattttcacttaagggagtctccgtggctgaaggcaattttgaaatcctgtaaaagaacccactcctctccccaagtaatgaagtttgtcagtttcaagcctgtaataaggtactgacttaaaattaattttctaataatacagtactgctatrtatctaatgtggggttagtcaatgataggaaaaaaacataagacagagtcacatttaaaaatgtgtgcttaggtgcatggtgacacctgcctgtagtccagctattccaggggctgaggcaggaagatcccttgagctcacgagtttgaggctgcagtaagccactgcactcagcctgggcaacagagtgagaccctgtctctaaaaaaaattcgttttaagtgtgctcaggacataacaggagccgctggtaacatgccatttccactgtgaatatggtaaggacagaatccctgtctctaggccctcttccactagtcaatctcatcatcaccatcaaggccaacattggtattctctcctctgagacaaagtctttgacattttctatactatactatgtcttcctctccccaaatgcatatacaaataaaatttgaatgcttctttctccatttagtgtaattttttttataacatagacccaattttcaaaccccacaatggtggattttatttgatgtattgtaaaaagcgctggattgaagtcaaatggcttgggagacctaaattctactcctgcctgtaccatgaaagagacaaatcccaaggctttgcagggcttcagcttccttgtttgtagaataaagaattataaaatcatctcttttggtcctactgggcaataaaaagctatgattctaagcctgttcccttttctcacctaagaatacaaatttgatacaaagaggccgcagaatgtgtcaaacactccctgttgcctggaattctctcttcctttgggttcagggataaaggtatgttatttcttaagtctccctttgctttcttctgcttgcctcgtaaatatttttccatcttggcagtcctacatgtcttctcactctacatgttttccctaggtgatgtgacccagcctgtggcttccactgccatccacacacgtcgctgcctctctccacatcagcatcgcaactatctcctggaagctttccaagtgctgaactacagtaacctcaaccgaactgctgttcattcaccccacaggcttgcccctcctctgcatctttgtgagaacctgagagtcatcctaaactcctccttccacctcactccccacatcaaatcgattaccaacttgtgctgattttatcttcaaatactctccagaattgtcgctgtcatggactgaatatttgtgttcccccaaattcatatrtcctaatccctgatgtgactgtatttagagacgtgacctctaaggagtaattaaggttcagtgaggtcaaaggtggagccctgatctgataggatcagtgtccttataagaagagactagagctgggcacaggggctcacacctgtaatcccagtattttgggaggctgaggtgggaagatcactcaaggagaggagtctgagaccagcctgggcaacagagtgagactccatctctacaagaaaataaaatagtcagacacagtggtacacacctgtggtcccagctcctcaggaggctgaggcaggaggatggcttgagcccaggaatttgaggctgcagcaagctatgatcacacctctgcactccagcctgggtgacagcatgagacccagtctctttaaaaaaaaaaaaaaaaaggccatatatagcccagaaragcgtcctcaccaaaacccaatcctgatagcacctggaggacttccagcctccagagctgtgagaaaatttctgttgcttgcaccgcccagtctgtggtattttgctgtggcagcccaagctgactcatcagtgaccttctctctgttaccgcagagtagctcatcatcctctcttccctagagtccagccactctctcacatctacctacctagcagtatcactgtgggttagagtcagatcactgcggattaagtcctcattctgccactgcctgtgtaaatctgagcaagttacttaatctctctgtgtgtcagtaacctccctgtgaaatgaggctaataatagcagggttgtttcaacaaggcgatacatgcataatgcttacaacacagcttggcacattataagcattcaacgaaaagtgagctactattatctcatccgttatcagaataaaccacctaagccacaaggctgcccacatcatcctcatgttttaaaacacttcagtgggctccccaccatcaacaggataaagtccaagcttccttagcatttcttagaggctccatatgaatccccaagttccactacaggaacacaggtgaactttccactccaacctcaggctccttcgtgtcactcctcatccacatggaggtaagcagcaagagactccgtgcagttcctggtggttccctgaccctcaggcagactctccccagccctctgcctgcaacgtccttgccctttgcttcccttggccagctcccattcattctccttgattctgcttggaagtttccctctcaggaaggctttatgaaccttagtgtaggttatgaacccatctttgctcctttcataccttttgcaagcctttatttattatgacacttaaccattatcatactgaagtgacctgttggtgtgtctttgttccccactagacagaaaactcaagatcagagaccagttcttgttcttttttttttttttttttttttttkgtatcacagtgtttagcagcctgctatatggtaaatgtcagtaaatgttccacaaactgaatggaattgagctctggaatctagaccatcttttccatacccatcactcctgtcttagttgaagtccttatttcccatttgaagcaatgcaaaggatttcctaactctaatctctcttttcttcacaccatcctttaaacagccgacagaatggtcatcctaaagcacatatatcctatcttacatatcctagattcggaacctctctgggcttctcaccatataagaagaaagtctaacctccttagcaaggtgcataggtcttcaatgggctccacctcacttctctatatatacctatactcttgctacactaaacttctttcttactgttgctggaacaagttcaacgctttcaaacctccctgactttgcatatgcagttcattctgtcaggaatgcccttctctcttatgcctgggatattctcattcattccatatgacctatttcataagtcactccttaatgaagcctttcttagatatccactggggcaatcagctgcttgctcctgtttccacagcacattgttcacacagatagcacaggacttaccacaagttattataattttgtctgtcttgcccatttgaatccaagggcaaggacggaatcattctcatctttgtatgtcctgggaactagaactgtacctgagacataataaacacttgatatgtttgtaatttttaaataagttaatgaacggaatggctagaaaaagtgagaagaaactctggcttactgtatatcatactgtcatactaaaaatatatactgaagacagaatcacattatatcatcacttttcacgctataggccatgatccattatgaaaaagaggatagtaaaaaaatcacagggcacaatttttgtttctgtcacacacatgtgtacctgtatattggactggaatgtaaaacgcatgttccattgtagaacgtggttttaaaagaggcttggaaaacactgcatatggtcatttcttagtttagtacaatttattattttcgtaayaacctcagctataatataagtctaccatgaagcattttggggagattaaatgagatgtgaaaagtaaatgtgttagatagactgaattcatatcatagcttgctctgatactttacaaaacatttaaccttacccacaagttttagtttcctcactaaagtcaccctgaggacagtaatgggatcttcctcacagagtattgtgaggaatacataagagaacgtacgtaaatgcctggcacttagtatttattcaataaatcttagcaatgatgatgataacaacatggtacctggcacataagagagttaaaaattagtttcttcagtcaaatgtgcttacattgatagttgatactaactggggttaaaaggtcattgctggcatctcagaaagatagattacagtgaaataaaaaatgactactgcttaaaatgaatgaagacttatttacaaagtcatgttcatctggtacaataatgaagtcgctcaattgggagaaaatgacaaataatacaagtgaatatacaatcttacttaagacgaaagaaataggacaccaggctaactatcagtctcctaaaccacaactttatttctgatacaaagagacagtgagacaatcagggcttccctcaaataaattacttaatctctcttcaattcagttttgcatctgtaaatataaataactacaatttcacagtatttccatttaaaaagttctagtgcaacatcagaaacaagaacttagtaggtgttcaaaaagaaatataagttctgctttgttagccagcaaatagttgcctgtttctagccctcacttcttttctcctaaatccctatattgcatttatttaacttaaagtgctggatgtggcactacgagaaagaaaaagatatttggtaatcttgttaaaatcattagacatcccaggctatctggaatcaccttgggctcacagttagacatcagctatggcttgttttatttaaaaattcatccactgatgcatgataatggaattcacaggagagcaatttaccaaaaaaaagaaatttattgatttataatgtgagatattaatttagccacaaatatttattgagcatctcctacatgccagggaatggactatatatggcaggaaaacagataccaatcatttatatcaggcatttttttctaatagaaggatattcgcaggagacaatgcatagcaccatgccttgcacgtaacagacatttaataactattagttgaataaaattggagactagaatgayacataaagaggcaagaaagagcaaagataagcctttctgagaatttctatcatgttttgctcaatagcttgtctttatccactgcttgtatttttccatgtagctaatcctcattggtcgttagaattgagacaccctttccttgaaatcaggagctataggaggccattcttcctactgggcattttctttctgggacagggtctcactctgtcacctaggctggagtgcatcatagctcactataaccttgaagtcctgggctcaaggaatcctcttgccaaagaggtgggattacaggcatgagtcaccatgccagcctatttggcatttctactgtagacaaagcagacttacagcagtaggtctacctgcctaatacaaaaagaaaaaaaagaattttaacaaacaaatgagggaatcagatccagaaagtgattcttataacttagattacttagagtagatctataatctgctctagatccactgcatacagtgggcccttcttatcatattccataaatagcacttttctcagcccagcttttgatgatagctgaacagactaacagtttgtctaacaaaggctagagaaggggatagcaaataatggcccacaggctgaatcctgcctgctgctcatttttgcaaagttttattagaatacggtcatttccactcattttcacactgtcaatggctgcttttgcgctacagcagcagagctgggtggttggggcaggggtcacatggctaacaaagactaaaatacttatcatctgaccttttacagaaagtttgctgatccttggagtgtacaagtattctatattgttgattaagaacagaaccacaagtattagaagttagaccagcaggtggtaaagctgatcatctactaatataatggaaattggggttcccaatcaggactcttgctttgatagaaggccatcttaacgaggagggagacacctgcaggcaaagtcagaattttctgcaggaaaagttttgagtccatttccccttgtgaacaagtgctcagctatgcatttcatctttagtaaccatgcttctatacctggttctccttggcaaagatttctttcttcagtaagtctcaagactttctgggaaggtagggagatatgggggtaaaagtgtcccaggacttactgaaggaagtgttttatgattatctgatagaatcactgtatcatggtagagaaggcaaacagaatataatctgaaaatagaggtgagggtgaacaaatgggcactaaaagtgaactcagcatcaggaaggtagcaaaacaagacatcagtcaaagatatggggtgattcagacctaaggaagatttaatgtgggatgtttccgtgtgccaggagctggacacttaagcaagaggagatccaggaatgttgctaaaaccatggcctccatactttattggaattagcacaacttatccttgtttctttcattttgcaatcaaaatctttaaaaacacattatttaaaaatacattattttaaaagctagaatgaaaattatgatatcatttaggtggtttaaaaaacatccaccagccgggcgtggtggctcatgcctgtaatcccagcactttgggagtccgaggcgggcagatcacgaggtcaggagattgagaccatcctggctgacacggtgaaaccccgtctccactaaaaatacaaaaaattaaccrggcgtggtggcgggtgcctgtggtcccagctactcgggaggctgaggccggagaatggcatgaacccgggaggtggaggttgcagtgagctgagatcgtgccactgcactccagcctgggtgacagagcaagactccatctaaaaaaaaaaaacaaaaaccatccaccaaaatgggaagaagtgatgaaaaattacagtccaagaagaagggccatagctgtttaaatcaattggtatatttgttatctaatataaccccacgtaacgacaggtatttaacaaatgtttctgctgaatttgacgattccatttcccttacatcccatatgcaatccatcagcaccccacatccaacccatcagtacatcctgtcagcattggctcccaaatataacctaaatctaacacatatcctactatctctgctgctacaactttagtctgaaatctcataatctcccacttgtactactgtagatgactctgaatgagtcttcttgcttccattccacacagcatccatactgatctattttttttttcaattttttgtagagacggggtcttgccatgttgcccaggctggtcttgaactcctggcttcaagggatcctcccacctcaacctcccaaagtgataggatttcaagtatgagccactgtgcctaaccctgactgatctttctaagcataaatctaataatgccccttccttgattaaacccttcaatgaattcacattaagcaaacaacctggccaggtgtgatggttcatgcctgtaatctcagcactttgggagaccaagatgggaggatcacttgaggccaggagctcaacatcagcttagacaacatggtgaaactacatctctacaaaaaatacaagaattagctgggcatggtggtgcacctatagtcccagctactcgggcggctgagctgggaggatcacttgagccctggaggtcaaggcagcagtgagctgtgattatgccactacacttcagcctggatgaagtgagacctggtctccaaaaaaaaaaaaaaaaaaaaaaagaagcagggcaaggtggctcacacctgtaatcccatcactttgggaggccaaggcaggcctcctggatcatgaggtcaagagatcgagaccatcctggccaacatggtgaaaccccatctctactaaaaatacaaaaattagctgggcatggtggcatgcacctgtagtctcaggtacttgggaggctgaggcaggagaattgcttgaacccgggaggcgaaggttgcagtgagccaagattgcctggtgacagagcgagcgagactctgtctcaaaaaaaaaaaaaaaaagaaagaaagaaagaaagaaagaaagaagaaatccttagtcctgtcttaactacttgagaggctgagggaggaggatcacttgaacctaggaatttgaggctccagtgagctatgacagcaccacggtgctctggtctggagagagtgagaccttgtctctaaagaagagaaaagaaaagaatgaatgaatgaacaaaaagaaagaaggaaaggaaaagaagagagagagagagagaggaagaaaggaaggaaggaaacaaaataaaataaaataataaataaataaacccaaatccaacttctttaccctaatcaacaaggctcaaataatctcatgccaactaagtctctgaacagctccttccattctattgccagattactccatctttcagccacaagacctttttatcttccttttaccagccaaacacaatcctacctcagaacatgtgcactttttcttttctctgacttgaatctcctccacccattatataatcttagctcaaagaggcttttcttgacaacttagcgaaagtatttatcccagtcattctctgctacattattccaatttattttctccatagtacatttcagcacataaagatttccttagtatgtgcttgttgcctttccccaacctcctaaaatgtcagcattccttgagggcagagactgtttcattcctgtatcatcagcacctaagacagttcctggaacataccaagtacttaataaaaatttgtttattgactagctatgacacattttacttatataatttcattttctcagcaaaatgaacactttgaaatgtaattaattactgatttttgcagtattttctaattatttaaataaaatatttactattttggtcaaccagaattcttacattgttttagcacccagatagcttctaaaaatgcttacaattaacacaattttatctagcaatatgtatttatcactagacagaatgcactgaactcttcttcattaataaaaagcaatccaggctgggtgcagtggttcacgcctgtaatcctagcatagtggaaggccgaggagggaggatcacttgataccaggaattcgagaccagcctggccaacatggcaaaaccccatctctataaaaaacacaaaaattagctgggtataatagcagacatctatagtcccagctactcaggaggctgagaggtgggaggactgcttgaccccaggagattgaggttgcagtgagccgtgattgtgtcactgcactccagcctgggctacagaatgatacctcatctaaaaaaaaaaaaaaattagccaggcatggtggcatgcacctgtagtcccagctactcaggaggctaaggtgggagggtcacctgagcctggaaggtagagactgcagtgagccctgggtagcccgcgccactgcactccagccctgagtgacagagacccagtttcaaaaaaacacaaaaaacagaaaacaaaacaaacaaacaaaaaaacccaatgcattgctgaaatgttaaatccattataaagaaaagtacaggggtgggcatggtggttcatgcttgtaatcccagcactttgggaggccaaggtgggcagatcacttaaggtcaggaattcaagaacagcctggctaacacagtgaaaaatgcaaaatacaaaataagccgggagtggtggcgcatgcctgtaatcccagctactcgggaggctgaggggggagaatcgcttgaacctgggaggtggaggttgcagtcagccaagatcgaactccagcctgggtaacagagactccatctcaaaaaaaaaaagtaaaaagtatatagttgattctgcagggacttaaaaaagtataaatatcttttttaacatcacaaagctctgatatctgcaggtttatgactaactrctagctcactcccatgaatacacgtatgtaaacaggctctatacaatctacaatcccagactaaggggaaaaaactgtcctgtcactgtggtctccaacccttggcccatttctttcctcttgaccacaaaacttctcaggagttgcttgtttcctcttgatccacttatctttagcccactccaatctggcatcggttctcagtactctccactaaaactgcttttatgaaggccatcaatgacgttcatgctgccaaatccagcagacacctcctgttttctaattttttttattgttattttttaagagactgggtcttgctctgtcacccaggctggaatgcagtgatgccatcatagctcactgcagccttaacctccctgarttcaagagatccttctacctcagctgggactacaggcatgcacagctatgcctggctaattactcaatctttaacatagctgataattccctccttgaaacactctcaacttttaagaaaccctgttattttcctcctacatttttagccagttcttctatcagcttctccttatctgacctctaaatgttaagaacattaacaaagactgaacctagtttttttctccccttactgtactgctcctgggcgatgtcaatcagtcccattgctttagatactatctgttgaaacactgaaatcactggttttttttgtttttttkttttttttttttttttgagatggagtttcgctctgttgcccaggctggagtgcagtggtgcaatctcggctcactgcaagttccacctcctgggctcaagcaattttcctgcctcagtctcccgagtactgggattacaggtgtgtgccaccatacccagctaatttttctattttagtagagatggggtttcaccatgtgtccaggctggtcttaaactcctgacctcaggtgatctgcccaccttggcctcccaaaggttgggaaaagatatcccaatctttttcctatgatttcttaattgatctacttgacatatccacttggacttttaataggcatctcaaacttaatgtgttcaaaataaacctcgtgactttccctcccaaacctgtccctacctccctcaataactaatattatcattcttatattcatatattgaataaatgtttgttcccccaagtatttgttgctataaatttatgaagaattcttttctcactagttattataattaaaatgtaatatttattttctttaaaaactttactttgtaggattattattttttaaacagggaccaacaataaataacttctctacttgattaaaactagggcttcctcttgtgctccctcaggactatttctttgtaaaaacaataggctaaatcagtactggtgtcaaagaaatcataatctcacaactttataaatacagcatgtggcaagggattttcccatcttatatagtaataaaattttcagctgtgccatggctaaaagtttaccatcaaagttggaattttaaattagaggtagtcatctttctttctttttaaagaaatggagtctcactatgttgcccaggctggagtgcagtggctatttgcaggcatgaccacagcacgctacagcatcctggcctcaagcaattctcctgcctcagcttgccaagtagctgggactacaggtccctgccaccacacccagcagaaatatttagctttctgaatttctcaagtgtgtgtatgaatgagactagtggggtccttaaccaagattcacaggatttttagtgatttattaaataacttggatttgtatctaccagcatgttctttgaggtacaggtatgtcttttatatctcctaatatagttcattacaatgctaaatactaagatgtgatgctcacacactacagaatagccaagcaaatgaactacttattctcatagggctattataattaacaaattcttgtatcaccccatcattatcaacaacaacatgataggatttccttttatcttgaagagtctggaaaaagggtaacagagagatatttctgaggaacaaactggtaatgagggagctactgtgtccattacaatactccttctagaagctcaatacataatgactaatctctggaaaaaagcaagtgtgagaatggaaggctcttctycaaactatgcaaaatgaatcaatcagyagtgaacaaatttatgagccaaacaaattcctacaaaaattaccatcatatgctgtcatgcatgtctgccagtctatttatcatattatttaagaaacaaacatttattgaagatttatcatgtgctcagcactgccaaagaggaaataaagagcataatatctattcttagaaaataacattaacacaaatagaaaacaagaaaccataatgttaaaaatattacatagyaacacagaaagacaatgtataattatacatacgcactaaagcaaagataacataatttataaattatgaggtacagaatagttagattctgaaaattaaaataatcaggaaaaacttcatgaagatgagatctgggctggatcccaaaggataggcaggtggatcatgtagaacaggggaaaggagttcctgatcggggatacaatatatgtaaaaactcggagacaggactgagcgtgaaatgttaatgggacagtaaagaaatcttcctctgcagcgggggaaaaaacagaataatgggaaactgcatggttaaaaggtttgatgttaagatagtgcttggacacaaaagatcttaaagttgagtcaaaagagtacaatgaaagcattagaaatagaagataaaacacaattaggccgggtgcagcggctcatgcctgtaatcccagcactttgggaggccaaggtgggtagatcacttgaggtcaagagtttgagaccagcctggccaacatggtgaaaccccgtctctactaaaaatacagaaattagccgtgaatgatggctcgtgcctgtagtcccagctatttgggaggctgaggcaggagactcgcttgaatctgggaggcggaggttgcagtgagccgacatcgcgccactgcactccagcctgggtgacagagcaagcctctgtttaaaaaaaaacggtaaaaataaataacatttactattgttttctgatgatatatatggcctctaattgtaaagctgaatgcctagtttaccactttttttttttttttgagacggagtcttgctcttgttgcccaggctggagggcaatggcacgatcttggctcaccacaacctctgtctcccaggtttaagcgattctccagcctcagcctcccgagtagctgggattacaggcatgtgccatcatgctcagctaattttgtatttttagtagagatggggtttctccatgttggtcaggctggtctcaaactcccaacctcaggtgatccacccgcctcagcctcccaaagggctgggattacaggcgtgaaccaccgcgcccggcctatcattcttattttatgcattaggaaactaaggctcaacaagattaaagctgtctagggtcacaaagattgtaagtggaggggctagaattcaaaatgagacctgcttgactcctaagcctgtaccatttctactatatttagagtgaagtagatgggttgaagaaatatttaggaggtgaaatttcaaaagtgtacagtcagaagagaagacatatatggaaacctaaattttcacacagtaaagtgtcaataataaaggcataatgccaaaatgacagaggctgtgcatggtggctcatgcctgtaatcccagcactctgggaggctgaggcaggaagatcacttgagcccaggagtttgacaccaacctggccaacacagcgaaaccccatctctactaaaaatacaaaaaattagctggtaatggtggtacacacctgtaatcccagctactcaggaggctgaggcattagagtcacttgaacctgggaggcagaggttgccatgagccaagattgtgccactgcactctagcctgggcaacagagtgagactctgtctcaaaaaaaaaaaaaggaagactcgagggctagaaccctgaaattgggaatgaacaggactggctgaaaatgtttcttgcacctgataaaaatcttgaagaagaatgctttaaatagataagaaaggagagagagaggtgggcagtgagaggagaccaccctaagtaatcagagattacttacgttggttactcaggctggtctctgaatctgattataaatgaaatagagattacttaaaacaaagggctgtaaggtagcactgtccagcagcactttctatgatggaaatcttctatatctgcactgtccaataaggtgtagctgctagcacatgtggccactgagtacttagaatatagctasgacaaccgagaggctgaattttaaatttaatttaatgaattcaaacaaatttatttttaatacagcactttaaattttatttttaaattttaatctattatttatttagagactgggttatgagactggctamtttttgtatttttggtagagacggcgtttcaccatgttgcccaagttagtctcaaactcccgggctcaagtgatccacctgccttggcctccccgcaaagtgctgagaatacaggtgtgagtcaccacgcccggcctaaacttaaatttaaatagccacgtgcgggtagtggctaccatactgcacatgcaactgtaagatgtagaagtcagatgtgagcaaagaaatgacaagccgttcaatgctgttagagaatgaaattcaaggttccaatgatctgaacttgtgtcccctcaaattcgtatgttgaaatcttaatcctcaatgcaacagtattaagaatttggggctttaggaggtaatttggttttgagggtggagccctcatgaataggatgagcacctgaggtagcctctttgacccttccaccatgtgaggacacaccacgaaggcaccatgttggaagcagagagtgagcactcccaagacactgaatctgccacatcttgattttgggcttctcagcctacagaactgtgagcaataaatatctgctgtttataaattatccagtgtaaagtattttgttatagcagcctgaatagactaagacaaaggtggactaaggcaggataacaggttagaaaaggaggcagggcctttttttttttttttttttttttgagacaaagcctcactctcacccaggctggagtgcaatggcatgatcttggctcactgcaacctccacctccagggttcaagcaattctcctgtctcagcctcccaagtagctgggattacaggtgtgcaccatcacacccagctaatcttttgtatttttagtagagacggggtttcactatgttggccaggctagtcttgaactcttgaccttaaatgatccacccgcctcggcctcccaaagtgctgggattacaggtgtgaaccatcgcgcctggccgaggcacagtgtttttacagagaagcctgtttaaggtttaatcatataaaatgtatgatatccagtaagttttgatataaaaaagaaacacctggcgattttatataatatattgtgctaaggaattttaagcactctacattctgctctctaagctctgtaaagagcaccagggattttttttttttttttctttttgaacagggtcttgctctgtcagccaggctggagtgcagtggcacaatcttggctcactgcaacctctgcctctcgggctcagcgattctcccacctcagcctcctgagtggttgggaccacaggcgcatgccactacatctggctaattttttgtaragatggggttttgccatgttgcccaggctggtctttaactcctgggctcaagcgatcctcccaccttggcctaccacgcatgcccggccgcaacagggatttttaaatgtaagactacctagtcaactcttattctatattaacaatatagacaagaaataacctctaagtaatctctatttcatttataatcagattcagaggttctcttatgctttacaatattgtcctactgtgggtagcgcaataactaaggtaatctgaaagaccagttatattatatactatagttaaatgcatttcaactgcatgggagaaagcaactgtgttctttcctctcaattttaacagaaggaaaattgtcaaaattagcttatttagaatgtcctatcagagaattattttgattaaaatatatttttaatcaataaaatatttctctttggtcaatacttgtcaatatagaataatatctagccacaaaattaaaaaaaaaacattttcccctatattacattcatggatcttcttgaatttctgttatctaggtgcttttaaaagtcatatttctgataatatgaaatcacagctccttttctttggcatatttagttactgtattaagaaaatgtacaacacataatttagaatgggtaattattatattctctttattcttatattgaaaatgacatgaaaattaccagtcttcccaggtaatataatttaagttaaagaacatctacatactacaaccaatacccattcccctatgttatgtttggaaaaacatagaagtatctttagtagtactcttagaaattatcccaggttcagcatattggtattttatttccaggtttaagttacagtattttgggcaccccaagtttaataaactattccctgcagaaacctgacaagtgaagttgtggctgggaatatgttagtcttcagataaaatgaattgtttaagamtttgctaaagatctcaaagcatctttcttaaatctaaagaaagtcaggaacaaagccacaaccaggaccatagcatcagaagatggaaagttgctttgtcttcaaacttaaaaaacattttccattttaaaataattttactatttacctgtgatactgttgaaaattatgaaaaaacagataatttaaaatttagtgcttttttttwwwwaaaaaaaaaaagcgaatccctgggacacttcatatagtgcaaaacaacaattcaagaattcaagcattgaaagaaataatctcttatcccccagtctctgaaagggattgcctttactactgttcccatctttatgtccatatgtacctaaggcttatctcccacttacaagtgagaaactattcagtatggcttagtcatttttaatgcaagagaataggtaaaaatgccaagcaccagccagagttttttctttgcagatagatgtgactcttacaggagcagcagggatttcccactttgggcggaaagcagcatttaggtattccccctccagtgcagttacagaccaccccccsgtagaagctgctcctgtcctctgtggcatgtcagcctctgattatcttttaataaacaatayggcatattaagtctcttttatgcccttctttgtattcccaggtaccacctccatgtcaggataacaagaatttggtaatgtttgttgaataaatttagcagaagttgaaagaaaaatcctgtttctacagaaagataccactggcttttggggagcccgagttcatgatgaaactaaagaaagccacawaagttcacctcaatgccaagacatttcttgatttttgaaaacccagttgtcgaaccaccyatctatagaaacttgaaagactaaaaactatcttactctaaacattttctaggaagttgattctacaacacattttggttttccaatttggcttctaataattatttcaaagtttctgtgrcctaaattttgttttacattgatcctttgaatggactactgtttccacattttagaacatttaaaaagatatctacaacccgagtctaatcataaaaaaaatcagacagatccaaaatgtggaacattccactaaaaaaggagtggggagaggtctttattcttccaaaaatatcaatgccataaaagacaaagacggctatggaaatgttacagattgaaggagactaaagttaaatgcaagaaaggaaaaaatggcatataggacagtattgaattgactgacaaaactggattacaatagtaragtatcaatgttaaacttgctgaagttgctaactgtatttcttaggaattattcacctaagaatttaggcacacagatatgatgtatgtaagttacccttaaatggcttagaaaaaaatgtgtgtatattcatttacatacgtatctacacacacgtgtattagcggaagagagcaaggcacacatgtgcataagtgataaagcaaatgagatgaaatctttatttttaaatttaattttgtaagtttcagctttttaaaattttagattccggggatacacgtgcagttattacttgggtatattgtgtgaagctgaggtttggacctctaatgttcctgttgccacaacagtgaacacagtacccagcacgcagtttttcagcccttgccccctccctcccgctctccctccttgcttttggagttcccagtgtctactgttcccatctttatgtccatgtgtacccaagrcttatctcccacttacaagtgagagcatgcagtatttagttttcttgttctgcgttagttccgttaggataattgcctccagttacattcatgtcactgcaaaggatttgatttcattctttttaatggctgtgtagtattccatgttgtatakgtaacacattttctttatccactcatcaattaatgggcacttacattgatttcatgtgtttgctattgtgaacggtgctgcaatgaacatctgagcgcaggtgtctttctggcagaatgatttattttcctgtgggtatatacccagtaatgggattgctagctcagataagtatttctatttttagttgctctccacaggggtagaactaatttgcattcccaccaacggcgtgtaagtgttcccttttctccacggcctcgccaacatacgttcttttctgatttttaatagtagccattttgaactggtaagagatggtgtctcattgtagtttggctttgcatccaaatgagacaaaatcttaatgacaggtgaatctaggtaaaaggcatacagacgttctttgtgttgtttttttaacttacatttgaagttattttcaaatgaaaaataaaagcaagcaaaaaaaggtcattcttcatctagtaaactcttcaaagattaccacccccttcaacagtttttcctggttctagtgtgagtcttctcccatttgtttagatctttgttgaaatgtagtctcagataaaaaattatatttttatttcttttacatatttcaaacaatctaaattctttttaaatgaaactcattaaaaatactgcatttgtttctaaataaaatggtagaggtaatttgcacctttccaaacagaagcaataggagcaacccagatgttctagccacgatccaagtcaaccacattcaatctaagaagtaattgaaggctgtaacgacttctgtaaggcctacaaaaatgagttcagacacaagctctgctcagtaaaaatctagtggcagatgatatatacaatgatctgagaaaaaggcagaatcaacaaaggttgtatttttatctattgctgcgtagcatatttccttaactttagtagcttgaaacaataaacatttattatttcataaagtttctgtggtcagaaatccaggagcagcttaactgggtggatctggctcagctgtagacaagatgtcggctgggacggccrtcctttgagggctctgagggctttgagggctgcacgatccaattgcaaggtggctcactcacatactaggcaagttactgctgggtgctgggaggagaccttagtttcttatcacatggacctctccacagggctgctggaatgtcctcatgaccttccccatagtgagtattccaagacaggaaagtggaagccacaatgtctttcatgacctagcctcaaaagtgacatactgtcatttacacaatattctactggytgtacaagttaatcctatttagtctgggaggggactgcataagggcatgagtaacaagaggcaagaatccttgggggccatcttggaagctggctacacagaagagaaaacaccaggggagtgcgaagaaggtgcaattaaactcaattccttggtatgccaatggtaagaaatattaggtgatctctggggtgtaacctttttaatttagttcttcactgaataatctggccagtaattgtaatacaaaatacggcactctgacaatattctctccctttataatcaattacacaccagaatatatataaagaaagacttacaaagtcacaagtaattgtttggtattatttttataatcacatactagggccctacaattagcattcacaaacatcactccatgttggccagataagtctgtctttatagtggtttaccatacgcgccttagcatgaagttacatgtggtttccttagccatcagatgctccaaatgcaaaaaatgtctcaccacagtcacagaatcatggaatcctaaagttacctggggtttctgaaaatctcatgggaacaactcacgagaattaaggcttaagaaagtgatttatcaaagaacaaaaccagcaagacttgagtttagaactcgcagcagagttgtgactagaacctgttgaaataggcaatgtagaaacccagactaaggcacattctctacaactttactatgcaagtatgcttagatactccttagcaaacagcaggccttgagtaaattctttcagaactgaatacacaaaggatacagaacggaatacactaacaatagtgcatgatgtgctcatktctgtaatagaaatgaattaattctgatccatctataatttattattgctccatgattaacggaaggcataggaaagatgactggaatagtgtaactagtacaaacaagtattacacttgactgaacctcattacactgcaattgcatattatatagtatgtaggtgaacaaatactgggttagtcagtggacctacatttgaatactggttctgctcctagacagctgtaygatttgaatgacttctttataytttcatagtttctctgttcttctctgtaaaacaaaggcttagaagatattatgggttagattatgccccttacaaaagatgctgaagtcctaaactacaatacctgtgaatgtgactttatttggaaatagggtctttgcaagtgataaagawgaggtcatggagtgacctaatccaatacgaccagtgtccttataaaaaaaaaggaaatttggatacagatacacacaaacaaggagaatatcaaatgaacatgaaggcagagaccggggcggtacatctacaagccaagggacaccaaagattttcagcaaatcaccagaagttaggaagagtcatgggacaggttctcacagtcctcagaagaaacccaccatgtcaatacatcattttggacttctagtcttcagaaccgtaagaaaataaatttttgttgttcaagctacccaatttgtggtactttgttacagcagtcctagcaaactaatacaaatgagctcttaacactggtctaaaataggataatcctatgaaatgctacaaatgtttgggaagatttctcatactcaactgtttacagtataccacaagcctgtcagttgaagatacaaacaaaccctctataatcctctatacttatatgcaaggaacagcacactttttctgcaaaaggtcagatagtaaacattttaggctttgtgggccaaacaaggtttctgttacattttttttttataactccttaaaaatgtaaaaatcaccctcatcccaayggactacaggaacagacctcaggtcacatttgactcatagcctgacccctggtgtgtagggttaacaagcctcctttccctgggctcctttctctttcagcattccaagccaaaggaaactatctttttcaaatcattttctctcctaggtgggacatcttacaccagcccaggcatgcttccgatagccttagagtagctgtcccttcctcagaattactgtctaattggctagaagttagcaactttttacatttttccttcaattcctttccattaagaagaaggcatgcaccggcaaattacttgtgactatcaatgacatactctcagaagcaccagtacccctgtgttgtttctaaacccattctaatagacacataccccaaggttatgctgtttgtcatctcacaaaatgacttacatctagagatttaaataattaatgtacttttcataactaccaggtacagtagatctgataatggcagagctaagcacatatacagaaagtagggcaagggccagagactcattttaaagcaatgttacaagatcgtcactgttgcttttcatttttctaaatgtggccactgctgttttctcactaaaggaaatgttttatgtaaagtgaataacagtacctggcataaaatargtgctcaataaatgttaaggccttctctccctcttcaactggcctcctcatttttcacaaagtgaaatagaaaaacaacatggaagataatcctgttgcttaggaaaaataactaaagcttgctagacaaaatacacctgaaaatataggaagtgagctatagctggcctatatgcatgtatgttggaacaggacaagatagtgtagggtggggtgaagaggacagagaaatggaaggaaaggggctacagccttggtggcaaaataaaggataagacgactcttttaaaatggtctatttcaaatgctgggttgtgaaacttaatttgattacttcatgagaaacagcatctataatccatccctgatttttctacaacaaaaatttattatttattttatgtttgtgtgtagatcttttatatatatacatgtacacacgtatatgtatatattatatatgcatatgcatatatatgtgtatatacatatataatatattgtgtgtgtatgtgtgtgtatatataatttttttaaaggaatggggtctcactatgttgcccaggctggacttgaactcctgggctcaagcaatcctccacctcagcctcccaagtagcaaccaacagttttagttttgaaaaaataacaaatattaaacacccatgtgtaagggttggtactgggccctgtgttagtttgcatgggctgtcgtaacgtaacactacaggccgggcacaacggctcacgcctgtaatcccagtactttatgaggccaaggtgggcggatcacctgaggtcaggagtttgagaccagtctgaccaacatggagaaaccccgtctctactaaaaatacaaaattagccatgtgtggtggctcatgcctgtaatcccagctacttgggagactgaggcaggagaatcgcttgaacctgggaggcggaggttgtgatgagctgagatcaggccattgtactccagcctgggcaacaagagcaaaactctgtctcaaaaacaaaaaaacaaaaacaaaaaaaccctgataacactacagactgggtagctggaccaacagaaatttattttctcacagttctggaggctggaaatctaagataaagttgttggctggtttggtttctgaggcctctctccttaacttgcagatggctgctttcttgaaatgtcctcacatagctgtccctctgtctgtttctggtgtctccccacgtatccaaatttcctcttcttataaagatactagtcatattggattagggtccaccataaagacctcatttaaacttaatcacctttttacggccctgtgtccaaatacagtcacattccgagttccaggggattagggcttcaacctatgaattgggggtggggcacaattcagcccgtaacaggcctagaccttaatttgtcaacactacagttagatttatagtatagtaactgcatctgtgctcatctaaatgtcatacccaaatgaaataatatagcatgatgatctgaatttattaaaggcaatttttcctatagaaacccaaatctataaattatatacaaactgtggtaagttactcgataccttgccaggactcatctatggtggtagatagaycacaaagagtaccactgaaagatccctttcctaatcacagtttcctcactggcttgccacaaaacctaaaattcttctattctttcattggcaatttatttcccctgaaaatgtaaataatctctggcagagcaatctattaagtgatcatcagccactaacaccttagggtagaacagctcagatcasagtcttaaaataaattccatcagtatgaaattttctttattactgctccgctactggaatgttagatcactgtctgctttaataataattctggtgtaggtcattcaaattttgtttaagataataagacaaatagcaggtataaaaacattccgtcatctaataaagcaacccgagaacagtaagaagaacgtgatgaaattaacatttttgagtacctgctaggaatcaagtattctgctagatattttagaaatcatctcaattcaatcctaaaaattattctgtataatagtataggttgagtattcctaatccaaaaatctgaagctttttttttcctgagacggagttttgctcttgttgaccaggctggagtgcaatggcgcaatcctgactcactgcaacctccgcctcctgggttcaagtgattagggatactcaactggctaaatataatgcaaatatttcaaaatctgaaaaaacccaaatctgaaacacttctggtcccaaacatttcaggcaagggacactcaagttgtattaatcccattttacagaagaagaaacaggctcagataaatgaacatctcagagcttgttgatagcaaaggagagattgaaactgtcaggcctctgatcccaagccaagccatcacttcccctgtgacttgcatgtatacatccagatggcctgaagtaactgaagatccacaaaagaagtaaaaataaccttaactaatgacattctaccactgtgatttgtttctgccccaccctcactgatcaatgtactttgtaatctccgccacccttaagaaggttctttataatttcccccacccttaagaaggttctttgtaattctccccacccttgagaatgtaatttgtgagatccaccgctgcccgcaaaacattgctcttaacttcaccacctatcccaaaacctataagaagtaatgataatccaccaccctttgctgactctcttttctgactcagcccgcctgcacccaggtgaaataaatagccatgttgctcacacaaagcctgtttggtgtctcttcacatggacacgcatgaaagaaaccctacctggttctgtgtcttacctgttgggggcctgtggtcaaactactagtacggagttttagtgtcctcactttaaaaatgagggttgtaaggtaactacctactttttatagcattgtagtgaagttgaaatgaattaatccacatatattatagtgtggtagaatgcagcagaactgatgatgtatgacttctaagactagtccttaagagacctgcagtttttgcttttgccctcttggaacactcctgttgccatgttaagaaaaactctggggagactatgaaggaagagagcatactcggggcaggggggtgaacaggacgtgcacatgtacgagcgtacaagccaggtgacaccagtaccacagcctcagacatgtcaccggggataccagcaccacagcctcagacatgtcaccggggacaccagcaccacagcctcagacatgtcaccggggacaccagcaccacggcctcagacatgtcacccagggacaccagcaccagcaccacagcctcagacatgtcatcggggacaccagccccatggtctcagacatgtccctgaggcccacttagacccttcaaccccagcccagctgctaactgactacagccacatgaacagaaccaggtgagaccagaggaaacttccagtcacctaccagatcatgacaaataataaacgatgttttttaaaccacaaagatttggagcagcatttgttacacaaaattagacaactattacagttcgactaaaaacatgttcatttacaatactaaattagaagtgtaagaatgggagaaaaacttcatactttaaaagtcattttttcctccaaaaacttccaactttgaaaaactgatttttataatgcataaaaattaaaataaccttagaatttatatgagtagcatagccagctggctttattatctgttgtactcaacacttcaataatcactgatgttttagaactcttcagatttagaactcttgcccttgctttagtctggtttaagctaaataattgttcttcctcaagaacaaatgaccttacctcgttttgttttccttgtctgagagaaacacattagcagtctcccatcttgtttttccttttcctgtcacccaggacagagggcagtggtgtgatcacagctctgcagcacgacttccccaggttcaggtgatcctcccacctcagcctcccaaggagctgggaccacaggcacatgccaccacgtccagcttaattttgtatttttttggtagagatcaggttttgccttattgccccaagctgatcttgaattcctgggctgaagcaatctgcctgccctggcctctccaagtgttaggattacaggtataagccaccgtgcagccttatattttgttttaaattttcctctgtatttttctctctggcaaattgtttagggagtttctttagtttatcagactaaatttcaaggctttccttccaattttgacatgtaaacagtccctcatttctgcttatctagtgattattcccaaatctgtgtttacagtctagctgtctctcctgagattaagacttgtttctctaactacctgacggcagaatctcctcttggaagtatcaaggaggcagttcaaaactgaactgggcattggctccactccttctccttctctttactattaataccctttctctccttctatatgaccacactaagtcttatttaggcatcgtttcttctgggagacctttgtagaatctctgaggttatgttaacatgctaaggttttcttgacattctcagattgggttaggtgaacttttagcaacttatctttttactaaaaagtcatccctcagtatctgtggggaattggttctaggactccctaaggatatcaaaatctgcatgagcagcccaggtgagaccagcagaagcactttacagtcacctacaggatcatgacaaataataaatcatgtttaagccacaaagtcctttacataaaatggtatagtatttgcatataacctacacatcttcctgtatcctttaaatcatctctagtttataatacctcatacgatgaaaatactacgtaaatagttgttatactgtattgtttagggaataatgacaagraaaaaagtccacgcgtgttcagaatagatgcttttttttctcgtctaatattatggatccacagttggttgaatccacagatgtggaatccatggataccaaggaacgactgtatgcattttgacaattatacttctcatcttaccatgcattcaacaaacagaacatgtaaagcggtgataatgctgtgatgaaaaataaagcaggggaagaggctgcatccatctagtggaaacgatgcccttttcaatctgcacaaagagaaaaagctgctctccaagttggggggtgggtgggtcaggtatgtaaattggtcaggaagggatctgtaggcacttacagatttgacgctaatgagatgggaagccacaggaaggttgtgaagaaaagacaagacatgatctgattcatgttttgatctgatacactggttgctagatggagaataagctgcatggcggtgagaggaagcagaaacaataggagggtaatgctataatccagtggtccataatccaatatccccccaaggaacagttcggcaatgtctggtgacatttctggctgtcacaactgttggggcggagtgctacttgcatctagcaggtagaagctagggatgctactaaacatcctacaatgcacaagacagcccttcccccaacattgctggcccaaaacgttgatagtaccaaggctgagaaactctgttataatctgtcctagaatgtagcttggattgagatggcagtggtaagagctggagaagtgcttagcttcccaatgtttttttgtttgtttgtttttgagacggagtctcgctctgtcgcccgggctggagtgcagtggcgtgatctcggctcactgcaagctctgcctcctgggttcacgccattctcccacctcagcctcccgagtagctgggactacgggcgcgtgccaccacacccagctawtttttttgtatttttagtacagacagggtttcaccatgttagccaggatggtctccatctcctgatcccgtgatccacccacctcggcctcccaaagtgctgggattgcaggcgtgagccaccgcgcccggcctgaatgtttttaaagtactggtgaccatattcgctgagggattaaatgtaaggtatgaggggaaaataggaatcagacaccagggtttactgcctgagcaatgagaagaacgacgttcctcatacggagatgaggaagaatgtggaatagcaggtaaatagcatgtgcttgctttgtttggggctgtgcagaagagactgatgggaccaacgtgctcagttctggatatattaaacttggaatgcctatttggcaccaagtgaatgtatcaggtaggcagatggataaatgagtctgaagttcaggggagaggctggggtggcaatatgaacttgggagtctccacatctgaatagtatttaaagctatacaacaggataaggtgatttaggaactaaacacaaattgagacgagatccgagcccagaggcactccgatgtttaaaaaagaggaggaaccatcaaaagatactaaggagaagccaagaagtaggagaactgagagtctgagagaatcattatactcatttgatcgactgcaacaaatgctgcttagaggtcaagcaaaatgaggactaagcaaggaccaccaggtctggcaacrtggaggccaatgccgacgtggaaatgagagttttggtgggaagacaggaataaaagtctcacaggtctgaattcaagagagagaacagcagaagaagggtagaggtggtagccataaacaatgatacattctcttgaggccttttcttgcaaagctcagtgaagaaacatggttccagagagggatttttttttctctcattttacatatgcaaacatataaaaaagctgaaagaattgtttgacaaccacccttattcttaccacagattcaacatttaatgccatatgttttccctgtatgtactgtgtattgtttgaggataacttcccctctaaatatacctcggatgtatctcctaaaataagtccattctcctacatagccatagtaaccatgaacacacctaggaaaattaaaaatatattctcaaatatattatatagctgggtatattacaatttccccaatatgtgatttgcaaaccaggatcaagtcaaagtccatgcacagcatttggttgtcatgtgtctttggtctctattaataatgatgactgtttgaaaagacctgtcctatagaataaatttgactgattatgtcatgccattgaacttgtttttctattctagaaggatagttttttagggtagtgaatacatttattactcttggcacaatagtctaacatttcccaatttccttatatctctgccctttcattttcagaaaatcaattattccaagatttgtttttcatttatcatcacttattagctctgaagactcaactgagcaactttcagggtttatataccctatattcagaaaaaaactactaccatctctcatttaccctaagaattcataggagagcatgtcttaaagctgatcaataaccaaaccaaacattttattgatcatattacatttggaaagcaaaatgaatttcctaaaatttcttccctgattagcaaaatagtgcctccgaacacttgagggtgaaagttgttgtcaaatatgcctacatgactggaaattatgayatccaaatgagttcactgggtctgataataatatgctctacatgcttatgtctatgtaataaacagcttacatctggatgagaaaattgattatacaaatatttgggcttctacaactggtcactcatctgtaagtacttaaagcaacttaaaatgcaaactgacctaacaatgcttatggttagaattccaaagaatgtttaggcattgtcaggttatgttaaaacatcttctgccacaatcttcaagtgatttatcttttctgttgtgttgaatagctatagaagacaaatgaattctgcactcctgaattcaatgaacatttcaagtttcctcacttacactgtaagattacgtagcatattttaagaaataaattataatcattttatttcacttattgaacttcttttaagctttggcattagaattttaatcaaagcactgccacttgcttacagtgatggtttttaggctctttgggcctatggactatttcaatgaccttcactagccatctagtccaccttatcctaattattaccactgcaaaagaaaccctcacttgaataaatcagtagatgggcatgaggcacctcccaggagactataattattaactcatactaaaatcaaaattgtagctattatcactcatatggtttggctctgtgtctccacccaaatctcatcttgaattgtaatccccacgtgtcaaaggagaagcctggtgcgaaaggactggatcatgggggcggccttcccccttgctgttcttgtgaaagagttctccgatggtttaaacgcatgggacttcctcctacttgctcgctctcttctgccaccatgtaagatgtgccttgcttcccctttgccttctgccatgattttaagtttcctgaggcctccccagccatgcagaaatgtgagtcaattaaacctcttttctttgtaaattacccagtctcaggtagttctttacagcagtgtgaaaatasactaatacaatcaccttatggtaagtctgtctataaatcacctgaactttcacagactatctagaagaacatgtaaccagagtagttcttgatcatgctatataaattactgatacagaaatagagctagacaggaaggggctggtagtagagaatcatcctctggacatattctcacagcctaatctctagctagcaaattttataatatatataaaaatacaattatttcacaaaattaccatgaaacgattttattgggatattagacattactgaattacttgttctgtgaggtatacagtgaaattaacatgttataaaattgtggtagccggcccccaagatggcctccaatgaatccttcacctcttggtattcatacctttgtgtaggtaggtctgtgtaacccatagaatacagcacagtgacagtaggtcacttccgaggttaggttgtgaaagacactgtggtttctgcctctctctcagatcacgtgctctgggggaaaagccaggtgtcattttgtgaagacactcaagcagcctttagatgactgcaaccacrtaagaggctccgaactggagccactcagctaaaccactcccagattcctgaccatgtatcatttcatacacaatgtatgaaatgacaaatgtctgttgttttaagctgtttggggaataatttgttacataacaaaatataactaatacaataatacatactgatttaactgaagttgtaacttcataacttatttaggtactaaaaatcacagcaacccgatgcaaagtactaaaaaaaaaatccattaatacctattgagtactgttgagggcatgaggaaagctctttcatactccacataaaacttccttaccgtaatattcatggctgacctctactcttaactcctttctaggataggaggggctaactgatctgacagcaagtttgggagaaaaaattctgaggctcggccaacttcctctcttctttccatttgggatttggctgactgaagagggtcatttgttttggcctgctctcttacacagtaaatgtagtgggacaagctctattcttgttgatagaaaaactcgaattttaaatctgcctagttctttgcagctcgttgttgctccaaatctcagctaccttttgaaacaacttttttcagtaaacttaatttcaatcttcatgtgatttaactggatccaaacacaggcagataaaaaaggtggggcattacttatcaacctctaaactaagtttaattttgtgccctcatggagtttatagtatatttgaggtttaaactaaaacacctggttttaaacagaaactataaaaaacacgattaataggtgaggccgggcgcggcggctcacgcctgtaatcccagcacttggggaggccaaggcgggtggatcacgaggtcaggagatcaagaccatcctggctaacacggtgtgaaaccccgtctctactaaaaatacaaaaaattagcccggcgtagtggtgggagcctgtagtcccagctactcaggacgctgaggcaggagaatggcgtgaacccggaaggcggagcttgcagtgagccattgcgccactgcactccagcctgggtgacagagccagactccgtctcaaaaaaacaaacaaacaaaaaacaaataggtgaaaggccgtgatcattggtaagcgtaagaaaatctgagggagaaaaaaatatagatgcccaggccccatgccaaactcatggaatcatgcatgaaacccaagcagctgcagttttaacaagttcccaatatatagttgacccctgaacaatgcaggtttgaactgcctgggtccacttataaaatggatttgatttttttcaataaaagttacaccgagtgtgcctgcctctcctccctccctccctacatgctcctgctcttaagcctctgccatgaggcttaagacagcaagaacaacccgtcctgtttatttcaatagttttggggggtgcaggtggtttttggttacatggataagttctttagtggtgatttctgagattttagtgcaactgtcacctgagcagtgtacactgtatccaacatgtagtcttttaacccccatccaaccttcttccccaacccgaatccccaaagtccactgtatgattcttatgcctctgtgtttttatagyttagctcccacttttaagtgagaacataccatttttggtttcccattcctgagctacttcacttagaatactggcctccagctccatccaaattgctgcaaaagatattatttcgttcctttgtatggatgaatagtattccacgatgtacataaacattttctttatccactcagctcctcttcagtctactcaatgtgaaggtgacaaggacgaagatctttatgatgatccatttccacttaatgattagtaaatatacttacttttccttatgattttcttagtaactttttttctctaacttactttattgtaagaatacagtatataacacatatgacatacaaaatacgttagtcaacaatatatgctatcagtaaacttccagtcatcagtgggctattagcagctacgttttttgggcagtcaaaagcatggggaaggagagggtggtccctaacccctgtgttgctcaagggtcaattgtaataatacccatttaagaatccatggtatatatggtaagtgcaacaactctagaagagagtgctaggagttggaaaaggaaagagaaaacagaatttaaagcaatctgtaaaggacatgcagggtttagatgaggtggaagggtgagggaaaaccaacatctgctgtgagggcatattaactgccagacattgttctatgtcttacctcatttaagagaatttcatttcacacatggaaaaactgaagcccagagaggttaaataatttgcctgaggccaaaattagttaaataacagaagtgggattagtagatgttttcattttatcagtgaaactgagcctcagggaggttaaatattttgtatgaagtaacaaaactgagattaatatatggccaagtttaaatgagatctgtaaatctaatgcctacactaaaacaaaaaaaaaaaagtgggaagaaaaggtctatattgcttagcaaaacagaggtagggaagcaaaaataaacttacaaaatcagattagaccaccaaaaaacagtccccattttaacttatgtggtgagaaccatatattaaagaccaccagtggcttaaaaatctttttaaaaaatgaatctgttttcattattcattagtttttatctaatgaataatgtatcttaactgatacatttactaaacaattaccagctccaattagcactcagttacaattcaatcattaaactgaccctcaatttagctgtcaacctagtcaaaacagttaagtgattttacggtcatcctcagttgcagaagtataatgtttatggctggagtcattttatttttaactaacattttttaaaaagattgctttgtaacaatgtgttatgagtcctttgtggtaaatactgctttttttttgagacgcagtctcgctttattgcccaggctggagtgcagtggtgcgatcttggatctgaggctcctgcctcagcctcctgagtagctgggactacaggcatgcgccaacgtgcccagctaattttttgtttttttagtagagatggggtttcaccatgctggccaggctggtctcgaactcctgacctcgtgatctgcccacctcggccttccaaagtgctgggattacagctattttaaggactttttaaaaagtgaagctaaacatttattcatccctattcctcatctatagggacttgtgctctatttttctttgaagactgaagtaaaaattcacctttgtgagggtcttcctataattaaaattaatcattttttcctccatagcttctacaaaacattgcctgtacaactctatttagcacttatttcatcccgccttgtatgaaaactatttgtttacaaacgtttctacttctctttaggaataaggactatgcattattcactgttgtattctccctgcatttatggcagtcctttgcacattaaatacaagctttttggctckgtgcatctcttcatctggctgttcatctgtaccctttaaaacatcctttattaaaaaaacagtaaatgtaaaaaaaaaaaaaagccattgatgaaaaagttaatagctttctcaataagaaaagagtatcaattatgcatacgtctgaactaacaaacatgaatgaaataggctatttaatacattctgttttaaaagtaggtttggtcagccatgtaaattgaaaattgggagccaccaagataactcatcaacaaatatgcactatgtactaggcactatatagatgatggtgaaccaaacagatgtaatccttgctcttacagatctcacaacctactatggggccaaaaatatatgtgtatgtgtgtgtgttatacatatatacacacacatacatgtatatatacatatacacatacacatatatacatacgcacacatacacatatatacacacacatacatatgctatgaggaaaacaaacaggtggtgagaaagaattagagtaggggtagaggacagagggctcctcaaatagggtggacagcttgacacaagacactcgagctaagactccaaggatgagaagacagttatgtaaagaaaaggggactagcattgtcagcaggtagctaaggccttaaagcagacagtcatgtgctgcaatgccagcttcaagcgaatacagttactaaagcatatctaaccttctatgtgaatgtagttactaaagcatatcctccaactttccatttttcttttgctattgtttctaccacttctccttttctgttgacaattattttaaatttcctggctaaattaaatgatggcatgaactctggggaaagtaagactacctatgtccaaataatcctaaattccttctagtccttatgactgatcaattcaccctgaagtgacaactatgtcccaattaggaaagagtgtttctttatctgcacttaattttttgatttggaggcttcctgattgctaatcaacatgttgtgtgattacttcaacaagtacttatagaacgttattttgtcactggaaaaacgttctgctgctttctgaactttaggttgctctagagtctaggaagagtgactgtacctaaagcagttcctaattactggacattctcagatctgctasagctacatgtccaattacgagaatatactggaaaaagccctggattakaaatgagaggatgtaggttttagtaccaggtcagccaccttgttaatgcaaatttgagtaaattgttacttcttttargccttgtttttgctgttttgtttttctgacagtmtkgtctctgtggtccaggctggagtgcagaggcacaatatcaggtccctgcagtctctrcctcccaggatcaagccattttcatgcctcatcctcctgagtagctgggattacaggcatgtgccaccacaccctcgaactcctgacctcaagtgatctgcttgcctcagcctcccaaagtgctgggattagaggtgtgagccactgtgcctagccttacacattgttttcttactggtaaagtgggaatatctagaagttgcatgctacataaattcaaccatatattattggcaaaaaattttaaagaaaaacatcagcttaagagtactaattgagtacatgccttggaatgagcatgagctggaaagaacaaacctgttgttacatcactcattgctgttttcatatgctgctcattgtaaatcttgctcagtggcatgattttagtgtttaaagatttatttgtttgtttgtttaggacaaagtccctacacataatctacttgcttcatatatacatacttatgcatattatgtatgtacatacatgctctcagggctcacatgaaaaaacagccattcaggtgatgtgatttatctcatatgcttactttagagtcaacagggtgttgactccactatacaatactggcatagagaacacataagtcaaagtagacaggacccagccgtaccattggctagggcacaaatatattcacatatgtggagaatgatgtacgtagaaaggtcttcattgcacaatgctctttaataaagatctggaaaaaaaaaacacctaaatgttcaaaaggatagggtagatgaaataatggtacattataaaatggaagattatgcagccataaaaataaggaaataccttaaataataacagaacaacttttaaggtaagtgaacaaataaggtacataatcactatgcatagtatgtaccatttacatagaaaaagggaagaaaaataaaatatatatagtaatttatttgttcttacatgtgtaaaatttttctgaaaaatataccagaaactggtagcactggttgcttcctaggcagaaaatgactgagtatccttttgtaccttttgaattttgaaccacgtgaatgaatgtgttacctatgaacaaaatgacaagtttagatcagcaagacagcagtttgagatgaaatgggattacacccttagtaggaaaaactttttaaagcaggtggtacttctaagagcaaatacctgcacatggaatgttgaaactataaggaactctccttaagagatccatctattccaaacttctcattttatagatctgtaaactgagaccttaaaaattcagtgacttgcataaggtcacacagcagaagagatgggattagatgctagatattccaatatcaagtttagactattaaaaattcagtgacttgtgtaaggtcacacagcagaagagatgggattagatgtcagatattccagtatcaactttagactattatcacaccatcttctcattttctgggggcaaaacagaaccaagtaagtttgggctacattacgagttgtcatgtttttgtttttgtttttttgagatggagtcttgctctgtcgctcaggctggagtgcagtggtgtaatctcagctcattgcaatctctgacccccggggttcaagcaattctccctgccttagcctcccgagtagctgggtttacaggcgcctcccaccgcgcccggttaatttttgtattttttttttttttttttagtagagacggggtttcaccatcttggccaggctggtcttgaactcctgacctcgtgatccacccacctcagcctcccaaagtgctgggattacaggtgtgagccaccacgcccggccgagttgtcatgttttatctaaattttagagtctaatgtataaattaaccttaagccctgaaactactaatttcttgtttggatcactatacggctacacttaaaaatatgctgtgcatacctctatcattgcatgtatacaatatgatagatgcatgatatgacagacacacaatatgatacacgtatttttttctatcctaacacatctgaatttactgaaataactaaaatgtcttaagttacttttttaaatatacacatgcatagcacaagcgtgttgccaaaaatatgaatacaggtttacaattccttaactaaaacccaagggttggatgtgttttagaaataagaatttcatacaatttttaagtgttacagggtatataaaccattatataacacataccaggggccaagggcagcaccccataatcaaacatattaatatagtttcagcaaaacacatgggataaagactatatacagcttctcaatagttcaggtcatattttgctaccaaatgaattttgttgccaagcttaagaagtttttggttttcaccgctttctgaatgttagattgagatgtgggattacagactgtactcatagagtgcttctagaaagcagtcagtcactkcaactctcattttttttttatgagactaaaaaagaaatcatagcaagtagcttttatatcccaggtttgggccaaagacttgtattgtggttaaggaatctaacttagtagaaggtgcacgagctgacatcgtgagtggctaaaatgagagaaaaaaagagaaaatcctaatcatacagaagcactgaactactgcagctgttcgttagttattaatttaataaaagcttcctccctttaaatcatgtgagtttataactggaaataggtcaataaaatttctgtcccacactgctgacaagcgatggacgcaattagctttaatcccactggaaggtactgcactctctctgggaccaggatatgtagaaaaaagcatttcaaatatataggaataaccagaaatgtatacagtattctcaacttgggaccgttactctataatataaacgaaaggggttttctagtcaatctctgctgatctcctgtaccaaagttcttccctttrtaagtcttgtactaccttttacaagaggaaaaagctctagagcgaaaacacagaacacactaaaatcccttcctttctctttacaactcaagccccgcctccattttgtttctgttactaatttttcttctgaaaaaataccaaatttacactgaaagactaaaattcaactttgcagacaacgttttaaaaaatacaattcagtttggtgatgttgttttgcagtcttacaattttagctacattttaactgaaccaattgttttgttcaatttatgagttaatactcagcaagtttgttttttacaaatagtgtattccattctaaaaatggaagtagcagtggtgaacaagaaaacaaccctctgagttttgtctatttcaggaggaagtactactttctccaattttaatcacaattcataaaaaagaaaaacctaactagctagatcttaaatatacaaatacattaayaatctagtaaagcaacagaaaaaggtaaacaaactaaccagcctatttttgtctggagaaaccccaacaaactgctggattccttggccatttgcattcagaagtaccaaaaactaaaatcctttttactaaataatttcttctacacgagacttgtttcctccacaccaccctatccaaattgtcagcattattccagaatataatcatttagtttgagaccactaaaaaaccccgcagtccaaaataccaattgtggtttttctgtaaagaaatggtcagaaactacaaattgttatcctaggacacagaaccaatcgaccaaaaggacttctggaatatgctgcccccaagatttagaatgcacaggcagaaatagcatacgcggtcacgatgtcccttaagccacatgaccttcctacgaaagcaaaggcttaaacttatcaaatgagaactccccctttctctgaagttaaaacaaggcagggcagctggaattagagcagcagggacagatcggctgttgactagtcagaacgggtcgtggaatgcaaagtccctgcgctttcgctgctccccttaccgtgagaagatctgggagggaggaaaggaggagaaacaccccagaatcctggtagaaaagcccctggcctcgaagatgggctctagggagacagggaggggcagctccgtgtgtgatgaccctttgtgaacatgcactctgtggcagcttcagctccaccgaggctttgggagagcggactacggatgcccggcgcggcccagctgtgaaggccgcgccggcggagagggtccatggcacccccgccggcttcggaagcccttccctctcccacctccgcgggtcaccccaggaaccagcggctcccgaccacgctcgcgcggaccacggaacagcgacgcgcaagcaggtctctttcgtcagcgtaatccctccgcagaaagccgcgcactagttttaatcacgccccaccccctggccgctggcgccacctccgccactcgggcgctttccagcagcttccagaaacgtcgcctccccaaacccagccactcacacatggcgggctcagcagccaccggccccgcccctcctcgtcgccgcagtcgcaactgcgtctgcggccacagggcggacagccacgcctctgcggagggcgaccggaagtgctcacgtcttcacmttccccgccamgccaccgtcctttcaggcccagcgtgcagcaggaaggaggactcttttgccgcggactcaagccggaagccgccttcctagtggagacgcgagtgggggaggagcagtccgaggggaacgtrggttgaacgttgcaactagggtggagatcaagctggaasaggagttccgatcgacccggtaccaagaaggggagtgcccgcggcaggtaagggagaagagggaggggtttctttccgctctcgaaattgggaaaagagacagagctgggatgacctatggggtagtcggcgcgctgaaaggatgggctgggctgggacggggttcaagtgggaaaggttgatgattaaggtatagagttggacttacagatccgtttgggcgcagagaggtgaacgctgaagagaaaccagagtttgttttcgttttccaaggagcgtggagatgggcagggttaacggaccctgcgcctccttcggcttcttagtttgggtgttgaaactcacctcctttggtcctgttcgtctctgattcaagacagttgggtttggtacctgacagggctgggtgcagaaagctgaccctgttcctcggcttccaggtcggttgtggcctcgcttttgacagttcacgtgccgagcctactcgctctcggagggcgagctcaaatgggtgggtttaaggccccctcttcgaacagctgtttccctgggtttctccattttgcacacaggagtgtgaattaagtttaattgaatactttttgcgattcccagggccaccttgacacgttcattgtgctatctaactgggttcatgctgggctaataattcacattaaggcttctggagtataagtggttcacagaagtatgaaaaggggatgttagaagaaagatgctgggggtgaagtagagttgaggaagacagaactggaaagctaggttggtttcacagtacaatgagctttaggtcataatactacctttaggttatattgggctgtttggacggagtttgctgtaatcaggctagagtaaatagagaattttaaactaagcattgacaggctcagacttgtagaggcatcattttgacagtgatatggaagggaaagaggtagagatttgagacctttccaaagaactgtccacagaatttggtgacttactgtgcgaagagggaaataaagaatagggaacaactcaagactttctagtctgtgtgtttggaaggatggagacgcccacatttaagtgagatatgggaaggaggagcagattgtttttgaagggaggaagagcagttacttagggtcaaattaagttgtaaaatcccccccgggattttgtatgtaagtcaaagtgaattgtatttggaagaagaactggggagcccacctctggtattttttttatgtccctcatatggacaaataaacctctggtattaaatgaattttcttttgggggattctatatattcgggatttcaaccaccaacctatctggtttttcccgctgaaatgttgggtgatggaatcaggagagcagatttggagactctttatattttataattgagagagacaaagagaaaaccgtttgatttgaaaaagttttctaggttccctcaggtagatggaaattttcatcaaaaacagtttattcaaggtacatagcctactagtttcccatttgagagtaccgcagaatgatacgacgtgtactgcttctctacgcagaatgaagtataaaattagcaccaaatagtaactttaatttgtcaggtgctaaactttttacatgctttatctcatttaattcttagaagaaactaattttacaagtaagtgtctggaccaacatctgcaggtacaaagcctgaaaagcgtaagtttgactcctacatagttctcttttgtaagtagattataaatagaaccagccaaaggtaataagttgtctgtgcctaaaaagaaagaaaaaagttagcatcagtagttctcaccagaaggggtgattttgcttaccaggggacatttggcaagtcaggaaacttttggctgttggatctagagggtaaaggtcagtgacgctgctaaacatcgtcagtgcatagaacagccttcacaaacaattatttggtcaaagatatttgtagtgctgcagttgagaaatttctgtcttatggttatttcttcaggaataggaaattaagattcgccgatactttctttaaaaagcagttttatttttgaaattattccttggcttgaaaggtttgtgaagtttatatagccgaaccagaatagcgtaattagattttaaagtgaattgtgagccatcgattcccaggagatgggtgtcatagaatcatggattcttggatttgggaaagacttatgcctagaattattttacaacatttctgctaagtggtaattctcctctgccctaaaggtctcctgtatttgattttcctatcattgtgaacccacaattaaaatgctcttaattattttttgcttacactgagctccggtctcttgtaatttttactctgttaaatgtagttctgcaccataggactgcactcaaaacaagcttgccacatatgtaatttgtactaggacagtgtttatatttttgttcagataacaaaataagttaaatgtggtgtaaattagatcatttacaaataataatttgttagcagcttttaataagtagtatttttcccaactggtgaagtattaatgttggtagttgaaaacaataggaatgtatggaatatatggttcactggttcttttgttcctgtcaaatagtggcacaatggatctggggtttttctcagtataatgctggcatatttgtttcaaattgtacatagactctaaaaagttaggctttcaaattctggtcaatatagtttgctttaaatagtagctgcctctactacaagttttatttaatttgttgacaaatgagtctgctatgaaaaccggtcctgttgccagtcactaccctctgttcacaaatttgctgggtttataaatataggtatcattttcacttcaagattataattttagaatatgtttattctaggacatatagccctcaaaatctgcttactatatacgtcttataaaatagcatggttcttttttatagtaaatagaatttttatttaattgtctattgactttttttttccagggttcattgaaaaaatccttagtgatattgacatgtctcaagtgacataaattagccaatgactcggaatgatggattctccgaagattggaaatggtttgccagtgattggaccagggactgatatagggatatcttcactccacatggtggggtatttgggaaaagttagtgaacttattttttgcctgagtgcaaagttttttttttttctctatttttgagacttaaattcaattttgatgttaccagttaacttctaaaaaattgtgtcttccacggaaatcttacagtaatggcgaaagattgttttaatgtgtttacctttctgtgttttattgatacatgaaagtggaaataaaacatagaccttatgatttactgttctttgaaaatatggtacataaattctcccgggtagttgatgttacttttttccttgcaaataaaattgatactattcttaacacataaaatttaatatttaaaactataacataattctttttggaataatagctgtatttaaaggcttatatgcatttcttttgtttgccatgtttaaaataccttgtcaggatacttgtaattgaaaattataattttttctggttacctttccatttaacttttaatattttgatatattctaggaatgtctatattttaatttgctttatttctcttttagaattttgattcagctaaagttccatcagatgagtattgccctgcttgtagagagaagggaaagttaaaagccttaaagacttaccgaattagttttcaagaatctatctttttgtgtgaggatctgcaggtaaagtattaatcttatatagtatatataagatttttcttttttcttttgcttttttattaattgttttaaaagtttactcattttttgttttttagactagatttttaatatgtaatctcagtttgtaagtctgtctggtatacaatgttatttttccacctacctttacttggttgcgtaaagatgttcgtttttattgccatttgatttgcgagaggagaaaatacatttcaaggtttttttctttttttttaaccttttggaggtccttgttagctattagcatatagtagttactctctcatctctttggtttatctttgcaactgatgggaaaagttatgaatttctaatgtacctggaagagtattttggaaattggttagtccaaaaccagtatatatactctgaactaaagagagtatagaatcttgtaaattctaaaagatccttttagaagctctaaatcgcttttagaattatagtaatttgtaccgactggtacggcttttatatagcagctcattaaattctgtaatactccacattttattgtatttgacagtttatgagactgtctcatacacttttaattctcagaactttgcaagatttgtattcctatttcatgaataagaaaataaattgatttcagagggtttgggaacataagatcctgatacagtggcagagctgtggttggaatacagacttctaatttcagatctgtttattccagcaaaaaattagcagttcatcagaattacctggagtgcttttaataaatttctgagtatcacccccagatgctgattcaatagagttggcccagaattctgtggttttgtaacatttgaggatgagtctgatcatcatcagccaggtttggaaaatactagactaaatcacatggttgttaatagatacttatgctgggtataatttgaagtaaagtaatcccaggcgtgtctacaaatataaatttctttatgtttatattcagtaattttttttatgagtgtcactgtttggcactgttgcagatacaatgttaggatacaataataaaacaaaaatttcttgcccttaaggaagttatgtcatagagtgggaaagacagtgaacaagtatgtgtttttctgtcaggtgataaaaagtgctgtggagaaaaataaggcagtagggactggaatgccaaagtagggggagtttgcaattttaaataggatggtgaggggaacgcttcaatgaaaagtgcaattcgagcaaaagcctgaaagaggtgaagagcagtgagctttctaggcaggggaagcaagttccaggaaggccctgagagaatggaggctgcctgtcatgtttgtgctactgcaatgaaagcagcagagcgatagaaggtggatcagaaaaataatgggggagctggaccaagtagggtcttataagccattgtaagctttctggcttttactatgggtgaaaccaggaaccatggcagagatgttggcagaggagtgacataagttgacttcagtgttaaaagcattactgtggctgcactgttgaaaatatatgtaatgggcaagacctgaagcagggagattagttatagtataatatgaattatatttggtccttgtctatggtttccgttacagagctaaaagtcttggaatttcctgaatgataagagtgtcctgttattcagaatgagcctgtttgctaacaccggggttcatactattgtggtgacttaggatggagccgtagatagcctcagatggggcaagtagctggaaagaccacatgattagagaattaacgggttagaacttttagccccacgtacaggcctccaggaaaggagtggaggggctggagatcaagctgtataaaaatatcaagatttggatttaatgagtgggttgctgggggctggtgccgtgtaggaggtggtatgcttagaggaagtggaagcttcatacctcttctgtcccataccttgccctactcatttcttcatctataccctttataatatcctttaggataaaccaataaacataagtaagtgtttgtttgagttctgcgagctgtccttgcaaactagttatgcccaagaagggggagtgggaacctttgtagccagtcagtcagatgtactggtggcctggatgtgggattggcatctgaagtggagggagtcatgggactgagccctcaacctgtaggatctgacatggtctctaggtagataacatccaaatggaattggattataggatacccatttggtgtcctctggagaattgcttggtgtggggaaaaagcccccacacatctggtcacaaaagtgtgctgggaggatagaatatgtgaaaattgtcataatcaaaatggagtcacttgtgttaaaaaagaaaaaaaaatcctgactggccaggcacagtggctgacaactgtaatcccaacactttgggaggctgaggcaggaggattgcttgatcccaggaattggagaccagcccatgcaacatagtgtggcc

SEQ ID NO: 97217 - DNA, 336252 bp, Homo sapiens
  misc_feature (1)...(336252): n = A,T,C or G
ggtcaggagttcgagactagcctggccaacatggtgaaaccctgtctctatgaaaaaatacaaaaattagctgagtgtggtggcatgcacctgtaatcccagctactcgggaggctgaggttggagaatctcttcaacccaggagaaggaggttgcagcaagccgagatcatgccactgcactccagcctgggcaacagagcaagactccatctcaaaaagaagaaaacaaaatcatatactactcactaaaaatttccatttctgttaatgtggtaacagtttttgagacataaatggaggtatcagtgacaaaatgactaatctcatggatggcatttttggctaagtcttggtttgaacgctgactcttattctgttatttaatgctgtagattacttttaaagatttggtatacttttcttagaagtgaatgcacatagcagcggtgcattttcttgtcatttgcagtgtacaccatagatgaatggctgtgactaggttggtaatcactgtctgaataaacacaaggggcatattctgttatattcatgaattttttaaagttgtaagtgacatttgcaatatataaattataataaaagctagcgctctttgaagctggcttacaggtctcatatttttattggctattgtaagttagcatgttggtggccttcacaactgctgcattacttatttaattttaaaggatttaaattcctttgctgtgagaaacaactgaaacaaaattaattataatattttaaaatggacactgctattctctggaagcactgccactacattaataaatatttatttataatagtttaggtttgagactgaaaagtgagccttttctgtgagtcatttatttttccggtaacagttatggtgataataacataaacctttgcactatttattcgacaccatctgcagttcaaatacttgcaacttacatactattaattgagttcatgcatttgtaaacaaaaaaagggtaaatatctttgctatgggcagcgcttttaagtatttcattctttctcttttttttgcaatttttttccattatagctgggaagactttactttcaattatttaaacaccatattcactacaccatgctgactttaacttgttccacataggcaacctctatatacagtgtattctgctgcaatctgttagatacagtgtctaaaatagtgcttcaaaaaaggaaaagactattattggaggcctagaaccttcagttagagatgttttacatctcttatctttttacagcagatctgtgctattctttccctagtctttatgaaagatgtaataaagtgagggtcaaggttggagaaatgcaagagaaagtagtaggcaaaataatgaaaaataaaagagccccacaggtaattgtcctcaactgtaggaagatgggaactatcaatatgagggttacccaatggttttcccaatttcccatgataactgcaggtccaaaggatcgggcgggattcatgctggcaccagtataattgatctataggaaacaagaaaacaacttcagacattgctgaaacagggctactagcaagtatcattcattgcaatttgctgtcatttgtcacttagaggaacctcaagatattagcagctatatcaacattctcattgagcagttggaaaaattataacctaaaatggacagtcatggctggatactaaagagctactgctgtaaaacacaacatcttcaggccagctagagtgaggataaatgaggtgggattgattatttaaatggacttggaaacttactgcaaataaatgtccaattgcaacagaaaatccaattgctaaagctattgagccagtgacatcagtccgtttggaatcacagctggcaaagatagtaaacaccaattgaaatgtgattatcaactcaaccaggagaccatgaccagcggtaagatttccatgaacctagagaaagaaaaatattccatcagaattgaagcaagagtattttcgatgacaatgtattaatatcattgtgaaaggcacattttatctgtgtaaaaagtaaaggtaagtcttctaccccaccttcaactgagaatttccttctctcaccccccaaaaagaaggaataaatttatattcattttgggtcatcacagatgactgtgattactcttacaacgaccaaacaggagtttgtgctgaatgtccttttctacaaaggaagcaaaatgtgccactgcagcacttaactcgtaaaagaatttcttgagagccttgtgattttataaggcaatgattaaatccattaattaggtttaaattaattaatatatatttcaattaaaatttaagccatgtgtgtttttttttaatcagccctggtgctgagttaacaattgatactcctaatcagctaagaacaaaactaggatcggatgtctatttttttaagcataaccctttatgtagatcattgtacatcttatgaacatgacaagaaaatagtttttttctgctagtgaacaaataactgtaaggaaaatgcattaagctaaatataaagtcaatatagtaattggaatgggagaaggggaggaaaaaaccaacacaattttcgggccacctagattttgttatttttaaggcactcaagagcaaacaatgatttcttacagatatacctaaatactgccagaatcagttttcacactattaagaatcatcaaaaattccctaggagtaaattagctattttagggatgtgcctcatgccaccaaggcattatttagcaaagagtttgcaagaagcttggagtcctagtttgaaaatagctaaagatgctaccatggtgactcccaggcctcccaccacactgggaggtgtgaccagatagaggattcctgctccaatgatggcccccaggcactgggctgcgatgtagaagacagacttggcgatgctgatcttcctggtgcacaccatggccacagtcactgcagggttgatgtggccaccgctgatatggccaaagcactgcaccatggttgcaatgctgagtccaaagcaaagggagatgagaaccatgtcgaccggtaaaggcttttctgttccaccccagttgatggtggatcccaggctgaggagaacaaaaataagcatggccagaaattccgctgtgactgctttccagaaagcttgagtccagacccctttgaaagccaccatgatgttctctctggtacacaaaggtccacacttactgaaaagagaaacaaatcagcatcagaagccactacacccaggtttatgaatttaggtgaagggaacaaggcctgccatcttcgggtactgtgggcaggggctgccaggcgtgatttgcacaccaagaaagaatgcttctgctaaagctccttcatgaatagtcaagagactgttattctagtctcctttcatttaatattcaaagatcatccagtttcacggaaaattatccaaactgtccctagaaaggaaaaatgtctaaatcaaattccttaaaatattaagaataaaatatatttaccttgtacttaattcccttagagcaagtttttaagtttcgagtacattttatatgctacttacatttcgaacataaagcattaaaacaaggtgtgcgtggggggggggggtcgtcttttctagctttgcatttgattgctttgaaatggcattctgaaaatctccccctccccccagactctggattagggggaagccttctaggaaaccagggtgctgaaggctgtcttttgagaaagtgaactcattgaggggagaggagcttctggtgactagcaagggcgatgggaacaggcagggcctcagctgggacagcgacactccctccctctcctttgcgccaggaacgagcaggctgccagcgggaggagtccgggagctgagcctgcccaagggacacgcgcaccgcccagatctgggagcgcggcacggggacgtgtaaacctccgtccccagggagcctggagcacctctcagagggcggagcagcggccattcccggcccgtggcaggctcccgggcggcggccaggtgcacacgcagaagcggccccgcgagctcgcccgcctgcccgccggcccggtgcatcctggccgctggaggtggggagagatgggagtgggggatgcttttaggggaggaaggacagcctctcctcgtgcccgaccctctctcaccccttgaccctgaccgtacaatgcagataaacctgccaaagggagcctggaggctggggtgtgccagcaatgccccggtacctttcctgccttcatggtgcagagctcgggaagtcaggaaaagcgggtgtggttagggaaactgtgggcccctgagcagaaggctctatggaaaacggcttttctctacggtctttttgatggctttctgttacatgggcctataggacagtgtgtctcaccttgtggagcttctctggggagggtggtgggcagggagtctgggagagggaggacgccttctcctcccgtctatatccctcttgctgtcattagatctttggagcagagaaggggtggtttgacgatattgatgccaactgctcattctggcaggaaatggctaggattccccttttggggggggggggcaattaccccagttaccctatcatctaagacttttgcccttgtcctttgcctgtgatagtcatgagagccaagaagtatggagagtatttaccagagaatctaattgcagaggaccacgtaaggggttaggcaagaaagccaagtactttaagagattagtattattgtggctttccctttgacaaattgcggggccctcatttccccatgtcactgaatgttcccgggaacctgctttctgcgtgggtagtgaggaaatgcagtgccaaaaagggtgaggggaatttccagctcagcctagcccttagtttgctatggggctttgctttagaggtggagagagaaaaaccctttcttgcccaggcccgggtggcaggataaaggaagagctggctccacaggggggtggccagccacatcccacgcatcccctgccccagtgaagcgaatctcagaagtatgaaaaaccccaggtgggatgacaacgacatcatactctctagaggaaaagaatgtaaagagacaaaaacgatggttgcaatggggcagggagggcaccctggaggagacactaaaaatattcccaaagacggtaaactcagaaaagtcacatattgaagaagttaggagagtcacttctgaactcaccggcagcccagggctgtagccgggatggcaaagggggcaaaatgcgatcataggtgctgtcgtttgtggtcagggttaggggagaaggaggaggacaaaacagtaggctaaggaagctaggtgggcaggaaacgtccttttcagccccgcaggagacaccagaagaggtgggacccagaaaaggccagccccgctgctcacccccttcacctctcacttctgccatttccggagttctctccctgcttggcctgtcatgcacctgtttacctctccagaggtagttgctctttcagcttcaaatattcatcaaccagagaaatttaaaacagtgcaaaacaccaacacaaaacataaacatgctctttaagaatgtttttagcttttttttttttttaaatccacaaaaatctgatcttcttccaaggcagatggaccagcctcacttggctgtgaaccgtgaagtttgctggcagcatatacatatctctggccttatgagggctcaccctagcgtcacccatagcaccctgcttttattgtcagtgttcccttatatgttcacagtcactggaaatgatcaacacaattagatttgcttcttttgccccagaacaaagcgggtttgttgatgtactgaatcggacacattactttctagctgaacactcagcttcatccactccaggacagctgagcgtctgggtgagtaatttttccgaagaaatgtactatagctagattcacctccatagggtaattttcctgggcttttgcagatctgaaacatatggaggatttggctaaaaagcaycccttttcttctaccttctctatgcctctcttctgaaaatgcccagtactcagatctaaaagaaccacccacctgccctakagctgccttccagattctgcctaagaaggcacaaacatctataataaaagagacagtttcatcttttggccctaagcgttgttcccttaaggcaaagaaggacttacccccaccgccttgctgtgggtctgtcactcatgccttccccagccagagtgcagctctcattgcctgcccygcagctccctgtgtgctgggagtcagattacggccacttgtctgattgggtttttggagtgttaggggtggaaagattctgcaccatgtggcaatcgctaagttatatttgaacttgaagtagcttttctgtacctgatcactgtagacacaggrcatttcaggaatgcaaaaacatttacttaattttttttttttkgagacagtaatttttgaaaatgaggattyccttaaatctttatttgaattctttctaccatgaagaattgttcagaatttgtctkgttkggttatatgttgtagttgaaattgggcaattattagaaaatgaatttgtataatccagcagttaacatgaatttagatagagacttcagtgcatttagtttttagccaatgaattctgtttgaagtttttgatctgagaagaagcattataagaacaatatataactgcagctccatttatagcacaggcagcactgatttggacaataaaaataaggaaacataggaaatacaggaaaaaagactgctctagggtgctcacctgactgttacattaataatctggggataagaagtagcaaacttaaaaaatatcaaagttggatggggacgaaattatggggaactgtaggtaaatttaacctctggaaacttagggacaggactgattttataatttactggtcccagtgcaaaatgaatgcaggacaccttggtaaaacactatttaaatttcaagattgcgacagcagagcataaataaaggctgggtgctcctaaaggcaggaccttgtgcagctgcgcaggctgcatgcttatgaagacrtccctgcygaaggagtttggtgaactctagaagggtctaaccattagctacctgcatcaccatctcattattattttttctttaaacagatcttaggtgcatgggattggaataatcagaattcctgatttatgacactctgtcatcactcgtgcatgtatggccctcttattttctaatagttaattataayggcttttaaataatgtaatgaacatctatgaacccaccactcaacccaacatctagaacaatgataataactcacattacctacggatgcctcccttttcccactttatatttcagattggattatttttttccagaatgaagtatgacaagaaagaaatacatgagagaagaaagactgttatacttttaaatcccagttacagtttttttgttttgttttcatttgcgtacttgagacatgggaatgggtgaagagctctcattagaaagaggaattcaaaatttgagtgtgactttcagaggagcactttattactgtttcaagcattctcagctaaccaagattgaatttagattcttaagaatatggttgcacacttattattgtacatcagtggtttctacctttaatatgctccctgaaagtcagaataaattctgatgagaggggcagggagaatttatatgaagccacagagaacacttaaaacatttcatattgattcttaaagctgtttaccatttggattttagaatgagatttttaaaaggtgcaaaatgtttgttacaaattggaaaactgtgagtttctaggcagatgtgctaaatgtcattactctgaccctaagacatttgagtcagaagtattttgagggctgtgaagctawggcacaatgtagccatgtttaggggcttccttgtgaatgagtacggtgggcagatcctcaggaatctacagagtggggctctttagggctaccggtctggtcggtgggtggacattttctaggtccactctttacaggttgtcctaggcttattagcattctctgcacagcctcggcagttgcagttaccattttacaaagtgccagcaaaacttggttaccacggtttctcagcctctttccctgttttctggctggctgatgctttccagggcagttcctaagggatgactgttcccatcaaggaaggggtcaccctcattggctccaacccctacacttattagtactctcagcagagtagcttaaaattgaccagggattaactcttcacctrccagaggtagtttttcttattaagtattgctaattaacctttttgtacttgagctgctactactgatcttcctgtgatactgtcagctctatgcaataatcagctacttatctggcttttctttggactaggggcagaaatttcccacasgattgtctgtggctttgtatgcagaatgcgataatgaaggaaagcagctataatgtgcttgtagtggtggtggaccaccaggaggtgggaagctctggtgaacatgagtaataccttctacattgaaatgttttgatgtggacctggatccaagtgagagttggaatctaactgccccccaccccccacaccactggtatgtttaaaagggcgcaattcattaaaaaattgaataacaatttattatattttcttgactttctcattgtatagtgttacgawcttttgggggaggatagttacatggcatattgatttaaaattggtctttatgccagaccaccttgtgaatctttagttcaatagccttgcgaagttgtgggtcagtaacayatgaggaaccagagagaagcgtaagtgaaaatgacaagtacttagcaaacactagctaattgacacgctttttttgttgttgtttctgaatttttaatctactatgccatactattttccttgggtgctgttgtatatctttgggatttgtggactccttctcccatccttgccctcagaacttttaatatttcttcatgtgttcagagattgaaaactgaaacaaaagcactaaacatgccagcaatgcctcagtaccagacgggaagtgtctccaggctggtaggggcagattcaatcgcaactcataaatcttactttgcttttcatgaatctcagcatcatgaattcccccagagcacttatatatcagtatgttcattaaaaacaaacaaataaacagaacaacaacagcagcagcagccgcaaccacaaccatcacgacgaagggcttaatggggctttgttcctttttcaaggaagctttaccttatggttataattcaggatggcttccagaaatagagttcaccaccgaaagagtgaaataaaaataatgatcaaatacagcaaggaatcagagtgtttaacttagcttcctgctccttagtgaggtaaattggagaaaacctatctttccaatggttgttgaacctttcacaaacaccataaatctctctctgtgccccaygccccacagatccaggtttttatgtttgktgtagcaggcacatttttcttgattcagatccaggcggactgctttggtggggkagttgtactctgctgacatttaaggcaggaattccctgggaaaataatcaagagattattttggagctgctggaaaagctccaaagggtttagggttcccctcactaggcaaataaggagagagaacgagagggagggaaagagaaaacagaaggactttattgagtgactgtatttcatctgaagctggtacaaaaaaccagaaatgtggttggatgactggatacttttcttacaccttatctcttacccagctaatatgacagctcagagtctggttgggcatttaaaaaaacagctcagacgtccatagtagacaatcagttctccgggaagcaaaggacttcgggatttaatgggttggacaaaatgtttgaaatggttaacagtctaagtgtagcctgtactagtaattgttttaraatttaaattaaatttgaatatattaaaagctaagccaacattttggtgaccactctcactcagcaacctctgtcatctacacagtgatcattacagaagggctcagagtacccatatttttagcagactgacaaagatgtttccagcttyaaggacagaaaaggtgtttaaaattctgtacacatggggtatgactggcagagtaggccaaaaaactaggtggttaaaaaaaatgctttcrgaataatgctagaaacagaacactttttaaagaagcagaagtggccataatctgtgaccacaaaaagaaatgactgatctcaacagtcaagttatttaggaatggccttcgatgacctttctaataattcagatgctttctttttttccttcctaagtgatcatacatccttctctttaacctctgtgctttttttttttttttttcacattcatacaatcaggaaagcacatctgaaattcacagggacttaraagtgtcaagtcttggcattactggttttacctttcctgggtgttcttatctcttgcctcactttggcctgtatttttgctgcagggagtatgctgcgaccacaccttgtcaggccccaccttggagccaacttaggtgattcttttatcctcaatccctttcccttctctcactgccacaggattttctgattcttcttcaaacactcctcagtatttatctccttcatgaaatctgctcttcgcaaacttgcttggttctagtcacttaaaaaacccataacaaccggaagcctatgtgatactctacagttataactaggtaatatattgactcattcactggtgttttgatgctaccttatctctcttttaaaatataagctgtagttatgggaatatatgtcctgtgaaatttcttactgtgttggtgttgatgatgatgatgataaagtgatggtaatgattttgttgataataccattgtgtagtggaaggagaagggtaagatttggcagtcttggctcgatcatttaccttctgttggctgtagacccttgacctctttgagctctgttttcatcatctgaaatggaatagatgattatctgttctgtgtttttgcaaatttatgggaaatctatgatgccctctgtgatggtttggcctgtttgacccttctaaatctcatgttgaaatttgatccccagtgttggagatggggcctggtgggaggtgtttgtgtcattggggtggatccctaatgaatggcttggtgccattcttgcaggagtaactgaattctcacttagttcccatgagaactggttgttgaaaaaaacctggcatctcttcctccctctcttgcttcctmctctcacatgccagctctgcttccccctccgccatgagtggaatcttcctgaagccctcaccagaagcagatgctggtgccatrctccttatacagcctgcagagctgtgagccaaatagacctcttttctttttgaattgcccagactcagttacttctttataataatacaaaaattgaccaaggtgtccttctcacctcattctggtttgagtccaacttttatatgcttccataatagtttgrgctcccraattccattgtagagttgtgtctagcatgctggaatcacttgtttacttttatctccatcactggcctgtgatggcaaygggagtagggaacactctcttagtcatcttactaattagtcacattgtaaagattaaaaagaattgtggagtaaacaagtgaatatggctcaaataaggcagtatcagcaggaatgctttgcaaacagtgttaataaatgtgagtaaggatgatgctgaggctcatgattttaaaaaaggcattcaagccgggtgtggcagctcatacttcgaatgmcagtgctttgggaggttgaggcaggagtatcacttcaggccaagagttcaagacagcctgggcaacatagagagacccgtctttacagacaattttttaaaaattaggcatgatagtatgcacctgtggtcccagccactggggggctgaggtgggaggatcgcttgagcccaagagtttggagctgcagtgagctatgattrcaccactgcattccaatctgggtgacagagtgagacactgctgctaaaaaataaataagtaaataaaaaaggcatttgcttatgagttaagaaacttatccatgtcaaaccttgaaaaaaatcatgcattcttaatcttattatccaaattacagaatgaaataataaatcttttctagcataggtaaggatccatgttaatggatgcatattgcttttaaaataagaarttaggtaactgtagagtataaacattaacgataaaatttcataaacttcaaatgtatatagataattccatggctacattttagagtttaaggcagaagtaatacattttgaaactttactttgttttatggattaataaaaaatatcttgcaaattttattaaaaaataagaagctgattagtatatcatctcctcattggcttattaactctttgtggttgataataaatgacattactgagtactgctgcgaataacaccgtggagaatcagtaacttggtgaaattatggtttctaaagtaaaggtgctcctcagtgtcaccctgcaatcctatatgggttcagagtcatctgtctttctcattctccagtcagaaccctagctgagacagaaaatgactctggcttccctaagcaaaggaaagtttattgaaagtatattgaggctcaaagaattgtggggaggatggagaaccagtttgcaagtggcaacaccccaggtagctctggaagctggaggcaggacctgcacatcagctgctgggatggatggmcttccagccttcctccttttctggcattgctgccttcagaagcaaaattgcagaagtgagcatttgatactgggtcagggagagagatgacttccatagagggagagagtcatcaggcattatcctcctcccaaggccacactcagtgggtgaggggtaataatgatggcagctcttttgtacgatctcatttaatccttaacacaaccctttgaaggagacactattgctgtccctgtttacagataaggagactgaggcagagagagatgacagactctgcttgaaggtcacactgccagtgtacagtgaagctggattcgaactgtggcaatcagactccagagttctagttttttatcactttagcatgctgcctcttcaagaggactctgggaggcaactcagcaggaggcttgatacaggcagctgaaaaatagcaaatgcccctttgcaccattcttccacctgtctccctttaccccagttctgcatagaacacatgcctcattcttcactgggaaagtagaggccttccacccaagcactctgtccactgctctctttcacctacacacatggcctctaacatttctgtagccaaaagaaaattwtgtattttttctcttcaaatcaaatgccatctccgttcatccagctaccccacgtcagaaagtggagagtcattcctgacttcttctctcaacccacactcccaatcaatcacaggattctgtcactctcacctcgtaaatatctcttgcattcttctcctctttttaccccattgtcaccttcttaggtcaaaccttaatgatttacatttggattattagcctcctagagagtctccctcccatagccctgtacccctctaacccatcattgcctcaggaataaacctcatttatttatttatttattttaatatttttattttgacacagagtctcactctgtcacccaggctggagtgcagtggcgcgacctcggctcaatgcaacctccacttcctggtttcaagcgactctcctgcctcagcctcctgagtagctgggattacaggcatgcaccacaatgcccagctattttktgtgtgtgtgtgtgtatttttagtagagatagagtttcgccatgttggccaggctgatcttaaactcctggcctcaagcgatccgcctgccccagcctcccaaactgctggagagtaagctttctaacacacaacctgaaactgattttgcaaccctctggcttaaaatccttcaaaggtgctgcttgtgttccaggtagatctcaaactgctgacccttgccatttaatcattggctgcaggttctccccacacttggctcccaccatcctgacacccacttttctttctagttacacaggactgtgttggtcagctcaggctgccgtaacaatgtaccatagactggggggcttgaacaacagacatttattttctcacaggagactggatatcaagggtaatttggtgactttggtttttcctggggcctcccttgcttgcaggggatgccttcttgccatgccctcacatgtccttttctctgtgtgtgcacatccctggtatctctctgtatgtcctgatgagttctttttgacatctgaacttggaggaggacataatgcagtgcatagcagggacctgtccaacagaagtcctagggcttcttacacattctttcttcccttccctgactaggtaacttatatctcatcctttaaaattcaatttaagtttcactttttctgtaaaacctttcctgttcctctaattttatttagatgycatttctctttatttctcccacaacacccttccaaaatagcttcatacctccctatttccaagcatataaatatcagatccccttcatgttgctccccaaaagacatgagttgccccagtaagcaggtataagaatcaaaggcctttttcaccagtaatggatgactcactaggaattgtacacagggctgctttagttataattaagggttgtgttataattacactgctccataatttatggttgtactttggtcttccttgaaaatagagtaagtttgtagaaaaattggctaatttcagaatcatttgataaaatcttttaccaaacacagaatcctatactgtttaactggttagagtaaaaaaataaatttttatttcaaatgggagagacttcttgagaaacaatttaataaaccagtaaagtactgacataatgaactatgatttgtattgatatctgagagtgattggtacaatagaacattgtaacaaagtctgaatggtttcatagacatactcagtatatacttaatatttttgttgtaatcatttttttttgtgcacagtctttgtaactgaccaaaggggcatatgaaaatcacctgataagctttcaagagcaatgtgattcttatttctttttattgctaataattccattttaaagatgaagaattgttgtgtggaataaatgaaagaactctatagtgccttcgtagtttcaacactttaccctttgaaagcatattacactggagatctcacagaataagtataaaacctcatattacccttttcatactgcacaacattttgagtagagaaagtgctgccccaagtgccttgtggctcgtgagatgttagggaggccaaaagaaattgctagaaccagaactcatgagtgcctcaaggcctcagcctcagttgagatcattaggtttaactacagctgaatatgggaatatagttcctcagacactcctaagtattatgtcatcccagaaacctttaattttggtgaaagaagaacaagtgcttccatagttgataagattaaagttctaatggttagttgtctgtcaaaattacatagtagtagaacacatgaactattccccgagttagggttctgaagatttagctctaaccattgtaatttgttcactccaacaaggaagctgaactttgatcttcttggttgcatcacatcctcactacataatacatggagtcaacagtccatattgtatcttttaaaagagaaagtgaaaacagatccatttaaccattttcccagtaaaattgtttgctctctgaagctaaagatggcaaggtggtcactttcagtgagcacctcaatcttgaaatcttgatcgaggtgtgtgtactgtgtacaattcctagtgtgttgtccatctagtagagttagatttcaaaatcaacagcagaagtagaactgaataactgaacatttataaaattagaagataaagagtggactaagcaactaagaaagtattttaggacactttaaaacacctagaaataaattagtttaaacattcagtttgttacctatggcaaaacantaaaattcttgaaatgttgggagtggacaggcaggtgtttgagatatcattctttctatttctgtatggttgaaatattaaataaataagaaattaaatacatatcgtaaatgctggttgatattattatgctcagtgttcctgcccagctgcttccgcagggtaatgctctctgaagatttatccatgattcaggaatactccccccaacctgggggctctgatgctgctccgtcttccctttgcttggctctgataggtacccyagagccactcccctggctgctcaaactcctggtatcccctgcactttcttcttatgtttagccagtgatttcaactcctacatcacaatgaaaagaaaccttcaaagggaaatccttcaaattcctgccaccaaatctaaaaatgtctccacatctgtgtcatcccctccttctgtttcttactggagaaatatccctcccttatctcagatgaatttctccacttctgttatgggttccgccctctcctacctcctctagtaccattctctaatccagcagtcctcaaattgaactatatatgttgacaycatactaggaactgaagcagaaaaattttaaaaatatgttataattttcttaaaatatcaagaataaacccaatatatgttaactaaattgaatttttatttatttatttgtttatgtttttgagacagggtcttgctccatccaggctggagtaccggggtgctgtcacagctcactgtagtctcgaacgcctggactcgagtgatcctcctacctcagccttctaagtagctgggactacaggcatgcaccaccatgctaagctaatttgcaaacactttttgttgagacggggggtcttgctrtgttgccaggctggtgttgaatttctggtgttgttcaggctggtttcaagtgatgttcttgccccagcctcccaaagtgctgggactataggtgtgagtcaccttattttataagtcacatttatttcataaataaaaataaatttaattttcaaaacaaaaacaattagtgaaaagagagcattgttttatattttttcaaatccctttaagtctgatttagtagaaatcacctggatttctgtatacaatctattgtgaaatagttatttagttgaagtatgagaagagagtcctaccccatacacatatgtagttggaaaagggaggacttttttttaacaatctgttcagataattgtggatatttttctttaatactataccaaaacttaacaagtggtactttcttaaatctagttgcaatgtggaatctgaaagtatattaatgattttttaatatcttgttactttaaaatccattaatctatttacactttgaactaattttttactaaggcatgatttttaacattattcatggtgttttgaaaaatattggttcactgaggtgtgcagaccatccaaatgttggcatattttattttataacataaaaataccacattcattaatatgaccaatgacatcagagcatttaagcattgagagctgtcaaactcatgaggctgatacaaattttccaaaattataatttttgcttaaaagctcaaatattaatattggaaacaaattccatcagtttttcttgaggtgacaggctcattttgcttactttaagaaaatatcttccaaacattcaatttgaatagccatggtttgttagccattctttgaagtaaaaatagtatttcatgaaaaaaggggttagttcagctcacaactatatagacccmaaaaaaaagccatcacacttggtctacaggagaagtgctttatatgcactttccattttgccacattgaatgctaaaaagatatggactgtgaatcaagatataataagattaaaatttgtgtgtgtcaccaagaactttcttaagtgaaactggtgttgatcttactgtgtgtggtggtgaagaggataatgaccgccatgatggtgtgatggctctaccttgattcatgccatggggccagcagttttatccattgctatggtttgaatgtgtccccccaaattcatgtgctggaaacttaatccccagtgcaacagtgtggagaagtggagcctttaaggggtgattaggtcataagggcagaaaatgaattaatgccaatatcgagggagtrggtgagttattgtgggagtggattcctgataaaaggatgagtttgactccgttcctcttgctctgtcttgtgtttttttactcttcagtcttcctccatgggatgatataacaaaagggcccttggcagatgcaagccccttgatcttggacttcccagmctccagaactgcaagaaaaaaaatctctcttctttataaattacccagtctcagatgttctattatagcagcacaaaatggactaatacacccaccattgcttttgcactgataatacaaaagtcacatggtgaaaaaggcaaatgctatcttattattattattatgaatacagttttgatctctcagcctccctgaaaaggtttttgggacccctagrggtatgtaggccaccctttgagacccactgatctaattgattgtctcctttttttgtatcttaattctctaattcatattgtgtctgtatcttttaagcatgctgatatgtctcccaacttagaaaaaaactttaaaggtaactccaagttactcaccaaagaccattaaatctattttccctttacagccaaatgtctttaaagaatcatctccacttattgtctctgcttttcccgtcttccatgctttcacacccattccaatctcatttattcccttatctgtttctgtaaactgctctttttaggttccaagggcctttcctgtcatgtgactccaggagacatgctccagtccttaccttccttgacccttctgcagcatctgacccctctgaccactttgttcatcacaatctgtgccatgaattctgctaagtgctttaaatgaaatagctcatttaatcctcacggtaacctggtgatatagctaggattgttattccatcttataatttagaaaactgagaaaactgcccgaggtcatacaggtcacaagtagaagtatagagtctcaaggtcagctctccatgaccccagatccagaggccttaaccacaatatacccctttttggaaacactcacttccctttcccacagtaccactctccaggtttattttccttcctctctaggtctttgtatgtgaaaaaaaatacacttgttccacgttcttgctttgcttatagcaaaagtcctgggaaaggttacttaactggccatggctaagtartgggcacacccagcccctgcctttgccatactgaggaatgggttgtttgtatcctttagctctggaaggtacccctaagcctgtacccaagggacttgctcaagccaaagaataattggatgttacttcattcagaattgataaatggtcactaggatttattcttctctttcttcttttttttttcactgactcctactcatattttaagactcaacttagatactgctytttcccagaagcctttcctgacttccaaatctggattagctgtgccccttggtgccctgagcttcctcccttgtggtattgtcttatggtgcattgaagttgctggcttacatttcttctctgagttctagctttcagatggcgagattgtgtmtgagtttcaccttacacccccagaatctggtacagggcctggaatccatgtcccttaatatttgatgaataataaatatactgggtgtgaggaacgaatgggaccttcctgagatatgtatctggaagtcattaatggggaaaagtgctctcaagagtggtctaaagattttagaattrttttcacagaaatagtgtttgaagtcattggaacgaattagacactatgggagaaagaagaaaaaaatgtctccgggaatgggaaaataagagcctatgaaggaccctgaaaaacacatgggttagagttgaaattcatgtggctgcaatgctrtggaaacaaaaagagggaagttcataaaatagggataccctggggtccaacagttgcaaacacattaaagggaataaaaattttttaaatgccatgtgattttgaaataattctgtggttttaaaaagaactgttgcagttgaataaagataaaaatcasggagtgaggagaaagtgcatagtgaagaaatcgaggttgaaggtgaagcataatatatacagctcagtggttctcaaccaggtatgcacatcagttcacctgcacagatgtacaaatcactaaccctggcaccatttgcagttttctcattcagtagatctggaatggggcctgggattctgtaattttgaaaagcgttatagatwactgaacctctggttgaaaatctttagtgtatgtccatcactttattagtttggctggtgcaccaatgaaggaagtaaggttaggggaagtgttatgggctgaattgcattccccccaaatttatatgttgaagccttaacccccaatatgactgtatttaccttaaataaataatgaggattaaatgacatcatacaggtggggccctaatccaaaagggctggtgtccttattagaagaggaagagacactggagtatgtgcgctctctctctctctctctctctctctctctctccacactgagaaagcagccatccacaagctaggaggagaggtctcaccagaaataaatcctgctggtaccttagtcctgaacttccagcctccagagctgtgagaaataaatagctgttgtttaaaccaccctgttttagtgagcttcactaaaaataagggagaggcctttatttctaggatactggaatctagtatcctagttatttctaggatactagaatcaagttagagggagagaatgagccaatagcagtggataggaaaaaaacaaaatgattgaatagaaaggtacagctgagaaagccagaatctagaaaatgtgagaactgggattacagagaagtcagccttggagaaccacattatagcatttctgtatatttttcatttgatcctactaatggctttgagatacgcagatgaggaarattgatttcataggggccagatttgtacagttgtgaactggaagacctaggacgaggaacgtgtctgaattagcttttcctaatgagctctccttccacagcattttccaaactgctttcatttctgtgccaccttcaccatttctgccatattgaagtcagctccttactattatttttttgtgtgtatgtatatgtacacgtgtgtgtgtgtgtatcaacacacatattcaactctgatttttacttagcatcaacctatgcaacaataccacaggtttgacacgctagttatatttttaaaatgcatattaaattcaatatatatactttcaggaaaatccattccatgtatcacctaagggcatcttgcataccatcagtggcccatatgctgcctccatgatgaggaakgacactgtttttgagaaaggaggaaagaaaacgaggattcaggaggaaatgccttatattaagatggagatgaagatttgtgtgcatctcatttgaaggtggttaaaggtggttagcccctcaggcagtacagatcaaggaatgttggataggacatcacagaaatcattagagaattaattactccagaatagaggttttacatttttcaagtggtgacttgggctctgctgtctgttagtacgtcccctgcagagcagcgaaggatgaaggcagcagtagtcctggccttagacctaggcactcgggacccctgccctgggttcctgtttgaggatgctctgttccttcccaggatacaccaccttccttcttgggcacacccacactctccataactaggactctggaattctctgctcttagagactggacctgtctcttcttttgcttccctctccccacctgaactacattgcctctgtctgcaaccttaggttccagtgacggccaatagacagctggtggccaatagttagcaggtgtgtgtgtgtgtggacctaggactgaggtgtccacacacacatatgctaggctccttgtgctgcagagtaaagccatgggtggaaagaaaagggagggacccagtcatgtaaatattaggaaagaacttgattactgcagactcagagaactgagcaaaagagagagaagcaattctcagggaacaggagagacagttcaaagagaacatgccctgcaagttccatcctctgcacattcttaccactttgtagtaggaattagaattatccacagctgtgcaaatattgtgaggaagactttatttaaaatgggggctggatgtggtgggtaacacctgcaatcccagcactttggaagcccaaggcaggatccctcgagctcaggagtttgatacctcgtctctactgaaaaaaaaaaaaaaattaactgggcgtggtagtgcacgcctgtagtcatagctactctgaggtggaagaatcccttgagcccaggagtttgaggctacaatgagctatgatggtaccactgcactccagcctgggtgacagagcaagatcctgtctcataaaagaaaaataaataaataaataagaaactttaacaagcagaccaagagatagagtgctgtgtgcrgttagtaccaaagactagattcatagaatcctcactgtggccattttgatacagactgaattggaacaggacaatgtagaacacagaggaagaacagcaacaggagtggaaacaagacaacaaaaaggccctgcatgagctgtgcacagaaatgttcccttacttgcactgggctaagattttcaccaattcttcaggaaaaaagaaaatggaagttagcattgaaatgacaccaagtattgttggttttggtttcaatcagatacatatgtattgaacaaactctatctttcatatattaaggaaggctctggtgttaataaaatagcatgaaaataaattcctgcaggaatcaggtgggagagagactacaggtggagaagatttaacatagagatttggagtaatttgtttggaaaatgtgctatggaaggcacgtaatataaataataaggttttggtcagctagcagcacatttgaagctagcatggatgtgtagggaggtcatcaagattctatagttttccttagtaaggctctgcagttgggaggaggagcaggatgaacgggtggagggaactgggtcaagcttggcacagtacccacttaaatattgaagtggctgaccttgctgcctgggctaattatcatcatcataatcactaaaaaatttttttgagctcttactatatgccagtttctgttcttaagtctttaaatggatcatmtttgggctgggcaggaggcatgtgatcataagagaatcagcaagctgtgtaagatggaaaggcaggcagagtcattccaaagcttagtaaaggttctagaaatttgtattcmactgcttcagtgtatactgaacatggatgaagttcagtatgagaaattcagctttaaagatttgacagttccmaaattaatattgttataatgtccatactacccmaaatgatctattgatttaatgaaatccctatcaaaatttcaatgacatttttcctagaaataaaaaaaaattctaaaattttcacggaactacagaaaactctgaatagccmaagtaatcttatgcaaaaaagaacaaagctggaggcatctcattacctgacttcataatatactacaaagctatagtaatcaaagcagcatagtactggcgtaaaaattgatgtacagactaatggaacagacaggagggcacagaaataaatctgcacattacaatccattgttttttgacaaagaagccaagatgtatacaytgaagcagttgaatacaaatttctagaacctttaccaagctttggaatcactttgcctgccttcccatatcttggggggtgtccaccccactgcgatgtcgatcgtaatacccagccaggggaggggggtgatattactccccatatggcggggggtgtccaccaccctgctatgtggatcataatacccagtggggtggaggggggtgatattactccccatatggcggagggtgtccagcctcctgcgatgtggattgtaataaccaggaggagagacgggggcgatattgctccccatatmgcagggggtgtccacccttctgcgatgtggaccgtaatacccagtgggagagacggggtgatattacttcacatatgtcggggggtgtccaccccactgcgatrtagaccctaatacccagagagggagaaggggtaatattactccccatgtcatggggggtgttcaccctccttctatatggggagtaatatcatcctctcccatcctggatattaggaacaatttcacagggtgtgtgtacacagcctgcaatgttgaaagtaatgtcatcctctccccctccggatattaggaacaatatcacaaaaggactgtacactttttgcgatatttcgagtaatatcatcctgtgattccctgaatattgggagacatattttccacaaggtgggtgtacactcattgctatactgggagtaacatcctactgtaccccccggaaattatgagcaatatcacaggggtgcacagccattgccatagcagaagtaatatcatgcgctccctcactagtttttaggaacaatatcacagggggawgtacaccttctggggtattgggaataatatcatcatctcttcttgtagatattaggtacaatatcacgggggggggtgtacaccccttgctctattagaagtaatatcgttctcgcctcttctagattttaccaataatatcacaagcggggtgtacatcccttgttatattgggagtaatagcatcttctttcaacctggatattgagaacaatattacatgggggtgtacatcccttcaatattcggagtaacagtatcttctccactcctggatataagaaacaatatcacaggcagggtgtacaccccttgttgtattgggagtaatagcatcttctttcaacctggatattgaaaactgtatcacatggtgagtgtccatgccttcaatattggtagtaatactaatttcttccctcctggatataagaaacaatatcacgggtgtggtgtacaccccttgcaatattgggagtaacgtcacctctccctatgtggttattacggagaaaatcacagggtggctgtacacttcctacgttattgggagtaatatcatccacaacccccctggatggcaggaaccgtatcacagaaggggtgtacagcccctgcgatattgggagtaatattattctcttgtccctgtacgttaggaactatatcacaggggggctgtacaccttctgtgatattagaattaatgttatcatcttcyccactgaatattaggaacaatatcacagaagggtgtacaccccctgcgatcaggccagtaatatcatcggctccttccctggatattaggaacaatttcacaaggtgtgtacaccccctgcgctattgggagtaacattattctctcttcccctcgatattagaaagaatatcacaggtggagggtacaccccaccccctgcgatattgggagtaatatcatcctcttttaacctggatattaggagcggtgtcacagggggcgtgtacacttccttcgatactgggagtaatatcctctctccccgtaaatagtaggaaaaatatcaaaggtgtgtacagcacttgcgatattgagagtaacataatcctcccctcacctggatatcagaaataatatcacggtgggggggtgtacacaacctgcgatattgggagtaacattattttctgcccccatggatgttgagaacagtatcacaagggcggtgtacaccgtctgcgataatgggtgtaatagcgtcctcactccccctagatattaggaacaataccacaggcagattacacacccgctgcaacgttgggagtaatatcatcctttcccccctggatactaggaacaatatctcatgggaggtgtacagcccattccattttgggagtaatattaatttcttcattgctggaaataagaaacaatataacagkggtggtgtacacaccctgtgatattgccagtaatagagacttcgccccccccaccggatattaggaacaacatcaaaaaggggtgtatacagcgatattgggattaatatcacgctctcccccttgaatttaggaacaatatcaaagaaagggtgtccaccccttgcgatattgacagtaattacatcctctccctccgtggattttaagaacaataccacatagttggtgtacacgcactgcgatactggaagtaatgtcatcctcttccccctggatattaaaaacagtatcacagaggtggtctacaccccccgcgatgtggccagcaatatcatcctytcccccactggatattgggaacaacatcacaggggtgtgtacacctcctgcgctattgggagtagtatcattctctcttcttctggatattaggaataatatcataggtggggtgtacaacccctgcgatactggcagtaatattatcctcacgcaacctggatattcaaaaccgaataacaggggggtgtacaccccctgcgatattggtagtaacatcattctctcccccacttgatattacaaaacaatatcccaagaaagggtgtacaccctctgagatattgagagyattatcatcctctccccaactaaatatgaggaacaatgttggtgggggggatgtacaccccttgcgatattgggagtaatatcctctccctccctggatattagaaacaatatcaaaggggtcgtgtacaccccctgtgatattgggagtaatatcattctaatctccccgggatatttggaacaatattatggagggggtgtacaacctctgccatattgtgagtcatatcatttctcttcccctggatattaggaacaatatctagagtaataatatcccttcccttctggacattaagaacaatatcactgggtgggtgtacagcccctgcaatattgggagtaatatcatcctctccctctctcgatattaggaacaatatcccaaggtgggtgtacatcccctgcgatattgggcgtaatatcatcgtctgccaacatggatattgggaacaatttcacggggtggggagggggtgtacaccttcttccatgttgggagtaatatcatcctctccccccgaattgtaggaaaaacttcgaaagggttttaccacttgtgcaatattggcagtaatatcatcctctccccacctagatattaggaactatatcacaggatgctgtacacttcttgcgatattgggaggaatatcatcctctcccatcatggatattaagaacaatatcacagggaaggtggacaacccctgcgatattgagggtaatattatgctctccccttctggacatcaggaataatatcacaggaggtgtgtacaacccctgcgatattaggagtaatgccatcttttccccccgaatataagaaacaatatcacaggaagatgtacaccccctgagatattgggagtaatatcattctctcctactctggatattcagaacaatataacgggggtggagtggcgtgtatacccctgcggtattgggagtaatatcttcctctccaccgctggctattaggaacaatgtcacagaaggggtgtacaccccctggtgtattgggagtaatatcatcctctccgtccctggatattaggaacaatatcactaaggagtgtacacctcctgtgatactgagactagtatcatcctcttgccccctggatattaggaacaatatcacaggggtggtgtacacctcctgcgaatttggggcaaatgtcatcctctccacctttggatattagagacaatatcacaggaggggtctacgccccctgcaatattgggagtgatatcatcctctcccccccggatatcaggaacaatatcacagaagggatgtgcacccactgtgatattttgagtaatgtcatcctctacccgctggctattaagaacaatacaggtggtgtaagctttccgcgacattgggagttatagcatcgtctcccccagatatcaggaacaataatattaatattaataattaatatcaattattaatattaataaaatgatgctaattaatatcaatcattactattagtaattaaagtgcttacaatgaaattaatgttaataacatcaataagagccatagtaaataaaacattagcaatttatattgattaataactagtattagnattaataattaataataccattatgttagaaatcagtattagttgctatcaataattaataataataattagtgattactaatgacattatcactattatcatttctaataccgcacggggtctacacccaactgtgattttgttcctaatagtcagggcaggagagcatgatattagtttcaatatcgcagtaggtgtacacccgccctgtgatactgattctaatatccacgggtcagagtatgaaattactccaaatagagcagggggtgtccagccacccggtgatattgctcctaatattcacaaaagaagagaatgatatcactgccaatatcgcagggagtgtacacctcttctgtgatactgttcctagcatccggagggggagaggatgataatacttaaagtatcgcaggatgtgtacacccaccctgtgatattgttcctaatatccaggaagggagaggatgatattactcccctcatagcacagatgtacacccaccctgggatgttgttcctaatgtccatggaggagagaggctgatattactcccaatatcgcagggggtgtacatccaccctgtgatactgctcttaatattcaaaggccgggaggttgatattattcccaacatcgcagaaagtgtacacccccgtgtgatattgttcctaatatccagaaggggagaagatgatattactccccatatcgcaggaggtgtacagccactctgtgattttttttaataagcgggggggtggggggagaagataatattattctcaatttctcagggaatgtacaaccccctgtgagattgtccttaatattcaaagacagaggggatgatattactcccaatatcgcagaaagtgtacaccccctagtgatattgytcccatgatccacgatagaagaggatgatattactttcaatatcacagaatgtgtacacgcacccagtgatattgttcctaatttcaaggtgggagaggatgatatgacacctaatatcgcagagagtaaaaacactcctgtgatattgttcttaatatcaagggtggggagaggacgatattactgccaatactgcagagggtgtacacttgtctggaaatagttcataatttcaagaagggaagatgrtattactcacaatatcataaacaagctgtcggtccaccgtggatcgtaatatccaagggaagagaggggggtgatattactccccatatcgtggggggtgcccacccccctgcgatgtggattgcaatatccagggggcaagatggggatgatattactccccatatcgcggggaatgtccaccccactgcgatgtggatcataatatccacgatatgggggtgatattactccacatattgcaggggggtgcccacccccctgcaatatggattgtaatatccaggggaggagaggggggtgataatactccccatattctcttatgatctcatgcctcctgcccagcccagagatgagactttccttacctaatgagaaaaggacagtctcttcaacaaacagtgctggaaaaactggatatccacatgtggaagaataaaaatggaccctcatctcacaacatacacaaaaatcaactcaaaatggattaaagacttaaatgtatgacccgaaaatgtaaaactatggaagaaaatataagggaaaaccctatgatgttgatctggacagtgatttttttggatatgacccgaaaggcacagacaacaaaagcaaaaataaagaaatgggattatgtcaaactaaaaagcttctgcccaagcaaggaaataatcaatagaatgaagagacaacctatggaatgagagaaaatatttgcaaaccatacatctgataagtggtcaatatccaaaatatataaggaaatcaaatgactcaataacaggaaatcaaataacctgatttacaaatgggcaaaggatctgagtagatatttctccaaagaagacatggaaatggccaattgctaagaaagtagattttaagtgttctttttacaaaaaaagataagtatttgagatagggctttgttaaatagctgaattttgccaatctacaatacataaatatatcaaaacatcatgttgtatgctataaatatatacaatttttatttgtcatttaaggtaaacaaatttttaaaaatgaaacaaacaaaaagatttgacaattccagaatgaatgactgagataaaatgtagtgatctgatcatcttgaaaggtcattacaattgattgaattattttggctgttgtggaatattttccacgtggccttgtttggaagcagggttataaataaggtcatcccttcctgattttagggatgtgaaatcaaacttagtattttaaaattttgttttgagttgggcttccactggtagaaaaataaatgagaacttaattccattatttagaattgaaaaaatagatttttaaacaaaatgatttgtctacctgtgctgtggtggaaaagtatgggtgtctgtgacagggtttcctttatcaagtgaaaaaacttcaacccagactgggctaatttttcatttggtaatatggccatatctgggaagcaatcatttccagatcttaactggcatttcaattactaacttttacatttcacatgtttaatggaacctggaaaaggagacacagattttagtcttcttggctagtttgtgggtatagaacaatcttaactcggacatcgtggaagtcagtgagctgtgtagacaggaccttctggggagctgattgttcatgcactgcaaaactctctttcaattattgaaatcaacttttttccaatgcctcaaagcaaggacgattctgaggcctttgaaagcaatttttcattttgtttctttgcatactgacacatctcgatgtttactacgtaacagaagagctaatttaaagcagtgtgttgctaagcctagctctctccctatgtctccctgcctctgccaccctggatcctgtggtcctcagtacttttctgtgccatacattagaatcccagaatggcattctaaataggagacaggcggcagagtagtaaaaattgagtgaatttatgattcaactgagaagattctctttccagtattcttttccccagtaaagtgattgtactgattcctttgtaaatttggtcrcttggaaagttctaaggattgagcaaattgcttttaaagaatctccattttstgcatatgtatgtcacctactcaaaatcttattttccagtttaaattattttctaactaatatgttatacttccctcagcaatccctcaactgtaagaaaaatgcatttttttcttctagtgataaatagtaagttcattgcatttcttagaatataaacattcataattgataacgtccacacatctccccagtcctcatgtttgtattattagcttaatatggaaagactgtgtgtgtgtgtgtatgtgtgtgtgtgcatttgtgtccataataaaagagaaatcttatgtgtccataataaaagagaaatctattktgctaatgagagtttccaatcaacaaattttgccttgtgaattacagttttaaagtactttcaattrttaaatttattgctatttaaaatcctatttaggaaccttgctattaatactagaactttagttacagcctcaagtttgagcccctcccaaaaaatctcatctcctggagcctgcaaaagtgtataaaatatgttcagaaaaatacatcttggacagccatggagtggaatggagagctggtgggatatatggctgagaggagaggtccaagacagtgcctttcctggtcacaaggtcaaggtcaatatggctcacatgggtgatgccattttcttcttgttctcataacatccagaagatgtgctggctgatcagcagttttgcagaactgctactttggttctcagggagtgctctagaatatatttacataacttgagaaaaatgtcttgagcatatactgcatggccagtactgtgcctgagccctcttagtgtctagatgtgaattgtagttatagtctcatggctaaaagttgttttgtatttcagtctcttctgccacctggtttttaaaatgttttcctttttgagaaaatcacaattacctgtatatgtaaattttattgttaaagatgagtactgatattttgactttattttgggtcataggcttgcaaagctttacttaagacttcagtaagtaaaggcccatgactgatttgtagaatcactgaaataatagtaagactctacttctcagaagatgaaacagagtcttagagaagtttattactaaattagacagtttttttttktkttgtttttttttttgagatggtgtctcaccctgttgcccaggctggaatacagtggcacgatcctggctcactgcaatctccatctcccgggttcaagcgattctcctgcctcagcctctcaagtagctgggattacaggtatgtgccaccacgccgactaattttcatatttttagtagagatgggggtttcaccatgttggccaggctggtctcgaactcctgacctcaggtgctctgcccgccttgtcctcccaaagttctaggattacaggcatgagccattgtgcccagctgacagttgtgtttttaacttgaattttatacttaatttttgataagaatttttatttggggtgtattatgatatttgaatatatgatattttgtgggtatggagattgcagatgatttaccagatttgcagagcaagtaatagaggacagtttattccttcttagttttcacttgctcttcttccacatgtgttagccactgttagctccactccagatgagatagagcttcttttctgtctgagcatgaatttgctgggagccatgagataagttttttcttaggtcacatagttattaaataaatattcactgagtttaatttatgaacaacgaaagtaaaaccagacacgattcctccccaaaagatgagctcatgtgaaacagtggggaatgcatcatctttcaggttaccagtgtatggtggcactacagtatcaaggttatgtattatagacaataagtaaggaagacatatctgagctgattctaagatcagaatctggtgatgtgttaattgaacacttggcaattgctttcttagtttacccattcagattacttatcctattgaggaaatgaagatagaaaagattggtggctttattatatgttacactgatgctttsggttagagagcatgggttgcataaaatattttaaaatgcggatggataatttttagaccagttaggatggctacattagagaatccaagacaatgtctgccattatctttacaatacacactgatttttgtgtgtaccttgtcattatgtaagcttcctacagggctgtggtaagtcatggacagggttaaggagaagggtacatgtcgagaaactaaatcacatttggagaggagatgtaacaaaggtagggttcagaggtttacyggtaacaattccaaatttggaatgaaaaagttactctttgtttagcgttcgagttgggagtttgccctgcaagagacagtcaaccactgacttcagtcgaacgtacttggaaagggaagaacttaaaccagccatgaacagaagaaagccaggttttctggaaacatcgccaaaayccagcaatttctcagaattttcagaggcgccaggggggtgtttgcatttcaatggaaaaagttctgaaagctctggaaactwttctcagttttactttctcattgaaaggcaaaaaccatggctgtaagtaagagacagaagcatttgctatggctttgttaagaattaagaaaagggacctctggaaaatttgaattgtccaatcctttgccacagagccaagacaaagtggtccaagtcataatggcaaatagaaaataaaagtactgttagctttaagacaaaagtactcaatgtctggagccactttccaccagcctgggttttaaaagaaagacagaactttctagatttaaagagacatagttgcagctgtattgcaataacataatggtagctctcataagtacatacttgtcataagtatttaatcttttcacacactacaaataccttgttaggttgctaaggggttacagtacttatgagaaacgatctttgagaagaagaagaatactatttccagttaagatttagaagaattttaagtagatctatagtaacagtcaaaagtagaaaatatgcagtatagcaaacaaaattatttttggtctaattctaccacataaaacttgaaggcaacattgtccaacagaaatacactgtgaatcacatatgtaattaaaattttctacttgctacatttaagaagttaagacaaacaggtaaaattaattttaatgctgtattttgtttaatcaatgtctcaaatattatcattttaatatataatcaatataaaaaattagaagtgaaatactttacttttaatcttactgtatgaaatttataatttatgtttacaacatctctccatttggatgctaagttttcattggaaatacttgatttgtattcagatgtcataaaatttatggttgaaaaagtagatatataaacatacttaaaaattttctaataattgaaatgagtagcaatttttagttttaaactcattaaaattaataaaattaaacattcaatttctcagttgcactagccccgtttcaggtactcaactcagcagccacacgtggctaagtggaactgtattaaacagtgcagctcaaaaaggttgctaaattcatcttttattattctgtaattttgctctttcaaatattagctaaccagataagcttgtgaaagtgactaatgccccctttattatgcgaagatattttggggggaatacaaattgttctgtgagcttcgacctaccctttgctatagaggtcatttctccatttactgttaagtgtgcatatcttgctggaactcttcaaaaaccctgagcgagctttccatatgggaagcagtgagtcacttggtggggggatttcgggagaggaagatgaggaggtgaagtagagtcagcaggaagaggagcatttttcaaccagggtcagaaatgtgaacagtaattttcaggaaataaccacatattttcttattattaaaataattattactacaaaaaaattaataacattcagataagcctgaaaatatagaaaccatgcataattccattacccagagataaccactggtaacactgaacacatgtctttttagtcttataaatttattcacattaatgactactttctatagtggtttctattgcttcacagattcctgggagtctctgagacattttcagggggtccatgagatcaaaactattttcaaaaaaggactgagaagttatttcccctttttactgtgtggcacttgcgctgatgatgcgaaagtggtgtagacaaaactgctggctccttagcactaatcaaggtggtaacactgaattctactagaagtcattgcattcttaaacaccacacgcttagagtaaacacacacacatacacacagacaccctaaaccccaaaagacaaaaaaagtcaagacacgaataacctcctagtttcacttaagaacatccttggtaaagcaatacaattattaattatattaaatcttaacttttttttttttttttttttttttttgagacggagtctcgttctgtcgcccaggctggagtgcagtggcttgatctcggctcactgcaagctccgcctcccgggttcacgccattctcctgcctcagcctcccsagtagctgggactacaggcgcccaccaccacgccyggcttatttttgtatttttagtagagacggggtttcaccgtggtctcgatctcctgacctcgtgatccacccgcctcggcctcccaaagtgaaatattaacttttgattactcatctttttttatagtctgtgtggcaagtgaagtacaaatgaagtactcccgattcatattgaagcatgatggttgttttaggaaagacacctatgccattatttgagttgtgagctgaactagcagctttttttcccccaaggaatatcattcttacttaaaaraacaatactaataaacaaacatactgattattcagacttgcatatttggtggacattttatcaatgatgtgaccctgtcatttccaggataacaactgaaagtatttgttgctaatagtaaaatttgagctttcaaccaaaatttagaagtgtgaaaaactccatgaacttgatggcttcccaataattaaagacttttttttaaaaatgagatttatgatgatggtaaccgatgtgactttttgatgttatataaaatctgccaacatttggaaaatctacrtaactcagaaaaactaatattctcccaaacgataaatgcactgtgttcaaaatcacgcacgaataaaagatcctttcagagtgtgagatagatggacttcaatgtaatagtataaacattcagttatatggtttcaaattgcatattgtaactagcatttaagaaacattgctttttgagttttggtgtagcatcaaagaaaaatattcacaattagctgaaaaggctattaaaatacttctttttccagctccaagctgtgtgagagtagatttgttcccccatactttaatcaaaacaacatatcacaatggattctataaacagatatgatgagaatccagttgtcttccattgatatgatgagaatacagttgtcttccattaagtcaaacattagatttgcaaaaatataaacaataactcttttcttactcatttttttgtgggttaaaatattatatcacmaaatatgtaatttatgttaatttagttgatttattattattttaggtatgttgataaatattttaaatttttttcagttttaatttctaatgtggtaagttttaatagatataatacacataagcaaatatctctcagtagttaaaatactagaaattattgaggccctcaacaattttcaagagttgtgaagaggttytgagattaaaaaaaaaaaagttagagaaccactgctacaataggtccaatcttaggtgcctacccccatccccaactcaggctaactacagacatgacaaataaacagaaacgcaagaatcctactgtgtttcaaaaacattctctcagtacatacacatattttaaaacgtacttacaacatttaaaattgaaatcctactgtacatactcacttgtaatctgacttgtcccattcatcataaacactttttttttyctcaattttaagttcaggggtacgtgtgcaggatgtgcaggtttgttacataggtaaatgtgtactatggtggtttgctgcacaggccatcccatcgcctgggtattaagcccagcatccattagctattcttcctgatgctcgccctctccccacccgaaccctctgacaggccccattgtgtgttgttccctgccacgtgtccatgtgttctcatcactcagctcccacttataagtgagaatatgtggtatttgattttctgttcctgcattcgtttgctgaggataatggcttccagctccattcacatcccttcaaaggacataatctcattcctttttatggctatgtagtttttcatggtgtatatatgccatattttctttatccagtctatcatgggtgggcatttaggttgattccatgtctttgcaattgtgctgcaatgaacatacacgtgtatgtatctttataatagaatgatttatattcttttgggtatatgcccagtaatgggattgctgggtcaaatggtatttctgcctctaggtctttgaggaattgccacattgcattgtcttccataatggttaaactaatttacactcccaccagcagtgtaaaagagatgaacactttccaatgtcatgaaatattcctctcaagttggatttgtggaggttgtattgtattctactggtcagatgccactcagttcatttattgtgtctccttccatcagcaaggtttaggcaggaaaatgatgtttatgttttaagaaagtactctaataacaaaagagagagaatcaggggaagctgttagaaatctcttgaggaggaccaattaggtagacacagtgatggcctgagaaaaagcagtgaccttgggattgtgggggtgagagtacattaaggtgggcaagtgagtgggaagagagagatgtgtgctctattatgcatttttctagcatagagatcaaaggcctttggtaaatccaagtggcaatgttcagtgcattttccattctttcaaagcagtgcatgtttcactctttttaattttgaaatactcagtattttaataactgtgtaccatataatgtagagtttacatgtaaatgtcttcatttgcatttacacatggcttctttccacaaagttgtcatttctttagttttctgcagcataatttaattgcttatctaccagtcctgagtaaactcactcacttagggttttctcagcatttcatagatcatagatcacctctkccaattataggggtcattctttcccactttcctttccaaggtgacctgtaacttctgggcagcttacattgcctcatgacctctggatgaaagtgcctacttcagggtcttcctctggcttgtgttggcacctctgagctgtctgtaggtccactgtgatttctggttgctgatgcctgtcattgttctggcatctttgcaatgactgtgaacacatcttagtgtctctggtcactggtctatatgtttcgagtcatctttacccctgagggctccttaggtccattgtctgctctctgcagctcaggggaacagacagcacagagtctctgtggtggcttgtctaccattccctggagactgagagctgtcttgggctctatttgccaggtttgcrtgcctacctaccattgtggctcctttgtaactcccacaaatacttaataattgttcaagaatgtatatagataaagggaggcattattgctattaaaactgcttgataacatcatggagatagcatgagactaagtcatttggactacttgttcataaaagacttcccatgggattagagaacaccataaaggaatgttttcttttagtcacattttaaatttctctatagtaaagcaaaccacagatagaagagtcacctgttttaaggtttcattattgcaaaatctcttgccatttgcctttctttactttctagagctgaaaaggaattgaggcataactaaatcctcctttgtgatttttcatagaagaaaactgaggtccagtgggggaagygaattgtacaaaattacacacaagttagatgggaccaggtctctcaactcccagtctggagttcarttttttttttttgagacggagtcttgctctgttacctaggctggagtgcagtggcacaatctcagttcactgcaagctctgcctcccgggttcaagcaattctcgtgcctcagccacacaagaagctcggattacaggcatgtgccaccatgcccagctaatttttgtatttttagtacagatgggtttttgccatcttggctaggctggtcttgaactcccggcctccagcaatctacccaacttgggcctccaaatgtgctgggattataggcatgagccaccacgcctggccttctggagctcttttgaattcattcatttcttttctttataaattacccartctgtagtattatgttatagcaatacaaaatgaactaagacagtgaccatcatacccaagattcaaggagccctcccaaccagctattaagatttgctccagaagctcttgccagaacttgagtctcaagcatgataagtatcaacatgtcaataaattgtgccctatcatacattaatattttgcctcgtctccatttatacaacaccttcacatttttctttcacatgcattgccctaatttctactgatttatattgttgatgtcctacaatagtttttagcaagcaaactattttatttcagcactcctcctcttgggcttatcctagttatcaatctggaggtaatgagggaagatattgaggaaagcaaacattgttttatgaagtgcctgcctcagatatgtttttgtgtgatcttcatggaaggtgaaattgcttttctctggcaaggggaatagcactgctttccccaggctgggtattcaaagttctcagactctgttatctaaaggacccccatcccaggtttcagtgtcccattttcttctgatcactgccttgaccttgacacagaggatctatggaggctgtgcactcagctctgtcatgctacaatttgatcctgggcctgattttccagcacaatccaccctgctgcttcaggagttgagagtctacttgacaactgtaaaaaaggctctggctttaacaatgtaccttgtgtcatcagtaggccactctgagcctatcattttcttccttcaatgtttcaaatacagttaaagaaagccaacccactccacaatccttacagttatcaaagtccagattctgcatattccaatgactcaccttccacttgaacctcatcctgactaaccacaggtagtaaccrcagcctttgtagctgggatgccattccttgctaggggttcccataatttcactcttgtctccaaatgttgtagcccagtctactgatttgaagagtgtcctcttccccctggcaaattcatgactacctggaacctcagaagtcacccttatttgcgagcagggtctttgcagatgtaattagttaagattaggtcatactagatgacgatcggctctaaatccaacaactggtgtccttataagaaggccacatacagaggcacagagctaaacagggaagaacaccatgtgataacagaggcagagcttggagggatgcagctacaatccaaggaacaccaaggattgccagcaactaccataaactagaaaataagcatgaaacagactcttcctcagagctcctggaaagaatcaacctgaagacagctttgtttcagattcctggcctcctgaattgtgagagaataaatttctattgttttaagccacttagtttgtggtactttgttacgccagccctaggaaacaaacacacccaggttcccaagaaagcagcatttgaggcagagatcttatatgtggttactcctatgtgctattacaccttacatgctaatacttctgtattaggaatcagtagagagggtcagggcagtgatcagggaagagacaatggccaatgtgaggatgcaatatctagttggttgccttaaactacagaaccattagaagaaagaacgttaacaatgtttttatactgtctatttaagagagaamggaggaataatatatccacatggtcacatttccctttgattaaaagtttacccatgggacattaagtcacctccacttaaaaggtgtacattcattggcactgttttcatcagggatgtctgaactatggtaatctgtgtgggagcatcattcagagaagagagaggagaaaaatgcactagtagctccctttcttgagctccaatctcctgccattgtctttcattgtctaaacccaactagaagccagctgcatcaggggacttggaaatagagtctacaagtgtcctttactgcagagaaaggagaggaaatggctctcagagccagccggccaggaacagacacatcaggcatggtggtatgaggaaaagtgcagggtggcgacttctgagaatctgtcctggcggcctccaattcagcctcctgctctgtatgctgtgctgtctctgcctttgtggctgactgggcagagggaccaactgcctggcagtctgtattagtccgttctcacgctgctaataaagacatacttgagactgggtaatttataaaagaaagagatttaattgactcacagtccagcatggctggggaggcctcaggaaacgtacaattatggcagaaggggaagcaaatatgtccatyttcacatggcggcaacaaggagaagtgcagagtgaagggtggcagcaaagcctcttacaaaaccatcagatttcgtgataactcacttactatcaagagaatagcatggagataactgcctccaagattcagttacctctcatcaggttcctcccacaacatgtgaggattatgggaactacaattcaagatgagatttgggtggggacagagccaaaccgtgtcattccacctctgaccgctccaaaatctcatgtcctcacatttcaaaaacacaatcatgcccttccaacagtcccccaaagtcttaacacattccagctttaactcaaaagtccaagtccaaagtctcatctgtaacaaggcaagttccttccacctacaagcctgttaaatcaaaatcaaattagttatttcctatatacaatgagggtacagggattgggtaaatacatccagtccgaatgggagaaattggccaaaacaaaaggacacagaccccatgcaagtccgaaatccaatagggcagtcattaaaccttaaagttccaaaatggtctcctttgactccttgtctcacatccatgtcatgctgatgcaagaggtaggctccaatggccttgggcagctccaccattgtggctttgcagggtacagctcctctcttagctgctttcatgggctgatgttgagtgtctgtggcttttccaggtgcatggtgcaagctgtcagtggatctaccattctggggtctgcatgatggtggccatcttctcacagctccgccaggcagtgccccagtggggattctgtgtaagggatccaaccccacattttcctttcacactgccctggcagacattctccctgaggggtctgccactgccgcaaacttctgcctggatatctgggcatttccatacatcctctgaaatctaggcggaggttcccaaacctcaattcttgatttctgtgcacccacaggctcaacaccatgtggaagctgccaaggctttgggcttgcaccctctgaagtgacagcctgagctctatgttggctccttttagccacagctggagctgaagcagctgggacacagggcatcatgtcctgaggctgcatagagcagggggtygctggggccaacccaggaaaccatttttccctcctaggcctccaggcctgtaatgggaggggctgccatgaaggtctctgacaggctctggatacatttttcccatttcttggtgattaacttttggctccttgttacttaagcaaatttctgcagctggcttgaatttctccctagaaaatggggttttcttttctgtcacattgtcaggctgcaaattttccaaacttttatgctttgctttctcttgtacactttgctgcttagaaatttcttccactagataccctaaattgtctctcaagttcaaagttccacagatctccaggtccagaccaaaatgccaccagtctttttgcatagcaagagtgacctttactccagttcccaacgaattcctcatctccatctgagactacctcagcctggactttgttgtccaaattgttaycagcattttggtcaaatccattcaacaagtctctaggaagttccaaactttcccacatcttcctgtcttctgagccctccaagtctccaggaagttccaaactttctcacattttcctgtcttcttggaacagttggaataaactgttccaacctctgactgttacccagttccaaagttgcttccacatttttgggtatccttacagcaacacctcactctaccagtaccagtttayrgtattaggccattttcatgctgctaayaaagacatacttgagactggataatttataaaggaaagaggtttaattgactcacagttcagcatggctggggaggcctcaggaaacttacaattatggcagaaagggaagcaaacacatccttcttcatatggtggcagcaaggagaagtgcatggtgaaggtggggaaaacccccttatgaagccatcaaatcttgttagaactcacgcactatcacaagaacagcatggagataaccacccccatgattcaattacctcccattgggtccctcccaagatatgtggggactataggaactacaattcaacatgagatttgggtggggagacacccaaaccataacacagtccttatggctgaggaccattgggccagtggtctacctcttctcccaaagtggccttatgcaaggtacctggagaaggtccacttatgagactctattaaactattaaatactattttcattcaccactgagtgaatagaaaatcagaaattaaggtcctattttatagacttcataaaatcacttgaattagtggagggttgattggggttttgtctttgtcatgagtacaaagtatcagtcatgatgagcctcattgagttttgtggggaggggtgtaccaaagttcggtagattacatgagtgaggaaggatggcaaagcctctacaggcaagcaatgcctagaaggagtggcacccgttctacagactccacaccagaaataaacactgctcatcaggggttcagcaagacagagctctggatccagatggactgctgaccaactgtgtgaacagaatagttgttctcaagtcttcccctgctcatttaaattactgaacaagttccactaccatgttaatgccaagctaaattacactagtcaatgcttttggtcaacatagaggtcaccttttaattttccccaatcttttctgctatagagcaaagcactaatactgtcytggcttctgttgctgcaatgcagtctttaggaatttagtcttaagtaaattctggtggagtaactcccgtgtaatccgtttcagtctagcatttgccaatgtcttagaaaagaggaagactgaaactcagagctttatttatttagtcagtcarcagagtttactgaatgttgactacacgcttggggctgagaaaaacagaagaaacctaagagacactctccctgacccagaggaccatctcatcttgcagtgggaatgtaactatgaatgaataagcctgatctgtggaccaggaaaggctttctgaaaacagtgatgtattaggttgtttgacagtattccaggctcagagagcagcccatagaaaggccctgaggcagagaaaagcatagcttatttgaggagacaaaagttcatcatggtcagggtgtagcactaatggaaagaaaagggttaaagatgattgaacaaagtgatttttagtttacttatttgtttctatgtttggctaggaagcctgctattctaaaccattaattcgagaatccacatttgaaagcctcaaatttaatttgatgtatgtacatttattgggtaagatgtgattcctgacctcagataacttagagtctgacaggaaagataagacacatttttgtagtattataatacaagtcagaatgtaccttaagggaaagacagagtgccatatgaatgcaggaacacctgtgctggatttgttcctgcattcatttcttcaacaaatacttaaatagtatcttctctggggttacaaggatgaacaagacacaaactttaacttcaaggaattgattctactaagcaaggcacatacataaatcattagaattctttaagcacagagatagaaatatgcacaggctatgatgagataaatcaatggttttattttattgagcacttattaaatactttacatgcatttcccataccccccttactaggtaggtattctatcctcagttttcagatgagaaaactggcactgagagaagttaaagcaayttcagaggtcccaacatttgaaagttgaggatacggaaytcaaacccagttcttactcatgacaagccccaggctcctaaccatcctacatagaatcctgcttcccaatctctcatagtactcagggcagagcatctcatctgagccaggcagagatgacaaatgcctccctgagcttagtttagggattagraagtgttggggaggtgaaggggggtaggtgggtgccctaatagagggacaagctgagtagacccaggaggaagaaaactatccaatgttagggtattatgtccattctaggctgttggagattaagccaggaggcagaaaatggccagaaatatgcctggagaagaattgggatcatgcaggatatagaatgtatagtgggaaacagaactggaattggatttgcattttaaagtgattacaagggcagctgtatggaggatggcattgagggaaatgagagtgggagagaagttcaagattatcgtagagttgtagacaggagaaggtgagagtctgaacttagatattagcagaatggatgggaggagaggagaagcttgagaaaaagtcaggcagtgaagttaatgggctttctgaattctgtggctgtgaggagtcagcttagggagaaatcggggttgacttctaggttcctaactcagaagatggagtagatggatggtgttgccaccaaataaggagaaagcaggtttgggggttakgtgatgagttcasctttggtcatgttgagttggaagctccastgagacatctakatgaagcagtcccacaagaaactgkgaatctgaatcaaagttcgtgatakaaacatagsctagaaaaagatttcggaaccatcagcctaatggtggagctaaagcaaggagagtggaagagagtccccaagcagagagggtagagcgagctgaatgtgggatggtcatgcggggcaggcaactcttggagggggcacccatgtggaggtccttaaagaggaataaaggacacttcaggtcgtgtaatagtgtgagcaaaataggggaaaaagcaagaggtgttttcagagaatgtaatggttccatgtggctggataatagtgggtttgatgcagctatcaggtgattaagctgggaatgggttatagtcttgagagattgaggccaggcaatgagaatggaatacaattcagccttgaaaagaaaaaaattctggtacgtccttcaatatggatgaaccttgaggacattatgctaagagaaatacgccagtcacaaaaagacacatgctgtatgattccatttatatgaggtattttaagttatcaaattcatagagacmaaaggtagaatgatggttgccagaactgggggagggcaaaaagtgaagttgtttaataggtgcagagtatccatttttcacaaggaaggaaggtatgtgatgggatagtggtgatgcttgcacaactacactaaatgctgctgaactgtacacttaaaaaatggtggcaaggcatggtggctcatgcctgtaatcccagcactttgggaggctgtggcrgatgggtcacgaggtcaagagatcgagaccatcctggccaatgtggtgaaacccaatctctactaaaaatacaaaaattagctgggcgtggtgctgtgcacctgtagtcccagctactcgggaggctgagacaggagaatagcttgaacccaggacgtggaggttgcagtgagcagagatggtgccactgcactgcagcctgggcgacaagagtgaaactctgtctcaaaaaaaaaaataggtaagatggggagggataggaaaatattcattaaaaggataccaaaaaatgataaggtgataaaattttatgttatgtggattttgccacaattraaaatatcaaaagaagaaaaatgcaaagagaaaagaagtaatttttaaataaataaataaaaaaggcaggacttctattcagaggctatttccaatagttctgaggagagccartgtggttagaattgggtaggtagcagcagaactgttagtggacccacatgaaagggctgtgtttatatgtcagagtcagtcaaatgttggcaatgtcatatggttcaacmtaatagaaaggcaaaaagagacaaatcctttaatgaagttcaagaaaatatacattataaccatttaagttaaattgcaaaatatttcctggggcacttgctctcaaactaataaccaaatagcaaatattttccattttcaatcatcttaggtcaatttgaaaacagctttttagtttttattggagaaactcatattgtcttcacttgttcaatgtgaagttgagttgccaaaattgccttcagtacacatttgtcttttatatttcaaacagaggaaagtttccatttccccatttcattctgaaagctttcaaaaagtttgggcagtgcccagtgctgtccccntccctcacttcatcatttcagctctagttcttgcacttggcagacttcggacgccaagtttctgcttcagtgctggtcaaaatcccacagaggactttggtaccaatacccactgacaattctctgagctgagagttgttaacttttcaacacagtgacagaatgaaaagagcaggttgtattatcatttataatcaaccaggacttaaaaaattcacacacacacgagaagtaccccaagagattattaaaaaggaaattttcaggtggttttcatagagattccaattctgtgtatcttggatggggtctgggaatatgtttttaacaaaaattaggttaattctgayacaggtcgtccatacactatttttttcagaaattgataagttaaatcagggcttattttttcctaaggataatcacagtcaaacaaataatattgttcttttaagttggtagacactctagcattctgagtgcatttttatttattatatagtacatccaaaaatcatttttctaaactttggaaatattttcagcaaatgaatgcataaaatgagatactgtgtgttttactagttttcctggtatttgaggacaaaagtcgtagttatcccttctcctgttttctccacctctctaagtatagaagtggggggaggagtaggaggagtaggaggaggaggaggaagaggagggaagaggaggaggaggaggttgtcagagcattaagaagcaagagagtagaatgttacagggggtgctacaatcacccagataatagcaggaagtagggtggagaggcatgttataaatcagaaagaagaatcttcrgagaaggctgggaagcaggtgattttyagagttgaggaagcgggcacacctgcaaaacagaagagatttttggatgaaggttatagaacagcagtctagaggcagcagtgggagccagtttctgtccctagatactagagctccaagagcctgggagaatgactcatctctgcagaaagaggtgggaaggaatgtcgttgccaggggacccagtggctacgacagaaagatgccaaaaaaaggtactggatttctcccaacatctttgtcattggtcaaaagagacttccccaaacaatgaaatactgtttggagatcccactggatataggaccaaagggcaagcagcactgtgagcaaggatatggaaacccggaatgggataaccsgcacaacacaaatagggtcaaggataatgttcaggagttgatttcctttggaagcttggcgggggaaggaatacactcttcagagcaggacttgaaaagtgagatgcttakgggccaggcaagtaaggtgaatgagtgatggtggattaktgaagagtgtgaacaactakagatctccaacctcatctaaagggactgaccttgcctctgtccaactattttcaggtgggcatatakaakgtagggtaacaaatcccctgtcattaatgaggcccaatgttggcagctaattcagatgttaaataaaatgcactgtcagccaaaccaaacatatctgtagccagatctaccccgtgggctgccaatgtatggtctcagctttggagccasagagactgttattaaacctctttgatactcagttttctcattcatgaaatgataggtggaaaaatactckactttgatttttttgaaagctacttttggaaacggttagacttactcttcatgtcattaaatgaatgtatgcaaagtatttttcccgtgtctgctactgagtagatcctcagtaaatggctcttatrttgaccagaatcatgcatttttctcaaaattttcttccccaaacaatcaagcaactgctwtttcttagaaatgtaaaagatttctgtgtctgcaactatccttcaggtcaagggatgactattagtgtagaaaaggtgtgtggctcagctcccttccctcagctgccctgctctagcaccttcctttcagatcytctggtcctatagatgcctgaaggtcacaggcagaaatatacraattctacactaaaagaagttgtacaggaacctttaaacaacagcatcaaaagcatctgttaaagtaacgctttccactgagtgccttgctagacatggtacaaagtgcattcaacagacacagttcctttcctcttggaagacctaagacattccaatgacaacaacagatattttatattcatawaaagtgagataaatagcacatgaacaaataaattaacgaacctccctgacaaaaaaaatcgaggaaaggaatgcctgcatttattggtaagagaataatctgatgcatgttacaccaggggaaaactctgctgtctttttctgcctatcagggagctcataaagagatgagattttgaaattgaataatctcaagagattccttggtgagttaacaagaaatgaatgtccagatatatagagaggggagcattccaaatatagtgtgagacttgaggagaggtttagggatggaaaaagatgactgcttaaatggatttaaatacttttgcctggaagcatatgatcctggtgaaaaactaagatgtgactgactaggaaattctgagaatgaaatgatatgaggcaatgttctgttgaactccccagacctggccttcctcaggtaatgatcacaggcctgggaaatgtctgccatcttctagcaagagcttatttattttcacctggtttcatggtgtttttcagtcggtttaagtcagcttgctcctmtattcttttctgcagtcttcccgtgtaggctcagggtaatctgactacaaactagtactagggaaggagactcaggaagaaggggataatgcacagttgctctgtttctagcaggagtggttctcactgtgtgtgactagcttgctgaaccgtgaccatctgcagtggctgtcaggggcctatgtgtggaaagttcgcctgaactttcttcctcttagattctgcttatccttgacyggtcttgtagctgtctggaatttcttgtcaaagaaatgatattttgttttcacaaggctaaatttgttccagggactattttttyttyttaaaaacattgtttccatgattaactaaggattacamaaaagttgtggggaggaaacctaatttcttccaaagtctttgaacctgtcagtttaactcagcaggaataaagaaataagctgatttgaaatgtgataactaactagctaaaycacacacacacacacacacacacacacacacacacacasacacccatatttgtatggaaaaaatttcaggattccaatatattgtttttgcctctacctatcctgaatagaggtaacggaaagcaaaagtaaatattggtttktaatattctaagcaaagagtttggtagtggtatttgctgcttggcttcatcctggcttctgacctacttatcatctctgtctccttaggcaagttactcagctatagtctgctttacttycctttatgatagatggaaagggagagggctacataataktacctatgttagactggctatggagattaaattaatgcatgtaaactacttgaagagtgcctgacacccagtaagtattgaataaatgttagctaggatcatgcatacgattactgtataatgatcatgattgagattgagaaggtatgagcctaaatgtaggactaaattgaattakccttggcctaaggttctcaggtagttgagctataattaaacgcctttggccaatcctttttcaagtatcagagcatcttgggagggttagccctgggcaaaacatctgcttyaccacgccccatgaaggcctagaggctgggatgccctgagaggccacatgagaatgcacaggagggagacgtttactgtagtcctagcctaatcccaagttctattaattcagcaagtgatyttttcaaagggcactctaatattcaaaattctctgcatcttcttatatataccttctgctaaayactatacattttaggagataagaataataatacatcaataaaatgtaaaagtatttttcctctttctaattaaaaatgacatacaagtagttcttgaattagaactactaattccctaatgataataatattattattttctgttacagaatgttttatagacatctagcaagtggcatcacatttccattgaattaatggatatttccaaaygtttgagaaaatccgaaaactggatgtcctgtacatacatttccattgaagtttatggcagtttctgggcacaatcacatcaatattgcacatmtatagatagtttacaggttacataactgtggttttggatttaattgccaacttgttaccctgatagtaattccagacaggggaataacagagcgaaggggtctgcccattgtgttactgctgcctataaaaacaaataggatccttagggtttaattggaggacttataattgcacctaatgttaaaatgggaactttggacatctggaagatgagtctggatttggtcacttgcctttaggaattaaattcatgaaattgtgatggtcctaaagaacagtggtgttcccacctggatttatgcacaggcagaaatgacaaaggtgaatgtgagctggtctgcaaggccaaataagtcaggagagaaaaatggagtttggctttaaactcacaagtaatccaggatgatgactggcttctttggtcctaacatgaaaataagccatctaaaatgaagagcaggtacataaaaagtttgttcttacttggcaaagacatgcatggcttttggaacttgcaactacacagggtgtcacttggcatcatagagcccatttaggaaaagaatgacccatggtgacacgggctcgttggaaagggtcaggaaaggaacatatacagcaaaaggtacaatacagctttccgtagagaacactgggtatcattttcttccactcatccctcctctccaccatcaaagccaaacatttatataggtatgcattccaccctgcccaatgcattacaaatgccaataagagaggtaggactgttgtttccatttttttccttctaaagctattgaaagttctttgtctgttccttatatagttttaggaatacttttgaggaaattgcctttattctttatagtggatttcatataaagcaagttttgtgtttcttaggaataaaatttyaggcttctggaatattttttattttctctctccataaaaagataatttcaatttccctaaattactaggaatctactctacatggtgcascaaaattttaaattatgtaatttagattactccagagtaaaacgtcttaaaaactgagagcacascttaagtgtatggtctagaggcaagagttaatggcatggaaaagtagtaaaaggttggattagaaggtttaatacttttgatctctcagcccattgcagtttacttactccttaggagacacasatgggacacggcaggtgtgtgtaaggagcgaagcaattcatgaatactcagccatgaaatagaaaatcaaaatgaaataagtatgactgcaactatcttggtctattaacattcaactattaatacctactgttctttgaaagccattactgaatatttactgataagaaaaaaatgatagcttaggaagaggaagatgttcaggaaaagcatttaagcagggtttgaaagacttgtgattttcttaactcrgggtaaaagtcgaccaattaaagtaggtttcccatccaaatgtttcccatccaaaatgatccctttttttttccccaagggatctaatttaggatcccttggaaaaaaattccaaaatgcattacaactattcataagggtgacacatggacctatttttctaaggactttgatttaatatttgaatgcaatggtatctgactttgttagtatagaatatttaaacttaaaaagaaaataccttaatttacttatgcataagcctattamacacatttctaggggctctttttatgtttattctmtagaacataacctatctttgaagtggtatattagtttttaaaaagtcattcctaagctgaataattaaactgaaaacaaaagctattcttagggtgtattccacatataaagctatgcacatgatgctttgattcaaataatatacttataaaactttgttattgtttgagttccatattcagaatggcaacttttgtttttgatgattattccatcctgaaacaatttcccccctgctcaattaaaccagaattaggagcacatttatatctgatgagacttaagcttctcaactgcctgcttcagaaatgtagacctttagtgcttgtgttcattttgtctctttgtggaaggctcaaaagaaaacagaatcaattcccttaagtttttctggaagaagaaggttgsttttgttgctttgatcttagcatgttgtgcattttttattggctgttgaatataaaaagccacagcctcatctggtttttctgctatattctcatattgtaaatcacataatgccttccaatctaaagtaaaatgcctaagtccaaaatatcacttcaaaatggatttatcattatagttgatagaaagatttccagggtgtaagaaaacaattcaacagtttgattaatatgccacagactgctaaaaatatattcatgcattttagacaataaatttcaggatatagacatacactcatgctatttgagatccttttttcctaccattgcaagaggctgctttagctaatgcaacagctggctaggttattgcttcaacaatataattcataatgcaaaagcagctcttttccaaacattttagagcaactcaagttgtttacatctcctgtaggtgattttcctataactttgtgccaattggtgtcatactatttggtaaaaatctacattaaatcaagacaactgcacttggttaaatttctgtcatacagagaattatagaaaaattacagctgatttgaacttatcatcattaagtatatacagggttttagaaaatgaatgcaaactacaaaaatggagttgtataattaaacattaaatagtccaagtaataaaagtcatagattaattgtctctcagttctagtcagatcctttaaatactgtctcacgacttgagcattggttctttcatcggaagagtgcctatccttaaagttgggaaatttcagctcctttggagcaccgatcatctgtaaaaagtaattggcatcttcttccaaagtctcaaatttccctacaaaatcatagttgatcaaacacggatagcagagtttgctgaccttttcccagtgaatgtccattcctactggacggtgggaatccagcaagtagtggataaactctttgaacttgactccagatccattaattaatgcttcttcacaggcatttggtcgatatttcttgataattgcctttccgaatactggatggtaataactattggggtgttcaaatttgtccctaaaggctgatactaatctttccatgggatcacgaacaaacacagctttggtgtaagtatttaagcgggtatatatcccttttaggtcaaagctatctagcttcttcaaatgcttcccgtagtggacagcattgtgggagatgttgtatgcagaggaagccaatccatttagtaccatcagaattcttttccaattggaacagccagccttaggtacctcacaatataagattktgtgtttatcttctacatagattctggatactgtatgaaaaagatgtgactgatgatgactcaccccaccgtatttcttgcaaaactcctgaaggaaagaccttcgtttctcttgggtctcctcagttttcttccatttattatctttgactaaacttttgtttaaagggtgaatgtccactggccaattcatgttgctgaacttgttaaaaacagtcttagctccttgacgtttttcaatcaacttctctgttggtgaccctgtggacttayttaaagcttgatcccctccttgtgaatgactggkctttgttaagagcctagtagatctctcagaattgagtagaagattttcctttttttctcgtacatcctcaggcatgtgaaacttggggttctgttaaaataaagaargagaaatgttgaaagcacastcacgagtgtgggtatactggataaggaacttcacatatttgttttaaaatagtatcaaggagagcatatttcatataagctgccasaacamtttagcaaggcatgctgaacatacattttgtagtgagcttcttcacasaaaatgtagcaatgagaaayggcatctacaggatagggaggaaagagccctggatttttgtcctggctttgcctgtaatgcaataggatgtaactcaaccattctgagcatctatgacttttgggatattaataagtatgtcatcttcaagtactgttttagtttgtgcacctgaatgtagatacaaaatggagatgttttgagattgaaacttttattgtttttagggagcactctgtaatgcacagaatagttcaaaatcataaattacaacttaaaattttggcaaggctaattataaatctcgatgaccacttcagttttctaagtgcttgcaaaaatcatgtattttttttttcctgggaaaatgttttatttttctaaagcatttatcacaataatttaagaatttattatgatcatagtatacaatctcattcacatatgagaccttccctctttcccaagtgaagaatgactaaggaatccagaaaagtctacttgacgtcctgctctataaaactgtatcaaggtagagcaaaaatgtagttatcttttcagtaggatgaatgagtccatttaccacatactgttcatcttgccacatccttcctacaactctcacagtaaaagaagacatggaagacgggatttacaaggtggcatcctctggtagggatgaaaattttaagsaccttggcttttactctgggtaaactagggaacttttgtagggctctgggtagaaaagtaacatgatctcacttagacttgaaaaggatggtgtggagaggaatggactggatatatacatatagggttgtcagcatgttattggaaaagtaaatgaataaattctgtgctgtggacataatgcatggtgtcatcagcctagaggtggagggagtggtggggaaagtttcctagggaatatamacatgattgcaaatatatatatacatgatacacatgattgcwtatatatatatatagtacatatatatgtgtgtgtgtgtatacacaatttttaaccattgtatccccaatagtgtmtagaatggtctacagcctataataatttctctcaaatatttgtggaatgaacaagtgaatgaatgaatggaattaggtcttcaaggataattagtaattttctagcaaattaagcaatagaacagaggaatgaagcaccgttcatggagccacctccagacatcatggtcattccaccagctgaggttgaagggcactgcttttttttmtagtgcaagaggactgtgtgaataaccccctgaataccatatgccaacgtgtayagccccgtgtatagccccgtgtattagtctgttctcatgctgmtaataaagacacacccgagactgggtaatttataaagaaaaagatgtttaatgaactcacagttccacatggctggggaggcctcacaatcatggcagaaggtaaaggaagagcaaaggcctgtcttatatggtggcaggcaagagggagagtgtgcaggggaackgccctttataaaaccatcaaatcttgtgagacttattcactatcacgaggacagcatgggaaaaacccacccccatgattcaattacctcccacctggtccctcccatgacacgtggggattataggagctacaattcaagatgagatttgggttgggacacagccaaaccatatcaccccctgaaacggccactccaaatcttccataccattggaccgtctatttggagttttaactctaaaaccatttgtctgctgtcttctccagagactgccaggattacttcaaagccctttgtrcttctttactctgatcagtgatttgtagtacataaagttgtcactgaaaatataaaatttgactgtggtttgacagaccatagggttatgggtgcacatgcatggaaagtacttagcacaggccaaatataaaactgccatgatatttatactattacactgctataaataataactactattattgttgttttagcagcagcagcagtagtagtagttatagtactttaatcccagggacctggtgaatttaaagcctccccatttgtccattattattcagactataatttgtgtgtccctacatatgccctcaccaggtctcttctctgcttgacaatcagaaataaaaacaaaatccaccttcccctgtggcctctggactttctgctttgtggccatcaaattcccctttaatctccaggggtttctggaatgtttgtttccaagactctctgtaaatgaaacttggctgactcccaacactctgtgtctcttgcactttctcaagtaggtgaaacttgacttccttgaactacttgtctctccagccagaagatagggagtgatttccctgcagcccacggctgcttccaggacatcacccagcaaagccctctgcttctgtgaaatcaatgtgttctccttaagtctccctttccccctcctcttgttgtcatctacctttatcactgatstgtccactttacacactccagcttctaactcagctcctgtcattacatttagtgactctgacatccaatcaactctcagttccttgaccactttgtttttaacagaggagctctccacttcacatcaaacttggtyatcaccagagcctttactattcccaccatctttctgaccactcttgtctcaccttccagttcagtgttatttcctggtttgcaattctttgaccacttttcactgttacccaggtcttaacagccagcatgactggctcttcattcttcagctctcagttggaaagtcacctctgtagaaaggctttccctattcaccctgtmtaggttatttccctccctttcaaaatatttcctgcagaaccctgmttatttttctcatagcactaatcacactgagaaatgattttatttatytccttctstgttgtctttttcaccccactctacctccattgcactakaatataactgcagagaggtcttatctttcttgctctstgtggtactaagcacactgcctggcgcatagaagatgttaaggaaataattcttgaataagtaaatgtgcttctaatttaatagyggtcttctaaacaactgttttatgaccttgttgaagaaaaacaacattgaccaaaaggtsaagttaaacttgaataaacaattgaccaattcttgttaaggtgatgagaatctgtgtttaaataaacctttggcaaaagagaaaacamataaaataagcacatgggaatctgcttgcagtaaagtagatgtggaggcttcgtgtttaacctgcctgccaaatcagatcagttcaaagtcactcaacgctgtctccaaacctgtcgagggcmtgccagcaatcmggatttccaggccttactgcagacatcctgaatcagaatgtctgagtgtaaggcccctgactttaatttcaacaagatccccaggtactccagtggcagtcatakcatttggggactactgaactagaatataagaaaggaaagtataaaaaaaggcacaagccttgaaaagttcctttcatcctatctgggggagaaagacatcaaatgtagtggacttgaatatttcagtaagaagagaaataacttggatgtagagtaggaatgtcacatgagccctcatgcagactagatgcaatgtctttcttgtttatccatttctcgttgctggaagtcttggatctccaagcaactttctaaagactagtttagctggggagataacctcatgagggaaaggttcaccactcaatataaattagtgtcctcctgttttattgagtgctagtaagtttcctctagtctaaccaaattgagatatgggaaaagggttaattctctaaagtaatggcaccagcaacccacaagggtggccaccagaccttctcctggaactcctcatctcaatgtcatccaccttataaaagctgttattcgggtttgatgacatccctcccagcccccatctaactccattttcttccaatcacagcaaagactccatgactaaggggtttgcattactaaaatcatagctaatgacatttcaaatttaaagctcataccaacaaagtcccatcatcatcatcatcatcatcatcttcacaacaataataaaagagtaaaatcttacatctccattttccttgggacactttattctgattgtccctgaggcaaacatgtatataaagccaaaattatcctgttgccttcaagagtggctccccctgtgttattttccgtttttgaaaaggtcctattactttcctgtcacccactcacaaaatctgagagatgctttaacaatgggaaagtaaattggctattttacatctcataatacttctttttttgtatctttctaaattaattacccccaattggatattcattatcctcctaattagtgtccctgcaattattactaaattattcttccccaaacattttgttttttatttcttaacattttgaactggatcctctagtatcagtgaacgtccccattcctttgctggcatttgcagcctggtgctgctgagcctcttctccttttgctttttttgcttctctcttaacacatgccctgtcctccacttgcttttatctgggctcttggcagccccaactcatggtctcctcctttcttgggacgttcaaaatcttctagtttgatgtaaaaatcctactttctccatgacaaccacccaggtctccagtgagtgattctactccctttgaaatgactatagcacttagtctgtacttcctgtgaggaaagtaattttattccagcttccacagttatttgattgttttgttggaaaaactcttttaactgcagctaaattgtaagctatggaggaaagctatagttttccataaatatccttaaagagtagatattgcagagttagctgaaagacatgtaactacagatttaaaaaaatgagtatctaaaaaaaatatggaaaaatgtgtggaatgttcattaagtctgcaataaacttgaaagcctaattcttgttatttttttatttatttatttatttattttgagatggaatcttgttctgttgcccaggctggagtgcaatggcatgatcttggcttactgcagcctctgcctcctgggttccagcaattcttctgcctcagcctcctgggtagctgggattacaggcgcatgccaccacacccggctaatttttgtatttttagtagagacggggtctcaccatgttggccaggctggtctcaagctcctgacctcaggtgatccagccgcctcggcctcccaaactgctgggattacaggcatgagcccctgcgcctggccaattcttgttatttttaagggtttstgtatcaagcatatctcctctgtgaattcttatcgatcctcaacactgatatgaattatactttctttctccccgtcaaagttgttgagcacctcctatacatcaggttctgtgctggatgccagagatggtggggtttataagacaagtgcggactttattcatayacagttggtattctcatagggaaaagtatattaagcaaataactgcacaattaattaatctattaccatagtggcaaaggctccagcaagatactattggaagctgggagagcagaaatgggggtccaggatacaaagaaaagactggcccagtttgagtgttaagtcctctgtttaytgtgttttattttattmtaggtagttgttagggttaattgtttaggtaatgatctctctattttaatttcattaaatgtcagtgtgcactcttttaaatctatataacccccactagcatcaagaacactatcttgcattaataacatatgtttgaatttgattgaagcaaagaatatcattcctgcactgctccttattcaggcaacaaattcacattggttttatactgttgataagtgttgtacatttgtaggaccttatatactattgtggatcctatggaaactataaaacttgagactttgatcattctttcatcaatgcacatatatggaattactactgtatgttgttttaagcattatataaataaggatgagatagataaaatttgtggcccttcaaggaaaccaaagtttaattgatctgatgaaaataagcagtttatgaaaaaatgtgacaattgctataataaaaggataggtcaggtatttggaaaacaaagaaaaaagtgyttaatttttstggagagatttttgggggcaaatttcacaagggaggtgatgcctgagatgagcctgggaagatgactgaggagctaccaggtggacaagccagagatggcaagggctgtacatcctgacatmgagtctgcttgggggccagactcagatgacagggagaggcaggaggggttgggtgtcattccaggagggcctgggctgatataaacagtcagactttaccatatatatgatggggattttcaataaggtcgtgacaagattcacgatttaaaacattctggggcagtggggaggtgtgcctgggggcagagggatcttctggaagatgattatgattgtccatcaggaatccttaggagaggaactaagacaatggggtaagaatgaagaaaaagggagttgagacaaacttaggaaactgctcagattcgaagcataagggtgacagaagtgtaaagaatggctccccatttcctctctgagagaagaaatagaagtagcagtttttatgggggccctggggtgggtgtgggcattcactatcttcgatttcagacctcttgagtttaaggtgccttagagagctggaggtagatagcaggactgaaaagctgggtatagattcaggagttgttggctggtggaggtgcagctggattcatgggccttgawggcactgcccagggagtaatttataatattactcttaataaygtatcttttgtgattyaccttgaatctagakagamgtgcagttatatttcttcacaccatcaaggagacctaattgtctccagtcattgataagataaatgatgggagagggtggggtgctcaaaagtcagtcttttctggggacacagrtcagtgtgtctctcctgggtccctctgtgccacagctactcctcttaaatcttgattcmagggcttcagaagctratggcatagttatgagaggggtgaagactgygactrcatttccaacagaccctgaggacaattgggaagaatgtgagtacggagtcctamtatccagtgccatctgccccatctcgctctccatcctcaccctttgcccttccaccttcagttattcattaaacacktgttttctgagcacaawctgygctccaggyactgggctgtgygttggtggtatagctagcaagacagacttggtccctgatcttacggagcatccttgtggtcagggtggggtagggagatacaaataagaaaaccaaagttatacttatgggaggtaatgagatggagaaaaaacttggtgcattaaaggacaaaaaaaaawttggcacaggaaaacatgaaagaggaatcctggctcgcaggtgagggaggrtatctgggagaaactatgagccaggcagaatcatttccatttcctgtctctgtgacttatttcctctctcttgaatattcttctccattttgttygcctagttaattaatagactagggcatggagcaagctggtttaatcactgcrtcaaacagaagagtagatrcagataagctcattttacagattaagaacctgagctcagagaatttaaataatgtgccaagttaacacagctattgctggagctrgtgtctcaaatctctgtcttagtcatgyctggcttttttcagctgcatcatatatcaagcaatctatttcttgtttaatgtccattaaatgaactgatgtcaggaaagcaccaggcatatgcctgttacaagagagtatggtcgttaagaacatggatttttgagtcagacagaactggttatgtgtcttcttctrtcgttttctctctggrtgacctcggttatcttattttgtttttctgagcttcagtttccttatctggaaaatgaagataataacaacatctaccttgttggattataggaaatgcctgtagagattccttaatgtaaatatgttctccataaatattagatwtttttattgatttaggcgctgaatatttttgagcaatttctatatgataagcagtttttaggtaagtatttgttttttattctgcttttttcwtctctttctcctcttccttctctctcacaacatgtagcaaagttaaatgttcaatggcaataaaaatgagtgagaaaaaaagagaaggataagacamttgagagacagaaatgggaaagagaaaagataaaattaagtggaggcaaaggcaaagaaagaaaacagaagaaaagaaatcacaattatgggtaacagggaggaacagtgaacacttgaagagagtgggtaaagagagaaactactgaattacagtcttctccaagctatgagctttaaaatatttaaactgcttcaacacaaamcagctgtttctgttgtgaggctattcaagttgatccaaaaagctaatttctatggtcctcttggattcaaggattgaaactatggttttatttgccagttctttccatttttggatttaattcctattttttttctgcttgaagccaaacaagcttaaaatatgaggactgaggacrtaacataatgtgaatgtcaaggagaagtttctattggaaacagtgctctggtttgacaagaccatcagaagckgaaaactgacataaccttaatgtatataagtagataaggctactccccaaggggttcaatatgcttttatagatttatcattctatcttccttccaagttttgtaggaaaaatgagatgactcttttgtttgcaartttacagataaataaatcaagacagacttgtgtaataacttgcacaaggtcactctakaaaatgaatggagaagtcaggaatgtagtccagttctctaattctaacccagtamacattagttagcagaatawcttgtttttttaaagaaactcaaagccttaatgaggagctgcaacttgataaatgaaatacattcaaaatgtktggccctattttatttcttaggtktgtgtctgtacatattaaatgtggatgggaacagcaaaacccaataaattatatttggcaggaaagaagtagaataagttggtgttttcactattaggatttaaacatttcattggattttagatatctaatggatttgggatatggctctttaatatttccgtgtatttagttgtctgaaattagtattggtcagccagcctcccctccccttgcatttcaggttaatgccaacaacaatgtgtgtgtccaasagggtttggaggagcaatggaggggtgcaccctgactctgacaccttgttmtaaagtayacagttgctagacagagttcttcttcttgttctctggaatgtggtgaagagraaggaaccagctgtcttgtgttgcaatttcaaaatgtcaagttttctttttatgtgtgtgtgttatggccatggattggcaagaaaaagattttcacaggtgaaggggaggtcttcccctccacacctgtgggcgtttctcgtcggggggcgggggtacgagagactgagaaaagaaagagatacasagacaaagtatagagaaagaaaagtgggcccaggggatccgcgctcagcatatggtctctgagttccctcagtatttattgattattatctctaccatctctgagagggggatgtggcaggacaatagggtaacagtggggagagggtcagcaggaaaacatgtgaacaaatgtctctgtatcataaacaaggtaaagaaaaaggtgctgtgctttgatgtgcatatacataaacatctcaatgcattaaagagcagtattgccaccagcatgtctcaactccagtcctaaggtggttttctcctgtctcagtagatggaatataccatagggttttacaccgagacattccattgycgatgacagggatgagcaggagacagatgccttcctcttatctcaactgcaaagaggccttcctcttttactaatcctcctcagcacagaccatttatgggtgtcaggctgggggacgrtcaggtctttcccttcccacaaggccacatttcagactatcacatggggagaaacctcrgacaatacctggctttcctaggcagaggtccctgcsgccttccgtggtgttttatttccctgggtacttgasattagggagtggtgatgacttttaacaagcacrctgccttcaagcatttgtttaacaaagcacatcctgcatagccctaaatccattaaacgttgagtcgacacagcacttgtttcggggagcacagggttgggggtagggttacagataaacagcatctcaaggcagaagaatttttcttagtacagarcaaaatggagtctcttatgtctacttctttctacatagacacagtaacagtctgacttctctttcttttccccacacacaggcaagggggatgagtccataagatgacactggaaaaggggattggcttgagtgcaccagggggccagagacatgggtcatccctggtgacgggagttggaatgctcccctgagatggagactggaagtacaagaragaagaaagttgttgtgaggtcaggagcatggtggctggatagatcttcaaagtatgaagcttttgcgtcagatygcctaggtcttccacctattaattgggtgattttaggacaatgtcatcatttgtggctcctagaatcagaccttaagtcaagggttgagarcaagttattaatttagwgttgattccaggaaacactggcaggagagtagggaactgagaaaggaaaggcacagaatatagggtggattattgagcaagttagcacagtgggaataggagctgaattctactgaggagccctcagaacaaatgtagagcatatctccccagagttattccacacaatcctatcagctgtggttaaaggtttctgcagggcgagttctggcaattccagtctgctctacaggcgggcagggtggactcactcaggcagagtcacaggtgtgggtagttggttgraagtctggctggagtgcaaaagaatgttaagagatgaataaatatgggaaggcacagctagcactcttacagagagtccattaacattcctgagtctgtttcctcatttttaaagtgggaattccaagaactattttggaaacgttgaaatgtaagtgaaggcrttggctgggatccagsaccccamacactstgtcttaccatagtaagaggtctcaattctgtcttcctatacwcactcttcctttggaagtgtccatggtgtatgtttgtgtctatgcacacaaacaaggctgagaaaaggaacaccctacaactagatggaaccctaatcctgttcagctaagrctatatagatctgtgggaattctgttgctcagagaaggcaatcctaactttgggcaggaggtctctttggaccctttaaccaagagccatgccaaaatatcagccctctgattctcaaactctgatactgggaaaaggtaagtcttttagagaattaactagataaatgcagttataaagtacctagtacagtacctgacatatagtgtctgccatatagtaggtttctccaaaatgtgaatgcatcstgtctmtaygcctttyttctctgattttctttaaataccgggcatatcatmtataacgctgctttcccaacttcagattaagatgaccatgggaacagtccctgtgtgcataagcagttgacagaggtggatgctaattcaattaatagtatccataggccagtgagcaaccaatgaggggacctggagcaaaagacactgtccaagtgggtagagagtaactagctaaatcaatgtgtccatctcycttttgggctgtagactggaaaatatggagagtggccagttattacggggtaggaggagagagagagagagatgaagagagaagaggaggcacaaaagtagcagaataggagtctgagagggcatctgagtcaagataaggtgaagctgggggctatgacgtaagtgacactccttttccaggaagcagcatatacctgcccccaaccctgcccaacatgccaatgcctactagtccaaagccacctgagtcctgggagcagcattgccatgtgcgagagtagtaggggcactggcaggaatgcactccattcgtctcactggattaagyatctactggtcccagatcagattggcctgtgtcagcacctttgagtgaaacacacgcccctctgrcttatgtcacttgcatatttgacaactcagctatacttaagacagctccccaaagcctgstctaaccctcactggagagcaggcagctcacactctggtgctaccatgtgttacctgggccctragttaggaagagagattgcctgtggtatcagatcatgccatggggattctgagtccatgctgagtggggtttcttttcaggatttcattctgagaaagaatgcaaaggaagaatatagaattacactagcagcaaagcagaaggacagaagggaagacaggagtcaagtgggttgtcatatgatgaggtcagagtgaatagagcactaacaaaactaagcgagcatcaaatggatatttgcaaggtmtatgtatgcatgcattcagayacattttatcatctttattttttagaatattatttcattaactctaagttttgcagctttttggggtttccaaaatgggtyacctctcctaaamacagttgtacttgattcaagatatcaattaaatgggtactggaggcagccatggccacagcctctccttttgttccctttctttgtgagggcaagtataggttgcactgatcctgaccttttggcctgaggatggaagtcttcagtatstgtacaactttactcccaagagctggtgtagaatgagttcctctggccatgggaggatcrcagaggggcrcctgccaccagcagcccagcctcagtaagtgcaatgtgcagttggcagaggggagggagctgggggcacrccaaccctttstgttacttcctgtaggcatagcccaagtctcaggaagcagaatatacatggggtggggtggggtggggtgggggaggwgaggggagctgtttctgcccccacccattacctastagtccaaagccacttgagccatgggaacagcaatgctaaccacaatagctgcagggacctggaaggggattgttgatgcatccaactgcaatgctcttttacattgagatgttgatggacaggcttctacctagtcttctctagagatacacatatcataaagcaggcaagtataactctctacacattccttagatgctgtatcattacccccttccctcactacaattctgtaatctgcaccttgggaggaacaaacacgtcttattgcaccttgcccagaaatagtatcacagcttattaactccatctactccccacacaagggataacgactgtccactgaaggggtaaggaagtctcaagtgccacacaaggaattttcctagggccttccatcattttaggccaatagtaactcacctatagccagtactgtagcaagttgaaagtgtatggatttgggtaccattcatctgtaaaaaccaaagaaaagacttgcccttctggattaattcacagacctgtgggaagaccctcttgtctcacctgtgactcatgaccatattttgagatccccaagtccctggagcctgcttcctcctgagcaaagagggttgtctttatttcaacgggcaaggaaagtccatttgtttgtctccactcctgccagggctccactctccttcagttacaggagacctcctgaagcaaggctggagggagaggctgtgtggtaagagtgagctttgaatgagtatggactgagggcttcacatgcaccagatgctgcacaaaataattgaatttaatcctcactctggctctgacaggtggttgagatcatatttttattaaacttactcagcattttataatgggcaattaattgctggaggtgggattaaaatccagtcttgtccagctccaaaatggtatgtctctcactacctaacccatgctttcctctcggtgacatcacatctgtaactataggagtgtttccttgctatcagatccaaatgaatacaatcctttgtaccgagttaccttgaggtagccaaatgtgccggagtcaactctagttagaatgaatgaggacatcatcccacctttggttgcttcagctctccagtttaaaataatatatgttgggtaccaagaagctctactgaacatcattgttggaatgaccaaagtactaggctcttgctcctggacaacaatgatataagtcagcactgcctggactttgggtctctcctcaggtagcataaaccacacagagattgtgatcatctgctcagcttttatgtcagccttgcaacaaatctccttatcttcatgggatctttatcttcacttctgcctccacactactgttagaaacacatatactgagacttggtggktatggagtaataatatcttcactccatcaatgttgttttttttcaagaaaatttattttaaatcttggcacttccacagctgcaaaaaatctgggagaacaagccagcacttgtggagctgtgtgtgttakctggatcaggggtgaaggggggcaagctgaagtacctttcaacccctgataaactcccagggaccaaggaacctggtccccatggctttttatcactgagatgctagctctataatgccatctccatggkgatttctacattgaagaagaacatttatttcctgccaccagtaagagaccacctgagtgttcagttgcagtatcttcaactccccagatccatcagtagcattgtcttctctgggcttctcttatagaactcttttttagcaaagtcaagtttccatattctaggtagtaacttatcagatggatgttcaaaacgatggaagcaaagcattcatgtattgcatttcagttattttctctggggttttatcacccttcaggtggttgtctccaaaataacaggtgtcattctgctctattaatctggttcccctacctttatccaggcacttttctcttcagcgtcttcttcaaggtatttccagttgcccgccctgaactgtttcagaatgaggaggacacctggaggaatctacacgtgcatagaccaatttgcaaaagaacctgtgagccaacgtaggttgtgagatgcatatcccacatccagttcagcccagtaacttgggaaatgggggagaggtagctctgaagaccagacttagtacatttttacccccatccatgcttgcaactgtaagttgatcttaaattagtacttttaaccaagtcaacctcaatcacttgaataggatacccagctgaaaaacttggggtcactgaatcaatctcttatctgtaagagataatgatgcccacccaatggggttctgaaaaatatgtaatgcctgacatgtagtgtatactcactgaatgtggcttttaaccacaacctttatatttttgccgagtatcacctttctgcagcaaccgtgagaacctcgcgctaagcttgtcttagattgctcattcctttcctatatttagacaccaaactccattcattttccccttgaaatgttcattcccatgatcaagattttgcttaaacacattttgttttcatgtccasattattacctcagctggaagaattaataagcaacacgttcacccaagaagtatttactgagcacctactatgtgcattattttctggtgttggggctagggggcaaacgactctgacaagtctctgttctcaaggtactcacatttatatggatgaagatagataacaaacaaggaaaaaattggacagacaaaaaatttaggtggtgccaagtatgatgcaaacactaaaacagtaatgcaatagaagatgtcagagggagagtgggaaggttacgttaaatagatgtccaaggaagatctctctgaggagaagctactakggctgagatcttaatgacaacaaggaacccaagggctggaagcagagcgttttgaacatggccagtgggtgcaaaggccatcacacgtgaatgggcctggccaggtggaaggacagagggcaaggctgttgtggttgccctgtgagtgcgaacggcccaagatgggatgaaagaggaggtcgggaccacaccgtatakgaatatcagatcatggtcagggctttggattttacaggggtgcagtataagccatggggagttttagacaggtacasaagtaatttacattttctttctttctttttttttttttttgaaacggagtcttgctctgtcccccaggctggagtgcagcggcgcgatctcggctcactgcaagctccgcctcccgggttcacgccattctcctgcctcagcctcccgagtagctgggactacaggcgcccgcaaccacgcccggctaattttttgtatttttagtagagatggggtttcaccatgttagtcaggatggtctcgatttcctgaccttgtgatccgcccgcccccgcctcccaaagtgctgggattacaggcgtgagccaccgcgcccggccgtagtttacattttctaaagcgtactctgccagccaagtggcaaacagacttgggcctcttaagagtggaagcaggaggaaacccgaagakcctggagagagactggtggctggtaccagtggagagggagcaaaaaggaaaatacaggatacaatttcaggaaaaatttcataccaatttcctgaggtaatttctgaactcgaacattttcagtgycaccacattgtgtttcctgctgaatcaagtctacatcacttcggtttttaaagccttccacgatccttccctgaacactgtagttttcactgatggttggctgtttcaaactcccatatgatccatactgtatcattaataagcaagcaaggaataacacaccctctgctattctgtgcagtgtttcaggtttttagttttctctttcaagatagaaaatccctttagagtaggaactcggctggcactttctttcacatcctgcatagcacttagcaaagttctgtacacagggcacatgtggaaattgcttattgattgattaaaagcatatatcactggcatttgtatcttcagtatttctcttgtatgaagaagggtgattatctgtcaatattcattgcatcattgaaccaatgtacaatgcattaatcatcactgaagataaccagatgaggctttattgtaatctccttctattttgctgagataatttcacttgctttagagtttatgaggccataagtggctcccatctgttgatgaacatatttctaagagtcatttagtctcaagtatggaatacttgaggggaagttaaattgtaacttttatattaagtgtcatcttagtaacagaaccaaaattggaagcatgtgttcaattttggtttttcattttcaaagctttaggtcaggcaaagaattaatttcatttgtttacaaagtagattatgcctaataaaatctattttgtttatggtcacattttaatcaatccactgctttagaaaatgagagaattctgattggctaatcattcaacatagtaaattacattattccacatccacagaacactggcctaattgcattatccagtaatgataaaaatattccttttaatacattttgagcaaggcatataccagtgatgaaacagggaagaatcttgtttattccatccttgtttgatgatcgaccacagaatataacataacacttstgtgtataagaattttttcaacattaaggataataaggacaaggtagttttcactggatccttactggtactctgaattttcactatttgtccgcatttyttctccttcccggaaatttgttttctgsgaaaaacaagtgctactttgtcaaataaagcttaaataaaattggtttcaatttatgcataataaaaggaatgcctagtgactttctatctctagtgggaggtagaaaactctccagggtgactttattcactccagaggttctggtgagcaccaaggaacattacctctgcaaaatgcagacatacgcaaaaggatgcatcaaatttaagagaagtccgtagatagatatctgagggatctgccttaggggatgtagaccatatatacaacacgaattccacagaattagcctggtattcacgatcactgtttcttaaaacataactcttttatgttaccaagcaacttttatctgagatgatgaytactcgaatacttcttttgcatatcgccagaaaatatcaagttttcatttgagtccttaattcaagttctttatcacaagaagaaagaatagcatggataaaatggtttaaaggtagccaaaaaaaaaacaaaacattgtattttagaatgcatattcaaacatattccaaaaaatactgtattttagaatgcatattcaaacatgatgacaagtgggctctgtggctcatattgacaatagctttaacctatgaagtgagtgtctttctatacggaggtgatgagttactcaatactgaacggctctactaaattgtgcttttggctattagaacttggctactgcctttcgttgctatgtgttgagagaaaaatctcaaatgatgatgctaaccattttgctaataaaatatgctaagctgaaacatttcagttactcagttcatcttctggtacagatgctagcaagcagagaaggwtatgatttgaaaaactcaacagaaaggaggaaaaagatgagaaaaagattgactagaaaattattcatggaatatatttcaccagcctattgggtgttagcatcttaggtggtgtggttaatgctaatttacattaaatggtaaattaactatttttatttttcataaatggtacattttcagtacggagtttcagtattccatattttctcacatgggtacatacacaatgacactgttattactaacaataaagaacttgtaagagagtttttagaagtaacatgcttttctaagaaacacaaagaaaacattttatartgagtgaaaatgaaggtttttacttcaaattctctttttatttccatgatatttctgcctgggctctgccaaggaaaactggcagtgggcaacggattatgccaatgtatacttttttcccctctgagtttttaatctcttttcaggtgacaaatagttttctcttagaccagattcactttatttttcacttacttaattaaaaaagtaatttaccgctcaacagggaccctggagtatatgtatgctcatcttcatggttaaaacactttgaaaaaagacataccacatcataaaaatctgtattccagggtctcagaacagactgcttcagtattggtgtcagaattgggggattaattagggtggtcataagtgagatcatttaattaatagaacagcttccagaagaggtgggagtgtagtataattgtggagagaaaggaattcagaatgagatacacctggattcacatttgagggctgccactcatcagcggagtgccattaaggaaagatatttaaagcatcccagaatagtggctgttgctcacactgtagatagcattggattgccttatttaatcctggcatgaccacttatgcatgcatgattttagacgaactaattygcctcactaagatgaatcttttgatttgttcctacttcgcagggtcactgttgtgaggtttaagagagataatttaatgtraaatttakcataatgcctacacacaaaaagcttgtcaagcatttaataataataccgaccattattattactaatgtcgtgctmaatgtggcaggacctgaaaaattactaaatctgatttcaagcctgagtttccacctgtataaagtggagattaaaatcctggtcctcacagggttgttgtaacaaaacatgagatatggagcactgagtgattagcacaattattgatggcaattattcagaagcattgagtgcttgaatgagagctgtctgtatatttgattgtgaatagttctcacagtgtttattccaaccactattttcttcttggtggtcatgcttttaaaacatctgaaggccatattctcagctttgctktgtcttgtcaatmtagayacctttccacaggtacccttcacattttaactttcttggcttccaattaaagaggcaaagcccagcacttcgacatttacacttaagtattttmtaggtagaagccatctgacctttaaaaaagacatcttttataaattcttctttgttaaccaccawtagtgtcaccacttttcgatcctttcagtccttctttcaggattttgaaaaagactcgtaaattggatagcttttctaaaagtgcaactctctcaattctgaaggtaatcttaaaagggaattagggacatgtgggatctttactagctccattagtgccaaacttgcaaagagaaactatctttaagtcaaaattgtctccttgagtgcgtggccattttgataagaatagtgcaaggtaatgcaatcccactttaaatttagaagttctaaagttcacactacactgaaaagtcatcagtgagtggcactgccatgcttacattagaggaaagaatcaggtactcaagtcttgaaccaggcaaaccatttaatgttctgcaggcaatatggatatggacatacaggtaaaaagaagatctggatctccctgcccttcaattctttcatttcctgastgtgtgaccattattcataatgaccatgtgcagtcttggcttgttccttctgtttttggtttagaatccttacctgggaggggaaggaaggataccttgttcctgccttataagaatcaatgacacagcaggtttgaacattccggtgtatagggagtagactctaaatttagcagcccctctagctactagaataagaatttagtgatctgaagaatttacattctgccagcagttgatcgagttcttatgatatgcaaggcccaacgttggacatggaaatgaaccaaacacaatctcttccctttagggcaatactaggtagtttcaaaaatcatgttgggatataaatgattagaatatagggtagaaaatatctatagcaaaagggcagagaaaataaaatggggtcatggaagagagtgagattattcttggctatgtgataaaggaaagcttcakggagaaggtagtatttgagttaggtcttatatgagtaaattttgtacatgaagagaaggggattagtacgttgatgaaatagttttataaagaaccaacagttttatataaaggagtagaatgggaaataagtctaggaaggtggggagaatcctctccaaaggagtacaagatcccaaggctttgtatttcatactccaaggttagaaacgtattgtatggctttccatcagaatcacatattgagtttttgaaattgcaaatgtctgagcaggatcattcccaacatttgtggggcctagagcaagagcatgaatggaggtccacatactatatgtcgaactatttcaaagtgttaaaggaagctgcacccaagacctggtccttgttcccatccaagggactgctttgggactaggaggcttaagaagccctgctgtscctcaaggccatcctgcactagaggcctgattcattgcttggaacttcacgggggaaacaggacggaccctggacttagcctggggactcgtgggcagggcctgcatctgcccccatcaaggatggaaatgactcagtccaggtcttctggttactgaaggaaaaggttctcctacctcatgttttacttttctgattccagattaccaggaggttctaagcaccaggtgaaactatactcacccactccataccccctccccaagcagaggggaaggtagaagtacagttacctggggaacacagtctgcctatatatcctcccacttcaggggctactgggtggctatccagaaactaaagcatcccttctttctttgatttcacagggcccacacagcctgacctctctcaataaggggatttcactctttttttggtctatcccatttgcccagatgacccagttcagctgctatgttcctttccatgttttgtgtgctctcaattggtcatgaaactttaaaacatgagactcagaaaaaaaaacctgtytttgcatgactgtgtttgtgatgcttggagactcctaaagcctgtgacctttcttggtctygtctgagggttgtgctgtgtcttaacccaagtctagagctactgacccagaatgtcttggggttaggattggasatggggtctcaggatctgtgttaacaagtttcaggggtgactataatgcccagtcagggttaaaatcactgttaacaataggggaggtttttctacttagtttttatttctcagcaagatgatattttaaaaagcamactgcaggagaatggaagatgaatagaaaggtggtgaggctaacaggagagcctcaggaaatcaccgagcaaatgagacaagggcctggatgaagcaggggttatgggtggaggtgagaagctggttgggagaggtcaacaggagatcccatcagaagtgcccagtgctcagagggagtgatggagtcgaggatgactctgaggtttccggcttgttatgggtcatattatgtcccccaaacagatatgttgaagtcctaactcctagtacctaagaatacraccttgtttgataatagggtctttgcaactgcaattaagttaagagaaggtcattgagggaaagccctaagccaagatggctgggatccttataagaaggggagggacacaaagggagggcagccatgtgtccacaggggcagagagtggagtgatgtggctgtaagccaaggaatgtcaaggattgctggcaagcactagaagctaaaaagagcaaggaaggatccttccctacaggtttcagagagactatggccctgctgaccccgtattttgtatgtgagacaatacatttctgttgttttaaggcacctgttcatggtactttgttttggcagccctagggaccgaatacagagctgtaatggcctgcactggtgttgcctctctctgcactgggtcatcagtgagggcaagcgtttctcgtagacagcacctgtctatgaatgttctccacagcatagacatcctctgcaccagaaacagagcctcatattcggtgttcctctttgttatctagctgcacaaacacaaggtattaattcactaagggtttcaattatctgctatataaaaaggcataaacataaaaggttttaattgtcttttatataataaggcagtttccaaaaattaaattaggatttttacatttagttttcccattctcatgctgaccatattttaatttgatttcgaaagcatttttggtaatattttaaagtattatctttcatctagtatcataaaaattatttagaaaacctatagaagatttcatctctacaagtaacatttttcagataggaaatgattgcagcattgaactgccaaagagacagctgaaaaaaaaaatgggtcatgcattcatcccattctagaacagaggctgccaagcagttcactgctcatttttgtcctgttctcgtaaacaagctgcgttaacaagttacttttaaaaagcatactaatttccccagtgaattgcacaggaaagaatccagcgttccctccagaggactcaaatagttgtttgttctcagagctcaggtgtggtaaaatagccgtgggctaaaagcacaggctggatattggccagcaggctagagcttcccctccactcctgatttctcacgttggtgagaaactcatagcctgcctgatrtgggggggagaaaagactcgattttcaatttcaatttaattacacaatccatagtgcctaatgggaaggatttagcggcaagattaatgctcagcrgcgctccattttgycttttttttttgataaaaaatactgtatggattatctaaagtgggttttcaaaaatgtttttcaagagccaaattattttggtggcatagtgatttgaaaaagaaggtgactttatttcttgactctctgccagagtttatataaattagaggtataagatacctttttgaattgtattgccagtgtatcattcttgagagtggggagcacttctttacttgggagaagaatgaatagaaatttcactgtaggattagaaatataagcaatgattgaaggagacgacgatctgttctgagaatgactgtaaaattaaaatattaagacctttccctcttcagttaaatcctaaagaatttcactctcttattgagactgaaaaccattataattttatatggcatcagatcaatatttaagattatgagtaaatatttggcattctattttggtgtctacatattttgttagttttgctaaacgtaaaaagaagctaaaataggaaatggaaatctacccatgagaagtgaccttagtatattttttgaccaattgctttaggttgttaagttaataagggaaacaggtaggttgttacatttataaggaaaacagggctttttataaggaaaagtattcctatatgatttaaataaataaaaatagcagcartaaactttactggctaaccattgctgagcctcaccaaaccacttgagcacatacaaataattttaaatgaagtaataaagaaactaagggccggcgtggtggctcatagctgtaatcccagcactttgggaggctgaggcaggcagatcatgaggtcaagagatcaagaccatcctggccaacatggtgaaacctggtctctactaaaaatacaaaagttagttgggcatggtggcacacgcctgtagtctcagctacttgggaggctgaggcaggagaattgcttgaacctgggaggcggaggttgcagtgagccaagattgtgtcactgcactccagcctggtgacagagcgagactccgtctaaaaaaaaaagaaagaaactaagtttaaaaggcaaatgaactatttgaaatggccaaatgattttgctatttcacaatgatggcattttcaagtattaagagagttgctactacaagtcaacatgtacaacagtatttaaaaacaaaatggcacctgattaaattttggctactgaatttgaaaaatagtatattagccaaatgggttgactattttgaaagcttgatgagttacagggcatctggcacagattgggtaaaactagaactttattgggatggactgacaataggaactagaattggaatttcttttggagtgcacttagaaggttgaaaaatgcacctttgactggtataagtgtagatttaccacccttctctttggtaagggtaagctgtaatttatgccattgaaaggaaaaaagaargaagatatggaaatgtgtacctatgggtgaaacccaagcatattttyccacaggtcaatgtctgcattctctgactctagtggcacaggcagggtttggagaaactgtagctaagctggcctggggaaaaattaggtgggtggggcaagatatgcttttggggaaggcctctctttgtttgtgtggctgcaggtctcaagctcctaaaacagttctrtagaaggacaccatctacctagaaatacaaaaatagatcagtaagaagatgggataagaaaaccatgatgcagacaggaagatgctggccaactgtgagtagaaacaaaagacsagaatggaagatcaacttgtggtatatagggggccagttcttagctgtttgggaggcagtgacttttagctgattgaacgaaaacctgagaaaatcacggagagtcaccttagttaagggaaaagtagatggaagtatctatttgctgccatgatagtatcaatacagaggtcacaataaggtcacagagatacttgcaagttagaactggcagagtctcattagtctactgtttcctgtttggataggatgtggtwgggaaggacttggcttgggaggagacaaagaaagygcatggtcatctacatatgaccaaatatgtttttttccccagaaccaataacatatatattgctcataactaacagctaacattaccccctgccttttttatatttacacatgtttattaacattgaaacaaaattctatattagagtttacgagaaatgagagaatacctggttggtgatatgttcctggattttttctgtactcactgaaagagaaagcaaaaagaatttttacattaaagcatgaaaatgaataaaatgcggtactgatgctgctctgtttacagtaaacacttycaaagtggtcatggactctctgagcaaggatttctatcacaatgtggatgtttacaaccacttcaataactggggaaaaaaagccaaaacctaaataaactgtgttaggcaaagataacagaaaatggagtggaaatccwataagggtgataccagcagaatgtattaaactttcacagataaatgatgaagagatgaaaaggaccgaagaaaaatttgaacaacagccagtcaaaacaaagttttccaaacaatgacaacctattgaagtataatactaatactgagctcagggaaccctgagaactggacaaggagatttgaggtggcagatggcagcagtgctacttcaaaaacatttcttacgtgggaagtgataaaggcaatattatactttgttgttatggtactgccagagattgaagtacaaaccaacagttctataaattgtatcttgatcaggatgaaaaacatgcagagtaatgtatgacaggcaaccaagggacataaaaaataaggwttctaatataatatatttctctgtcattgtgaaaatagcctgaaagtgatcaacgttatgtatgtcttaagtagaggaaaataaaatccttagtagtaataaataaaaaacaaaccatgagaaaagaaaagagagaagacatttagtggcatcacagttattatgtgtttgtgaacaycttagtgtgttacaaacattttattaaatgtgtcccttttaaaaaaacaaactttaattttaattgaaataactgttgagtcacatgtagttgtaagaaataatgcagagagatctcttgtactttttacccagttcccctaatggtaacatcttgaaaagctatagtacamtattacaaccaaggtrttaatattgatagaaagagtgtkttccttaccacaagtatctccccttttgtscactacactacatcactcccctccacctccatgctttccmtaaaccstggcaaccamtagtctgttttccatttctgtcgttttgtcatttcaggaatgttatacaaatgaatcataaagcatagagcctttaaggattggcttttttcctsggcatacttctstggagattcttccaggttgctgtgtgtgtcartgtggttggtttctttttattyttgatatattctgtggtatggatgtgccaaagtttgtttagccatttactcgttgaaggatatcttggtagtttmtaagttttgactatcatgaataaagctgctatamacatttttgtacaggttattatgtgaacataaatcttcatttctctgggataaatgtccagaagtgacattgctgggttatataatagttgtaggcttaattgtttgagaaactgccaaactgttttcaaaaaaagatgtcccaagtgaaacttactggycaattagtcamccaataataagtatacttaaaaattttgttaagtattcagtaccaagctccatgtcatatgagatacagtagaagtgtaaggcgtataggggaaattgaatggtgatgttcagagtgggctatttcatggtgtcattgttaggaaatgcctgatgcctggggccastctcagactcgccagataataagaatcaattttcttcatttttttaagggcaatctcaatcagatactcttgatatgttttagatttcttttgtcagtttatatgcggagtgtttaaagaagagacaacatggcttgtgggaaaaggttggccttttaaattacasatcactggtgtttaaatgtgggctccccaaagaagtgacatttgagtcaaaacctgaaagatgataaaggagttaacttgaccaagaagaggggggagaactttcaggyagaaggaagaacatgacamgggccatgtgataggagggagcatagtggatccaaggatagaaaggaggccagcatggcaggtgtggagaggtgagcasggcataktgtgagagaggctacacasatakgcaggaaaccctgcaaagaagtcaggtagaccatttttgggaaatttaagatcctctcaagaacagtgggaaactgaccattaaggggattcaggcaagtgcacaggtagtgacatcagaatagcatgcamagcctatgtcctgaatggtattgcctaggttttcttctagggtttttatggttttaggtcttacgtttaagtctttaatccatcttgagttaatttttgtataaggtgtaaggaaggggtccagtttctgttttctgcatatggctagccagttttcccaacaccatttattaaataggaaatcctttccccattgcttgcttttgtcaggtttgtcaagatcagatggttgtagatgtgtggtgttatttctgaggcctctgttctgttctgttggtctatatatctgttttggtaccagtaccatcctgttttggttactgtagccttgtagtacagtttgaagtcgggtggtatgatgcctccagctttgttctttttgcttagggttgtcttggctataygtgctcttttttggttccatatgaaatttaaagtagtttttttctaattctgtgaagaaagtcaatggtagcttgatggggatagcattaaatctatacattactttgggcagtgtggccattttcacgatattgattcttcctatccatgggcatggaatgtttttccatttgtttgtgtcctctcatacttccttgagcagtggtttgtagttctccttgaaaaggtccttcacatcccttgtaagttgtatgcctaggtattttattctctttgtagctgttgtgaatgggagttcactcatgatttggctctctgtttgtctattattgatgtatagggatgcttgtgaattcatgactaaaacaccaaaagcaatggcaaaaaaagccaaaattgacaaatgggatctaattaaaccaaagagcttctgcacagcaaaagaaactttcatcagagtgaacaggcaacctacagaatakgagaaaatgtttgcaatctatccatttgacaaagggctaatatctakaatctacaaagaacttaagtaaatttataagaaaaaaacaaaccccatcaaaaagtgggcaaaggatatgaacasacacttcttgaagacatttatgcagccaacaaacatatgaaaaaagctcatcatcactggtcattagagaaatgcaaatgaaaaccacaatgagataacatctcacaccagttagaatagcgatcattaaaaagtcaggaacaacaggtgctggagataatgtggagaaataggaatccttttacactgttggtgggactgtaaattagttcaaccattgtggaagacaatgtggcgactcctcaaggacctagaaccagaaataccatttaagccagcaaccccattactggatatatacccaaaggattataaatcattctactataaagacacatgcgaacgtatgtttattgcagcactgttcacaatagcaaagacttggaaccaacctaaatgcccatcaatgacagacaggataaagaaaatgtggcacatatacmccatggaatactatgcagtcataaaaaaggatgagttcatgtcctttgcagggacatggatgaagctggaaaccatcattctcagcaaactaacacaggaacagaaaaccaaacacctcatgttctcactcataagtgggagctgaacaatgagaacacatgggcacagggaggggaacatcacacactgaggcctttcagggagtgggggaccaggggagtgatagcattaggagaaatatctaatgtagatgatgggttgatgggtgcagcaaaccaccatggcacattatacctatgtaacaaacctgtgtgttctgcacatgcatcccagaacttaaagttaaaaaaaaaatatcatacacagatttgcatttttaaaagaccactcaactctggttggcaactgaaacactgactcctcagggtgtcaggggtggcagcagcactacaaaaccttagttttgtttcctttgggactaagagaaatctgcagaaattgaagagacaaataagagccaaacaataaaatattcacaccctaataatgcagcagcctactgaactctagaaaatggactaaaggacagcatggtatctaatagcagctctgacaattactagktgtttgaactggggctagttactttaatgctctggcttgtttgcctatctataacaaagggttaacaatatccaccctttcccaaatttgtgaggattgaatgaaataagaacgaattttgcaggtaaaggataagagaggggcactccagggagttggggcaggacaagtaaagaaatctaagaggcaggtaagtgtagggtgtgtgtgggtgaatcgtgagaagttctgagyggcttatgtaatacacgcatacactttagcaggtgtggggatggaatgtgggaagagggaaggggcccagcctttggagattgtgacttggggtgatattggaggctttgcaggcagaaggaggccagcaaaagtctttcagatgaggatgaggtggccaaagcagttcttgagaaagatgaattgagtggtggtgtggagacgggttgaaggggtagtagaggtgggtggtgaagacagcaatgagcatgtgctgtgtccaggcagaaggggtgcgggcttgagcccaggcagtgagaatgggaagggagggacgccaggagcaggtggtatttctgargyaggttctggagattgattgaatgtgggaaatacaggagcaagaagcamggacaacactcaggtttttattagggaatctggcagatgatagcattattaaagatacaatgagaatacagcaagayctcatctctacttttttttttaattagctgggtgtggttgcatgtgcctgtagtcccagctactcaagagactgaggtgggaggattgcttgagcccttgaattcaagacagtcctagaaacatagtgagaccctgtctgaaaataaacamacaaacaaacaaaaagatacaatgggagaaggaaaaaaaatgaagaggaagttaataagtgaggcttgtgcctgtaataaagaggaagatacctgtaggttacagaagctgacatgacaattayggcagattgaataatggcccccaacatgtccacatcmtaatcagcctrtgaatacgggacctttcatgacaaagggactttgcagatgtgattcagttaaggatctgtggatgggaagcttatctggacacagccagtgtaatcataagagtccttataataaaggggcaggagagtttacagcagagagaaggcgaggtggcagtagcagcaggggtcggagtaatgccattgctgaagagggctgtgagccaagtactgtgggcaacctctggaaactggaaaagggaaggacatagatgactcctagagccctgcaaaggaacgcagccttgctgataccctgattttagtctggtgaggcccatctgaactctgacctttagaattgtaagatgcatacatttgtgttgttttaagccacaragtttttggtgatttgttacagcagcaaaaggaaatgaattcaaacaagttcttatgctttttctcagctgttcctcaaggtacggggaggaaagcacactgctgctgagtaactgctgtgycctgggcmtaggcgacatacctcacagacattatgtcctgaaaagtagagattattcctcctatgtttttaaagattatgtgaccagggctcaaatacatgcagaaacttgtccaaattttcatggtctatgggtgaaaggacagccagcattctaaggaacaacatagctactcttaagacatakaaaagcaaactttcattatataaaaaagacatatgaacatgcaggtttttagcagcacaattcgcagttgcaaaaatgtagaaccaacctaaatgcccatcaaccagtaagtggataaagaaaatgtggtatatatacaccgtggaatactactcagccataaaatggaatgaaacaatggcatttgcaacaacttggatggagctagaggccrttatcctaagtgaagtaagttaggaacagaaaaccaaatatcacatgttctcatttataagtgggagctaagctatgaggatgcaaaggtgtagaaatgatgtaatggacttgagggactcagagggaagggttgagggagggtgagggagaaaagacaacatatggggtaccgtgcacactgcttakgcgatgagtgcaccaaaatctcagaatcaccactgaagaacttatccatgtaatcaagaaccacctgttctgcaaaaattattgaaacaaaawttttttaaagctaactttcaggataaaactagtcttttttgtctcatatttgggtcttatccctccagcttttggttagaggattaaagagggaaaaaataaaaaaattgacaaagttgtctgaccggcagattaagtggagagtcatcccagatttcttaaattttaatctcattatgtcttcacaaaacaaagcagaataaactgcagaggcaggttgcgcacactgttggctcatcttatgatgaaggtggtgttgagacacttctgtgcattcatgagcttcaggaataaaatttgtagaaacagcccyaacccactatcatcaacatgggtggggaaggacctatttctctaagatttataattccaggacaactgcctcaaattctccaaactttgcagtgagactcactaattcttctcattgtaagttgcttgattaatcaccccgaactgattaaaattmtagggaaagttattttgctgcctaaacagtttaaagcagtggttctaaacctctttcaggtaacaggcccctttgagaatctaagagcagttatgattctgcatttcagaaaaatgccaacacacaggaaaaaagggaaaatggcaggaggctaatagaccttcttcagccatgcatagatctgsaagaatctatctgttgctcaaagtctttttgttttttttggtcmaagggatttggaaaatacttcttttctaggtatctcagtaggaactttactctctcaaaccataaatttgtagtgccttacataaaragttacaattaaatcmacataaatcttttgttttaataaataaagcacattcatggcttagattttagatcacatttatagatgaggaaaatttctaggcccamacagtaacagtgaagctactactgctggaaggaataatgtgccacctgtgtcttaaatctcaagagcagagacttcagggcagagaacaccatacacatcacctctagactaggttgctgggagccagaggaagatcttggtraagtgcatgcagccaccatstgctcccatcacmtaatgctgcagaaccaactggagctgtgctactttgagataaactagaggtgggttcctgatcatattacatgacactctctcccattgttagcaattaggcaarsacattagtgacagaggggcatccactgaaaaagacagagcaatactcgaacagcaaagaggaagccacttagacattcttgtttcttcaaatatcagaagcttccacatcatagcaggagggctagggatggacttcacctcccaaaagctgttggcatttggaccaaacaaggctccccggacttctggcatcatctgctggcctgagatccagtcggcttttcagggtgttggaaacctttatttyacaatccccaktgtggatctcaactccaccaamtatgtcctcaggcaggtaggactcctgggcaattgggacatyaacaattgtctgtggtggggattttgtacatagagactgcctttgcaccatagtttttaccggagggaaatcttatttcctgcaatgaacagtcatttggggctctgacaattggtataaaccctggaggaccagtccatccagcagcacttggtacctgggtgtatcttttaccaccttgtgaaagtttattttgaaccataggctctaacgtgtgaaataatttcttggatgtaggcttctctgggtaagttactagtccctcagaactacagactcattagctgtgtagtcattttctctaacttaagaactaaaaatgtaagtttaatatcttacagtatagtatattcattccaaaaaatataataccttcactgtgtcagatacctcctaagtgctgggcatgcaaagatgatacagcagggtgcttgccctcaaggaggtcagggtcaggtggcagagagaaataagtgaagataaactgcagtgcctcctgagaagtgttttcatagagttatggttagcaagctgtgggcacacagatggggaaaaccaatatgattggtcttgggaaacaagtaggtttcccagaggtatgctgtcattaatcactgctatactcccttttaactcatgcaggaatatgtcttgaacaaccagggaccatgattttaattgatttattattagcctttcacttcttggagttcaagaatatctcttgaatatggatatctaagtatctgtattgtactatctattggatatctcttttgcatgtstgagcaaattctakagatatggtgagtttaagaacttaaaaataagttcagagataggacctgtctttgtracaggaatcagaataattagaaggtggaatttgaattakgtcttcaaaaatggrtggaagttggggagaataatggtgatgactaccctaactasgggagagggtttagagagaaacagcattgcccaggcaggtctgggtcaattgctttatgtttaaagcgatagacaatttggggggcaattatggttttttcagcagaggtgggttataaaggaacattaaactggtaaataaattgctcagagtagggggagaaattggagaatatctakgaggcattggtgggttgcacaaagtaagtgatgggttggggcctagactagggaggtrgaaatgagaaggaaaatgaagaaaatcaaagacagcctgttgaagaaatgtttgaaagaaattggtaacaaatgaatacagggaataaagattagaaggagttgtacctgactttattcattcatttattccaacaaatactgtttgatcagctgtcaggtgtcatgtatggatgggtacaaagttctggagacccaactgtgaacaagaccattgctcccaattagcctgctcctttctcccaaagaactggttggctctgttctccccttttycatgacattgtctctttctgtactatcacctacatttagcatgaccacttctgtaggggtgcttgaactgttttgaaggtgccacatgtgaagtcttgaaatggggcaaggaaaagaagatgagattatgaatctattcctctttcctggggtgcaaatacgcccattatagatctgcacatgtagagtaatttcatattccagaactgtggagttctggagtatcacatccccctcttttcaccatcaaattgtattttaataaggaatctgagaatctgggaaagagggccaatatggtgatctgaaacagggcagatttggtcattcagcagactggggccctgtccttacctctcaaagaagcatagagaggaagctattgcttatgaaaaggcacaggacgaggaaatagctcaaggggccaatgacagggtggggaacagggactcaaagaagtccatgggtagcaggacagtgtgtcagtgtcttcagaatatatctacaatgcatgctgtctaaccacagtccccaatttgttgagcccatcaacatgtctcccctggactatgctgttagccttctggggtctcccagttgccactctggctctctccaagttcctttcttcatcttgtaggccttgcaccatctgcttctttcctaccacctctacaaccttgccttgctgtctgtttcccttcctttctaccctccatctactctggtcttatgttcatttctggtcctttttggcctcttgtcttttgcacatgctgttatcttctctctccaattttgcaggtctggttctttcatatttttcaagtctcactttaatattaagaystcaggagttcttccctggtcaccccatctcttcttgtgattcttgatctcagcctattgtttctttcatagcacttaccacaaacttgcaattattttatttgcaggtctggttacttttttgcttgtttcctattctataatgtaagctccttgaggccagggactacattcattttgtttattgtatcctaaggacccagctcagtgatactgagaccactatcaattattccataaatatatgtattgaacacctagagtgttcaatatatatattgatctcagtgggtgaagccttgcactagcctccaacatattgagggcagctgctcctggccctggtttgctcatgaaagaaarggtacatgggttaaaaatctttagatggatgatattagggcctgagtttgactgctgatgaattctgggccatatcaaatgctttgtttgtgatagcagcccttttcatattcgttcccaactgattttccaaaatgtttaagcacctcaataacaggaattacaccagaattctgttttttttttttttgtattttacacatctataccatcatagttctgtattaggaatacagtgtgctccaaattatgggaattgaggggaaggactgagagttaattctasataacttacaagatcatgattkgcaattttcctgatgattaaccacattatacttgtccttttagtttgaatttacccaaatttctaccatttttccactaaactatttactcaaatagttttttkggggcacagctgtggtaaatatatgcactttcttttaattactttgtgcagtgtgtgtagcaaggaagccttgggtaggctggacagcacaagtgcaggctgaaattgagagcccaggcactggagaagaacccaagacacaagcttggggtgtgtctggggatgacaagagaggctggatacaagtttccttggcaaaaggtcagagggagtccagcattcatgacatctgtccaaataaggaagaggcaggtgattactggtggtaaggaacatatccatgctttggagggacttgggtaccaggtcatgtacaactcaggaaagaaggcaggagctcagctgcygggggcctgaagggtaaagcaagggctgattcagaaggtaacagggcaatcttccagtgactgaggtcacgcagtcagttgaggatcagggggactcaggagccacatagttcatttctgtgagttatagccatttaaatatgagaaaaaatymcctcttcccttgagctagtaaaattccaataaattaaaatatataattakagcgccaggtgcagtgattcacgcmtatactcccagcactttgggaggctgaggcrggtggatcacaagsccaggagtttaagmccagcctggccaacatggtaaaaccctgtctctactgaaaatactaaaccctgtctctactaaaaattagctgggtgtggtggcgcacacctgtagtcccagctactcaggaggctgaggaaggagaattgcttgaatccaagaggcagaggttacagtgagctgagattgcgccactgaactccagcctgggcgacagagtgagactctgtctcaaaaaaaaaaaaaatatatatatatatatatatacacrcacaattatwtcatatatacaaatatacatatatcatatataattatatcwatatatatatacacaattatataatcactaggaccacaaaaataatataattgtgtacatatatacaattatatatataatatacaattttttatatatatacacacacacaattatattatttttgtggtcctagtggttatgattctgctaatgataatgtttgtctcttgcttatggatagccttagcctggtggagatgacaatattctctggcctatgcaagaaaagaggagggaatcccrcttaacgaaaacttaagtcattctcaaatttattcaaatcatacttgaaaaggcggaatgaaatttagggggatatgttttaactatataagcctttgctaataaaagattaagaagtatgtggcttagcatcttttaattatttttttctagcaacttgaatatacaatgtttgaaawctctggttggatcaacattattttgctcagaggtttgtggactttgcatactgattctttcctgtttccaagtacatttgcttttaggctatttttattcactttaaaggaattttaataactttctgttgacagcatggacagctggtcttgagaattaaagaaaattcacttgctgactgaggaaggaagtgacatcaatgagcttctaaagtcagcccagcgggggaaattggctggtgagagagtagcctttcattgcactgtatttatcgagcgatgccttgagatgcaaattgctgtatcaatcaaacctgtggtgcctacctccaaccaacccagtgcaaactgaaggaacaatgccctgaaacactgagaataaaaaggatgaggggtgcaggagcccagaggctaagtgaattacggagctcagaatgctctctcaccaagcctatacttcattctctgtcaaacctcagtttctttgtctagaaaatgagttttatggaaactgttggttgaagtcagtctgtttctttgacagatggctaagaggaccaggtactaatatagatagtgtagacatgctatctcagtacgtttgtcccaaagagagctatcaattgctttttatcccctactgagagctatttagaaataggaatttttagctgtcatacttagctactaccttgatcctttgttttaaaaccctgtattcattgtttataactacactgcaaaaaaaaaaaaaaatagccaagcatcagatctggactttaataacgacaatagcaatcacaatcatcatcgtcataataaatgacaattttcaccactatcagagaatcttcttctggagttgtagttacctattttgcaaagatagctgtggtgtgagtagattgtgtgtgtatgtgtgggttatgttgggtgaacaggcaggtatgtatgcatatactcacacctgtgcaaaagaaaggtagaaaagtgcctaggtacattttatgtttatgacatgaaaaattacattctacttatttctttctttcttttttgttgtttttgttttctttttttagatggggtcactctttgtcatccaggctgtagtgcagtggcacgatctccactcactacaacctccgcctcctgggttcaagcaattctcctgcctcagcctcctgagtagctgggattacaggcatgcaccaccacacctggctaattttgtattttttttttttttattttttttttttgagacggagtctcgctctgtcgcccaggctggagtgcagtggcgggatctcggctcactgcaagctccgcctcccgggttcacgccattctcctgcctcagcctcccgagtagctgggactacaggcgcccgccactacgcccggctaattttttgtatttttagtagagacggggtttcaccgtttttagccgggatggtctcgatctcctgacctcgtgatccgcccgcctcggcctcccaaagtgctgggattacaggcgtgagccaccgcgcccggcctaattttgtatttttagtagagatggggtttctccatgtcagtcaggctggtcttgaactcccgacctcaggtgatccacctaccttggcctcccaaagtgctgggattacaggcgtgagccactgcgcctgattctcagacatttctagtcttgactttgccaggctatatgatatttggcaaattacttcacttccctggcttttgttttgtctttattgcataacagggatataaatactaaatttgcttatagttgtttacgttctttgactcttaaaagaatgaggagtaatgaaaattcccataggattggcacagataaaaaagaaaggaagcctaggaaacacgattctagacatcagctctgggaaggaattaatgactaagccctcaaaagtaactgcaaaaaaaaaaaacaaaaagaaaaattgacaagtgggacctagttaaactaaagagcttcaagaaaccatcaacaaagtaagcagatgacctacagaacaggagaaaatatttgcaaactgtgcattcaaaagggttaatatccagaatctataaggaacttaaacaattgaacaagcaaaaacaaacaacctcattaaaaaatggacaaaagatgtgaacagacacttctcaaaggaagctgtcagcaaacacawgaaaaaatgctcaacgttamtaattatcagagaaatgcatatcaaaaccacaatgagatagcatctcatgccagttagaatggctattactaaaagtcgaaacagcacatgctggcgaggccatggaggaaagggaatgcttatacactgttggtgggaatgtaaattagttcagccactgtggaaagcagtttgaagatttctcaaaaaacttaaaayggaagttccattcaacccagcaatcccattacagggtatatatacaaaagaaagaaattgttctaccaaaaagacatatgcactcatatgttcattgcagcactattcacaatagcaagacatgaaatcaacctaggtgcccatcaatagtggattggataaagaaaatgtggtacatatacmccatggactactatgcagccatgaaaaaatgaaaccatgtcctttgtaggaacacagatgcagctagaggccattatcctaagcaaattaatatccaggaacataaaccaaattctacatgttctcacttataagtgggagctaaacattgggtacacatgaacataaagatggaaacaatcgacactgamgaccactagagggaggagtgatggaggtggggaagggttgaaaaactaactattgggtactgtgctcagtatctgggtgatgggatcaatggtatcccaaacttcagcatcacacaagatacccaggtaacaaacctgcacatgtatcccctgaatctaaaataaaagttgaaatcatattaaaaacagaaagaaaggattcatgtttggtgtgggaacctgggaagacttcatggaagagacagcgtttgatctggataggacattaacagaagcagattaggggaacagtattttacctggaaggaaaagcatgagcaaaagcacatcagggaatgtctaaggaacagtaaatggttgcactgaacttaaaggtggtctgtatattggcaaagtaataagagacaaagcaaaaattgtatgatgggccagtatcacggaggactctagatacttaaagaaatattttttgacataatatttgttgagggagtccttgaataattttgagycaaagattgatccaaatggtaccctaggaagattaaccttgaggatgggggatcctggcaaagagatggaaaagtgtagatgaatgtagggcacattgtatgagtaaaatggatttgaagattcagatgaggggttaggatggggaaaaaaggaataaaagaggagcaagattttaagcttggttacttgggagaagatgctattaatgcaaaggtaaaaataaggaaataggtccaatttaaagaagtaagtttggtgagcaacagaggaggtgggatgataagctcggtttagcatttatttggtttaaaataccagtaamacatcccacaggaggcagaaatagatatcaggaaaataccaggcagtcttctgcagagagatgatggggagaagagagcgtagaagactctcgagttgaagggaaataaatatcaagatttgaactttggaaaatggktgtattttatttatatttgaataatttgatgtttcaaattattcaacttagatagtggaatgcaaattttacatcatccatagtgaataagaagagactccttctctaagctaccacaaggatttattctcaggaactagcaaatttgaagtttggtgtaagagcttaagttctcactggttgtggagttaaaagacaattgcaagttttagcagaagaaaattaggctgatttccttatttattaagctgaggctaaggaatgtttagaatttatcggagaacaacagaattgtttatgcctagcattccattattggaacgctaagcatatgggagttatttatatcctactgctcaaggtcattgccaaggtctgattgcaaaaattcaaaaaattgcaacctccagcataaatgggttaagggcagagcccaggcaggagttagtggtgcgatcagggctcactctaaactctgactcctgggcttcagcaattctgccatatcctttcgagtagctgggattacaggcatgaaccactatgccaggacttctttcttctaatggagtattctcttccttctagtaataataatttttgcccatcatatgttttatgaatatttgtcctaatttgtcactcacctttacttgtktacaatgtttagggaataaaagaatattatagcaatggctagtattcagtaagcgcttacaacataccagcaacatcgatacattcttcactcagttctcccagcacttctgtgggataaggctattgcagatgatgaagaatgaggcatacagatactaacgtgcctggaattgcagctgggaggtgatgaactcaagcctcacttctgagcctacatcatttcctttctggtttctgctttcagtgtccagcttggaaaggcacaactccgtgcagcaattaaaaataataaggtcatatctgtatgtaaggctagagaacaatacctccattgtatttttagaacaatgtgtataactaatatgttttttaaagtacatatgattatatgtaaagaagtcagaggagatatactttagcactttgttacacgttaaggccgggtgggaaaggagtaagagttacttttaatttaagcacatctgtttccttttttttytttgcccttgtgacagcaactggctccattgcccaggctggagtgcaatggtgcaatcatagctcactgcagcctcgaactcttgggctcagacaatccctccaattcagcctccaagtagctgggactagaggcatgcgtcactgcacccagttaatttttttaatgtgtagagatgaaggtcttgctttattgttcaggctgttcccaaactcctgggctcaatcgatcctcttgccttggcctcccaaagtgttggaattgcaggtgaaagccactgggcctgacctgcttttgcttttcaaaacttttttattaggaaaaggtactgcatcaatttaaagagaacaatgtttctgttttggataagaaacatgggtgaggctttgaatatgcttttcttttttgcacattaggacaggcgttccttcattcatccacttgttcaaccattcatacctggtttgaaagtctagtttgtgttggtcttgggctggctactggaaatacaaaggcgaaagggtataatcagtccctcctctcagtctggcagggagacacacaggacagattcggagtgagagttgccataggaataaggcaaagtccagtctccattcagatgaaragggccaaagttggcctgggggtgtcaggaaaaactgccaaaaggctccagcttttaaactgagacacagcttacasaattttccctttctagttcccataactgtkcacacccactgactcttycagcctggggtgtkaatgactctcctgttactaacctggggttactatactatcttccgtggtctgctgctccctctactcctatcccaaattatagtctccttttttttttttttttgagaccaagtctggctctgtcgcccaggctggggtgcagtggcgcgatctcagcacactgcaacctctgcctcctgggttcaagtgattctcctgcctcagcctcctaagtaactaggactacaggcatctgccaccatgcccggctagtttttgtatttttagtagagatggagttttgtcctgctggccaggctggtcttgaactcctgccctaaagtgatccacccacctcagcttcccaaggtgctgggattacaggtgtgagccactgcgctcagcattgtagtctctttctatataatctttttttaacttatctcaatctgaatgtggcctctgtttcctttgggacatttactgatagttggtgcctttcacctggggacaggtgcagctgctgggagctggtagagtaaaggctggtggcatcaccatcgcctggggtagtttgcttatcacctgggtattgagatccaaggccgcttcaggcagtatctccgcaggtgtctggtataaatggggagaaaactggcaggtggtaggtgatagatggtagatggtgtgtttatgagtcaggtggaacaaactcaagacctctagaaatcattcgtgagatgggatgaagccagagaaacagttttgtaaaagtttttttgtgtatttgaaactttaaagctgacattttctgaggaacacccattacttcgatgagaaaattgagggttcagtaagttattaattcacccatttagtcattcgttcagaaaatactgagggcatattatgtaccgggcactgtattgggcatagagtgaatgaaacaaacaaaaacactcatggggycatatgtgaacccaagtcagtctgcctctcaacatagagttctttccactgtctcaaactgycttctattaaacatttgataaatctcatttttccaaaacttgacatgaaggactcrctcctctgccatttcmtggaaccatgggctgcttttgcaccttttcttctagatgtgcactttccgctaagcttggcaggatctccaaactcytaaactctgtgtcctggtaagtcatcaccaggactaaacaaacattaatgttggtgcttattactgagccgttgggtctatttttaagaacacaaagaatgaaaagattagctgcctacaagctcccccatctgttcaaatggaaaaacttcacagagccctagggtgctgggcagcgcagattccagcttctgtttttaaggagtattaaaaaaaaaaaaaaaaggaaacaattatttcagtgtctctacaaatgaaaacatctatttcaactcaaagaatattttgtaaaagtagaatgtagtgagtaagatcacaaacttgggtgtcagtgagactgggttccaggactaattcttcattttagtagccatgtgacttcaggcaattcaatttccttagcatccgtaaaccttgatttagccttctaaaatggagattatcagagacaatccctacctcttgaggttttcatgaggactaaacgatatcatgcacgtttcatacttagagtagtgcaggtcacatagtaagtgctcaataaatatagtcactactgttatatgcattatctctttcacttaacacaaccttaagaaggaaagaaaaagtgattatgtaatctaaatatttgtagccagggaagcaaatagttcttcttatagtttcataagaagagcatttttgattaatttaaaggaaaaccacagacatttaaaataaaaaatagaagcagaacgctgatgtggctaacacaagttggacaacatttattaaygttctaatgctttataaaaattggagaccaaatagaaatccatataatttcctttattttattgctcatatctaacttagccactaagaaattagtgcaatactttatggatgttttcagaggcagctcttataattttcagttgacgaccttaacaaggtattggttacatgaaatgtatgttcattctcaacckcccacctgttttattatttctctccagaaacaaatatttttctggacttcaaacaaataggacttcaaattcctatttcccatttagtgcatgttacttatatctgctgctttatttttcttgatgtatttacaataagtgagaaaatcagatctaggcccagcttacagttatggaagttctagtgttcttcagggcagagcttctcaggcagcagactgtgggccgtaaacaggtatgccwctgtatttgccccctggcttctgggtctaccagtcagggcctgggccagcccaaatctctaagctcattgccttcccacctccagcagagcagtcttgtccactgtgtgtgctacacaaataccaycttcttccatgtgtgctgtgatgtgggaaaggatggaaaacactttcttggagaaggaggagctttgagctgtgcccttccagaacaagactaaaggaaatgtgcaggattgaccctgtgtttcagagtacagcagaagaagagagcatgaagcaaacaggatgaggaagaggtgacatgagggacaaatgcacagggaaaggagcgaagatgggaggtctttctgcctagtggtcagaaggaaggtcagatggcgatggcaggagccttagactagaaaataagagggtttcctctgctttaatgtccagaatcgtgatttatttctttccttcattatttgtagttgtccaaagtgatgaaattcttgggaagctattatgaaaactatttacaactgaatgcattcccaattacaagcattggaccagcattttttgggtttagaatttgagccgactgtgaatggattatgagactcatgtgagtgtcccctggctggtgggtcatggcccgaagctgcactgtgcggcctgcaatgtgtttcataaaaatactcaactgaggtagcaagtacttgtgctggtggcagtgttatttccacttgcaggagcagtgtagctccatagcagtgccatcagtttataactatgtgaagatttgtgtatgagaacctcagtgaactgacaacacattaytgatttactccagtaatgtcstgtgctttttatagattagaacccctgggaagcaggccatctggcttgccctttagtttgacctggcctgtagcatgggttttggaattcacagacctaagttcaagtctgagcgctaccaccattagctgagcaacactgggcaacttatttaacatctctaagccactgattgcaaatcagagagatgtgataacaataaaatttactgcatggtattgctatgaagactaaatgaataatgtgtgccatgtatctagaagagcttaacacatgttcactctcctcttcactcctgcagcaacagcaaaaatcatctgtcgagttaagggtaagaagatcttatactagtagcatcagatgctgaataaactcacagagatcagagcctcatggtcaactggtaggcctagtgagggactcaggaagaaaacatctcataggaggacaagaaagggtgtcaaagaagtagacattgaggaaacaaaaaaaccctttggaaccctgactaccatccagtgagacaagattgacaattaaaacagaatagacataatatgatccatgcctcagttcctatgcctaatgttgcacagtttggcaaaaagtaaatagtttattcataatgctgcttttaattttcccaactaattgtttttatttctttctaaagtgtctggcaatcccaattgatagactcaattgatcatttagtgtagaaagggtaagttaggaaaatccaatcttgacaacttttaatgatttttctgatgtattaaaaaggtgggacactataaaactatgctttatatgacagctcttttaaaaaatcaagtacaaagtataattgaaaatattctttcatttttctaaagaaatctcttttaaattcttagaaaagatcaggcacagcaaaagcgagttaaagccttaaaaatatgttattggtgtcttagaccccaaagcagaaatatacactcattttaagttgcaagaataataatctagatctttggggattttaaaaatttcatctctttgccttaaatgattttgaaacaaggcatgaatataaataatacatatagtacttctggatttaaacgtctttgatgaaatgatgatactggcttggaatctctctctcttactacacacacgttcatgtgtgcacttgtatgtgtacctgtgacatagctgtttagaatggttggaccttcagatggattggccacagacctttctrtcatgacacagccttgccagtcattctttcagcttcctagctcccctggcagtggtggagaagatcccaagttgttatcaactgaacaagtgaaggaaagttggktattttaaggcacatgaattattttaggatttctggttgtccctggctaagtttttgatgattactggagataagaaaacaakacttaattaytactttctttaaaaaaaaaaaaaaaaaaagctcttgcagagtttcagaagattctggaaattgacatgatttcctaatgtyccagttggtagatatctcgggttggcctggggacttgtcatttcagtctcaggcagacactacagatacgctttttgggggatgggtcaaaaggagagtgtgactgaaacaytgagggctttattcttccttttgtgaattctaacactaatcatattcatcatgaaagacgtttccaatactgagagagtgtaaggcaaaaatcaaaagggtcacttcaccyttagtcacaccccctatgtctttaaaagcaagaagacaaatacaaaaatccttgtatatgcaatgaaagctttctgaatgctatgtaggaagctgcttatataasggactgcttatctaacattctgaaagtttatgttgcattyacagggatatttatatttgtctttttgcttttyacacgtgtagtagggccatggtgtagatgctcttcagctacttgttttttgcttttgtatattacaatayacctgtatattgtaaacacctttttgttggtccctatagatctacctcattgttttcaataactgcattgtattctactgaatagaagtcctataattttgtgggcagataactattgtatgtgtttagaaatttcttatyacaagcaatttgtcaatgaaacttcttgtaatctttgtgtactcaygcaagtatattctatcggttaaattcttagaagtggaattatgtggccaaaaggtgtgtgtgatggttaataktgtgtcaacttgattggattgaaggatgcaaagtattgttgttcctgggtgtgtctgtgaggtgttgccaaaggagattaacatttgaatcagtggactgggaagggtagacccaccctcaatctgggtggacacaatctaatcagctgccagtgcggccagaataaaagcaggcagaagaaggtggaaagactagactggctaagttttctggcctccatctttctcccatactggatgcttcctgccctcgaacatcagactccaagttcttcagctttggactcttggacttacatcagtgatttgccaggggctctcaggccttcggccgcagactgaaggctgcactattggcttccctgctttcgagctttggggactttggatctggcttcctggctcctcaccttgcagacggcctattgtgggacttcaccttgtggtcctgtgactcaattcttctaataaactttccttcgtatatgcatctatcccatttgttctatccctccagagaaccctgactaatacagtatggaaattgaaatttttggttgttattgctacatgaccaaaaaakatatattatataagtaatatatatttacactcccaccaacaatttatgagagtttgttatttcacccacatcctctaggctttagcattgtcagactttgaaactgttggcattgctatctcatgtttttaaccaacgtttaaaaaaatcatgagtgaggtcggtgcttttatgtttactaaccattggtgtttatttttctacagcttgtccattttccacacatctactttttatttataatagttttgttgcactttaaagaaattagatacctgtgtgccaaattctaaataagttttaagtctgctgtcttttgaagtcatgaaaatttgtttgcatgtgtgtggatgtctttaatatgtatatattcattaaatattctacaatggtgcatgcatttcataccatttttagaaaggcttttctcaatccacagctgttttttaaaaatgagctattttcttctatgacttttacaattattttgatgatttcttaccttatggttaaaaatttgrcacakttgaaatttattttggtttaatgtttgaggaaaggatccagatatgtttttcttccaggtggctggtcagttttgctcaaaatgttgattgaaacatctatctttcttctactgattaccacttcacttacacaaaatcctcacatgggttcaagtctatctacactcactctgttccattgaccattctcatttgaatttatgcagtcttttttttttttttttgagatggagtctcgctctgtcacccaggctggagtgcagtggtgcgatctcggctcactgcaagctccgcctcccgggttcacgccattctcctgcctcagcctcccaagtagttgggactacaggcgcccgccaccgtgcctggctaatttattttttgtacttttagtggagacggggtttcaccgtattagccaggttggtctcgatctcctgaccttgtgatccacccgcctcagcttcccaaagtgctaggattacaggcgtgagccaccgcgcctggccacgaatttatgcagtyttatattttaatactctttactagctagtcttccttttttgattctctctctctctctctgtgtgtgtgtgtgtgtgtgtgtgtgtgttaagccctaataataaaaggatagaagtctctatacaggttgaaggtgaccttgggttgtgagtatatatttggcaattaagctcccagataaagatgagtttattccacaaaatagttcttgaaaaccgaccgggctaggcactctcctgggctctgcgcacacagcaatgaataaggaagaaaaggttcctgttcttgctgagcttacattagagagttggggaggagcatacaaacaattagcaaataagcaaatgtatacggtcttattgtgccatgaagtgaaaygaagaagataaattagggtgatgagctagagagtgagggaggagggaggtattttagataagttatttggggaagattttctgagtgacatttgagcgtagccttaagttaagcttcagtttatcgtatctaatttctttctaaatagtttgaycttgatactttagtgtctaaaatagaatttgttatatttcccttaaaatctgttcccctctgatcttcaccattttggtcagtgttatcattayatttcttggtcatccagaccctgaaattttggggccatttacttctttgtttcctttcccacatgacccattggtaggtccagagcaccttctccagggcgtctccagcatgtttcttccttggccattaccatggttgggtgcytaaaattgcccacagtgagattatcatgtctgcctctaaaccagtgtctctgcctccagtgtctcccactttcaacccagactcaccctgctgtgatgttaagcttctaaaatacagatttctgatcaaaatctttgagctgcaaatggaaagtatttttgcttatagaatgacattagactgctttatttcagattcaagatcttgcaaaatctgagatctgctcaactctcaactcttctttccaaatgaatgcttcctatctgccaggtacaattctaaatgctgtatgtattgattcatttaaactacacaacagccctttgaggtaygtactattattattattattatttttgagacagggtctcactctgtcagccaggctagagtgcagtggcacagtctcggctcactgcaacctctgactctggggctaaagcgattctccctcctcagcctcccaagtagctgggactacagtcacatgccaccacacctggctaattttgtattttttgtagagatggggtttcaccatgttgcccaggcrggwcttgagcttctgggcccaggtgatcctcctgtctcrgcctcccaaagtgctgggattataggcgtgagccaatgcgcctggctgaggaaggtatcatcataattgccacctcataaataaggaaactgaagcatggggaagttaactgactcatctaaagtcgtggagccagcacatagacatccatcactgcaatcaaagaaatctggcctctacccatggtgatatatgttaccttctaatgtttcaagatctattcctgcttgtgtgtgattgaatgttgttccttctggcagaaatcttttctcagctctatttttgcttgtctatgtcctcaaggcccagctcaggtagcctcctatcccyttctctcaccagcctcatcctcattagtggcttccacccctgaactctcaggacagttttaggatgtatcacccactactacacagtggagcagatgattctgagcacatcttctgtttctgcaactagattgcaaactaccttaaggtagacacagtggcttattcctctggggccctaagaaagacctaacttgcatagtaggtacttaatgttgattgttgaccatgtcagtcatagaacactcactcaatggaataaagctggtgtctagatattggtgacaactttagcacatttaaatttaaagtatgctgtgtaaaaatttcagaataaagacagagaaattcactcaacaaacacttatggagcatatgctgtgcacctggcattgttgtcagtactcaggaggcattcctgaacatgtgagacatagtcagaatagactaggttgtgttgyaataacaaacaattgccaagtcacagtggcttaaaaggaaaggyttattcatttatcatactctatgtcctttgatggctgccaggggaataatgttcgaattaatcactcagggagcaagcccagtggagcagcttccatctagaaaggtgcagatgctgtgtcagagggaggaatggacgtggcagatgtgctggctgcaaagagctctgcccgcagcagcagcacgcatcccttctgctcactttctattggccaaagcaagtcacacagccacgcccagctcggggggcgggcagggaaatccactcctccactagacctggaaggacagagcgcccatggctatggatagctcccacgactccccacagacaaagatttctgcctggtggagcttattccagtctctcaagggaacacagacaataagtaatagacacgataggtaagtaaatggtagaacatgttagaagatgacaagtattatggcggaaaaaaagcagagtttggtgaggaggttgtgatggaggtgtggcaggggtgtggaggrraatggggttttcattaagatggttacattgggccagacgccgtggctcacgtctgcaatcccagcactttgggaggccgaggcgggcggatcacttgaggtcaggagttccagaccagcctggccaacatggcgaaaccccatctccactaaaaacacaaaaattatccaggcgtgatagcacgggcctgtagtcccagctactcgggagggtgaggcaagagaatcacttgaacctgggaggcggaggttgtagtgagccgagatcgcaccactgcactccagcccaggtgacagagcaagactccaactcccaaaaaaaaaaaaaaaaaaaaaaaggaagaaaaaatagatggtgacattgagcaaggaattgaaggaggtgacagagtcagtcatgcagctatcctgggagaaagggttctrgacagagggagcaggagcgcaaaagccctaaagggagagagagcatggccgtgtgtttaggcagcaaggaagccagtgtggtggagcagatggggaccgacagagtttggggcatgaggccttggggattccaccttttcctgcgaatggtacaaggagccgtgtcagaattggaggcagaaaaataacccgatttcactaacttgataaaggatctgtgttgggaatggactctgggagggtaaagatggaggcagggggcggcggcgagcaagacagtgatccagatgagagctgaggcggctcacccggggatggcgcttttccttgccaygggctctgataccagatttcctttcaagtgtgtgttttaaaatgcagttttggcttccaacactgcgtggcactaagaatgaaatccagtttcttcccacgacccagaagacggccgagcttcaccctctggcttcaccccctggcaccccgctcctcgtttacygaagccagctacactggcctccttttggtcacttgattacaacaaattcttccagcctcgcggacattccctttacctagaacatgttctctcctttttcatgtcttagctcaaatgtctcccgttggagasgctttccctgacctcaaggaggcctctcctgtttatcgttggtctcaccactccstgtayttccttcatggtggttactgcagtctgcagtcctatagtttacctaattccttttcaatggtctatttcttactgctagaacgtaagctccataatcagacagctgggattggctgtgtcttgttctgtgtggaaattccagtgtctagagtggtacctggcagaattaggcacacaacaagtgtgtgcatgaaaaaaatgaatgagtcaagagtcccatgggatgagaaggcatcaaggaggcgaaggtgcggaacagtgcgtagaaggccccgggttcaagtagtctcataaaagctggagaaggtgttgctttagatcaagcttatccaacctgcggcctgcaggcggcatgmggcccagaatggcgttgaatgtggccgaacacaaatttgtaaactttcttaaaacatgacattatgtttttttgcaatttttaaaagcgtatctgctattgttagtgtattttacgtgtggctcaagataatactttttcttccaatgtggtccaaggaagtcaaaagactggacacccctttaaatgggaaagtgttttttgaacccaaaagtgggtgccgtcactctgagcatgctgggcccttatattctaatgacctggtttttgtatctgtttcccccaccaggggctatgtgctattcttccttttaaccttggtgcctacgggctcaaggaatattttattgcaccaaactatactgactgctcttgtgttcagactctcatgctgagctctctaattagatcctcattaaaaataaaatcttatcatgaatcttgtagggccttcatggacaaaaaaattgtgcatgcctgccatgatattttggacacactgagatgtttttaatcaagccaccatctgggccatacattttggtgactccattttattgtgttccatcaattcatggcagcctcacacaatctgaagtatggcatttgaactatgacctataacaactcagggagatgcctatttccttcctgaagttttaagatccaatgcaacttgaaatgaaagaaataagggactaataagatgaaaagcagtcttcaggagtggacagtggacacaggcaggcatggcaaagatggttaactaggtgaaaaactgcgagtaaccaaaagaggtgaatgcaacactttctctagtcactatcagtgttccaacacaggtggaatcctgaaaagaacagcaaacattttggatggtggaagtatgaaaaatgtgggaaaggaagagggaagagaagaataagatatgaagtatgttttctgtattttataactgctgttgaattgatttcttctgaaaccctatcagtgactttagctttaggttataattttgtttccaatttaaaaattagtttccttatatttgcatggtgcctggcagctttcagatwcttccatcatccatgatctcatccggtcctcccaacaagcatatagtaggcagagcaggcatacttattttctttcttttttttttccttttttttttttgagacagggtctcaytctgtcacccagattggagtgcagtggcccgatctcggctcaccgcaacctctgcatcccaagctgagacgattctcctgcctcagcctcccgaggagctgggattacaggcgtgtgccaccacgcccggctaaattttttgtatttttagtagggatggggtttcaccatgttggccaggctggtcttgaactctgacctcaaatgatccacctgcctcggacttccaaagtgttgggattacaggcatgagccactgcgcccagcccaggcgtacttattttcatttcacaaatgaggaaagagaggcttggggctmtaggcaccttgctccaggccagagagctgttacgcggcagagctgcaagcatgggtcttttgataacacacctastgtgtcstgctaaccttactttgttgtttaaatctactgttttattagataaggttctcctgagccaagatttcagttgcaagtgatgtagtgatcaattgcttccaggagaagccagtgagggtggggggaagasacatagggaacaggaaggagcccacactcagcctgactttcctttttacttgtataaatgtatggcayacaagtataattttgttacatgcagaaattgtgcagtagtgatgtcagggattttagggtatacatcacccaaataatgtacagtgtactccttacataatacctcattgtctggcccctcccactgcccccmccactccgagtctccattgtccatcattacacactctaagtccatgtgcacacattatttagctcccacttataagtgagaacatgcagtatttgtctttmtatgtctgacttatttcacttaaaataatggcattcagtttcatccacattgcttcaaaggacatgatcttattctttttaatggctgaacagtattccaatgtatgtgtgtatatatatatatatatatataaatatatgtatatatgtgtgtgtatatatatgtgtatatatrtgtgtgtgtgtgtgtatatatatatatatatatatatatatatataacattttctttatcttattcattgatggacacttgggttgattctacatttttgctatagttcaacctgatttttgagggaggggcactgcagagcataaattacatctcagaatttattcaccttggggcaaaggagttggccttttgtattcccacatacttstgttattggccagtcagcaggaggtgtcccccaccacagggaggaaccaggagaacaaggaggacccagtgagcccgagcaatcttctcatgggtgggagtgccagcctgttagcagcaaagcacattagaggggctccaacaatgtactccaaatctacgctcaacaggaggactaaataagtgggataagcaaaagctacttagaattttaaaaacgctgcctgaatataagaaataattttattctggtgcattcttaggacaaatggaatcattccagaaccttctttgaaatcagaatcagacacacttgcagtaatctgactctctccctgaggaatctgatatgaagacagtcatttagaaaaaggagttgtggccaaagctggatattgtttcactgaatttacagaattaattcttttaactaattctgttcagataaaagatcaagcctagcagacaagtgatttagccccaggccacataactggtaattgacagaagctgaatgaagtcaggtctccggacactcagtccagagtcctttccagtccctgcctgcccagcattaggaagcgattttgctttctagctgggccagacagggatccaggagggaagaagtgagggagacattcccttctttgactctgatcttcagcatttttgaagcccactcagacatggagagagactaagtctcttgaatgcttttcaagtccttctctaccgtggatgggaaggaaagcattcctgagactcatttgtaaagactgcatgatgtgacaaagtcacatgaatacaggaagccatcaggccacagtgaggaaaggaagctggggacagggggctgctttgctcctgagaaggctatcacagtgacaattgtgatctgaaggtcctcagagtttagtagaaggaaaaaaatccatctccttgcattcttcttcaggcagtcttatgcagtgcttatgtatagctgcctagtccaaggttttttcattttgtttcttcctcttttataaagaaagatgttatttgcaggaaaaacatgagtgagagataagggatctgagcagtctcatgtactttgccaggcccttttatggaatgggagcatccttcatgcaaaattcatggagtcattcttatgagaagttcagcatgcctactcttttctatggtcttagatttctaagaaaaatgtgcatctctaaagaaaaaaagttacttgccaatatataaagccttttaatttgtacygatgcttaaaaaaaaaagtttaaacaaaacccagatggaagctgtctaaatgcttgggttagaaagaagattgggtcaaatacaatagcmagtcctaaagcaatagcctgctgcagggagtatacatctatccacatttagtctaaatgtagagtgacctttcactaccaagccttgagcttaaagttggctgcagttattggaaatcatttccaaaggtcacttgtaaaaaaaaaaaaaaaaaatgaaaagaaaaaaagtaatatggatttaaagatacctttcatacatgtagaaagccaaggctgccatgctagttaaaatactatgggagaaatcattgctgcagtgatgagttttgaaaataatctaaaaggtmtagggctatacagatagcaatttaattttctttccctatccattagtagaattgttcctatgtgcattgctaagctatttaccaacaccatattataagcatccgaaaaagaatatgcattattacacttaggagggagttactgagaaccatttgctttcattaggtcagggatattacactgaggccaggcagagaacattcccatgagcaaaagtctgactctcattccaagtggtgacatttatatgcagggtgtccaacatgtcattagagattttcaaagggcatatatagccaaagtcactagggcatgatgcgtgcaccaccttaataacttaaaaaaaaaaattcacaggctcagcaggagtatagaaatactcttatgttcatcagtgaatgctaaatgagtcccctttgtagatgcasgcagaaagagagcaggcatgtgcatgtgtaagaaataagacatgctttgatgattctcaaagacatctgctcttttcctgtggtttttttttttctcccaatgtaaaattttgttcaaagtggaaaatagatttttttttgcaataaaacagaaattcataacaaattgttctattttatttaattagaaatctctttgtctcaaaatttttctttttactcttcccaactaacccgtttcttttctctttttctgatgtgtgtgtgtgagtgtgtgtatgtgtgtgtgtgtgtgtgctgctcttcagagtagattgctaaggacaatgacaatatctatttagatactytatttaggacttgtatatttatttttaaatcctttcatttattaagtttattaagtattaataatcttttcatttattgccacccctcacaaatgtrtakagcatctctcgtgtgctagaactttcctagccacctgaacccacttagatgaaaaataagacacctctctgttctcacaaacactcgtctgtttttgttagcgaaracaraagtgtctatcatgtgagttttgtgatgcagaggkataaacacatgttcagaaaaacatctgacttccagtgttgcttctaacacttaccagcctcgtaaccagagggaagaaayttcatctaagtcttagtttcttcaactgtaaaatgagaaaaaataatatcggtccttyctacctcacagggctgtggagaaaataaaatgaaagtamacattatgaaaatgcctcataaatttcaaagtgttatgcaaattcaaggcactaatgcactgagtaaatggcagacttgatgcctggctcagagctgaacagagtgggttccctacaaagggacgaacccaagggagagtcaagaccttagccaataagaattttmtaggtgactcatgtgacaaggcctatctgtggtttttgtggtttttgttgtttccgttttttttatttattttattttattttattttttttaaagattgtggcaggtatgtcggggcacagaagggtcttttatccttgagcatgttaccctgtgctattgccttttggaaatatgcccatcctattttgttgtgagagtttgaccataaatagctctcttctaaaatgtgaacactttgtgccttttatcttcttgctggcaaccccttgcatctttctttcgttttacaaataataatgcttataatagaatatttgggggaggccaaaaaggagaagtgagaaaaacatcacccataagacaatcactgttaacattagtttatttcttcactttctttttttctatgcatatatggaaaaaaactatatttggttttatatagttatggacaaactgcatatccaatgttatagtctgcttttgtttcccacataaggtaaaataagaaatttcctytatttccatttttttctgccctcttatcattcaaaactcatgttcttcctcatcttcctttggtagctccccatgttttgctgatttgatttacaaggcctcatctgcattctaatgacatgtttctgccactagaatccatctctyttcttcttmtaagagttaatttaaktgtmtatatttgtcattttaccaagagctccttcaagtaggagccacgtctatttgtctttttgtacacagagatcagatcagtgcttggcataaactgctcaagaaatatttgtggaatagactaccaattcctatgataaattcttagcaaaaatcatgtgtgtctgccctctakaccattgagttgataaactataatttccttaaaaattcctcaattgctggtttccatattgttactacactacaattaacattttaaacgtattttttctgtgtttcagattgtttttaaacttaagattcataaatgagaaattctaggtctcaatattttttaatgaattttgacatgtattttccaattgcttttaaagaacttggatctactttcatcactttcaagctatatcccagagttcatcaagactacattaagacaggatggatactctttcctccaggaagccacctstgtttccctacccactctacstgttaagcttaggtgtgtctcctctgtgcttmtatataacccttcactatagagttaggatgttttgttatggttatatatttactygtctttcttccaaagaagamtatgagctcctttaaaggaagaggcaaatgtaataaattattacaatccctagcgcmtagaagtgtaacagattcacaatacattcttattgactgtaagaaaccagtgcttaatccaactatataaaaaaaatgacccatgaatgaagataataatggcaatgattatgtaccaaacataaattggaggatgagagagatgaggagactaccgatttattctttactctggaaactttgacagaattaatgttcagtacatgctataatgttcgattattcaacagttcacacactggagtcaggaagttgcccaacactgaattttcccttctccatcagcctgcctttactccattttatatgtcaggtttccttcctctaaaaattcttagggtttaccacttcagcatgcagatttaattactggtagtgctgyctaaggcaagcagtcctatcagtgctaaatctgtttaaaaaaagtccacacttttcttggggaaaaaaaaggttktataatttataagagttcataatgaatattttaccaagggcagaaaatgagcaaagaggtatgaaagaggctatgggattatttcctagcaacccatcggccaaaacgaagcctaaatatgctatgtcctaaatcccagtgcagaaagaatatgtaaaaatgaagtgatcttaaagaatatatgtgcttttttcacttgttcagtttttcttcaacatgctgatcaatatcctctatatagaaatgatcattaaatatgtaaggagagttctgtgatgttgatggagccacaggaggctccctttttcttatattcacattctctaatagcagagttggattattgcattttttctagtttctcaagttaagaagtagattgggaaattakaattggttacasgctgaattttacatgttaaaggcttttgacttaaaaagatattggtaagaaagagccaagggtttctttttacaaggccaaaagcataaatatgcataaccagacaaagtcctccacacctaaataccaagttataaaaaaatcttgctcctaacccatgtagacatgatgcttactcttcagggtgaggtatccaccttcattccattcacaaaaagtagccactcatgtctaggatccatcaatgtgtgaattcttgacacttagctgcagcaagtatttgctaagtggcatattcagaacagagccgcatctatcattcaagtgttactaatttccattgtaatgagcacttgagaatgaacagtaagttcgttgttcaggaatacatgtgcaatcctgctgttgatggcccataaacacgaactcattttccaaccctcagggcttgcctctggcacatggaatttggaggtatgatttctgtgggtaattatcccactttgcatgtgtacagtgctttgtagttaacaaagacttccattacataaacttgcacatccagtagaagcggaggcctgacaatttaattattactattaaattgaaagctaactgtaatcatttctgacaagtcccctatctttgtcagcaaatttagtgggttgagtcaactgctaatttgaatccagtccattttcctccatgccgtcattgccctagttgaagttcttatcagctctctcgatcagctgcaatatttcttctaaccagtcttctgtattccagtctcccatcctcccyttyccacttyccagtaaatcctccacacagcagtcagaatgacctttagaaaagcaaatctattatgttattttccctccttaacatcattcaatggcttacagctgcctttaagataaagtacaaaatcctccgcagagtaaaaaagacccatgatgtagtctctgcccagaggctgaattctgagtccctcaacactgaaaagattacagtgatccactttctacttcctcgtctcttcatccacatgtaattaagaagggaagaaactataamacatgaaacacatatgtatgttgtagttaaaatagtttcttaaaacagttctgattacaaaattgtggataaatttatcaaagctaaactccttttacctttttttttttttttgccctctgctttgcaagtgcccctaagaatactcaaactttgccagttgggtgatctagaactgagctgtttctctagcaaaaacagtcaagcaaacaaaacagtagcaacaaaactcaacatatgtcactaaggaaccttttggttcattcagccattcacttagagtaaattcattgtgtgtcagacaccgttccagaccttactggggacgggggacacacagtgaatgggatactgttgctggcttcaaggagctcacagtttagaagggatggggatgaggggttatacagtaaaggttttccagtcttttcttcaacatctcatgcaacaggtatctctgtgttcctaacctccttgaagtctccatttactgtaccttgttccatgattccacatgatggtccttcaagtacttattcatttattcaaatattaagtcatttcttttccacgtgatagttcttcaacgataaaatggaataaaattcatatactcaaaaaattatatgccacactctgggaattcaacggcccttgccttaagctcctcacagttttgtggcagatattgacaagcagatagacaattacaaagtgatgtgacaagaagaaggactgaggaactgaatatagacctctaagtgtgtgaccatctgtgtaaggagagggaggatctgacctctgtgtaaatattagccgggctaagaatcacagcgggagtccaggaagaggcactgtcaataagcaatcactggtggtataaccaagcatggtaggttaggggaatcctctgtagagagtatgtttggagaaagtataggycctagaccagtgtgtttcaaatttagtggacatcagaatgacctgcagaacttattaaagtagttttctgggtccctgatagtttgaatatatgtccccaccaaatctcatgttaaaatgtaattcccaatgtgggagatgggacctgttgagaggaatttgggtcagaggggtggatcccctcatggcttggtgctgtccttgccacagtgagttctcatgagatctggttgtttaagtgtgtggtatttcgcccccaactcactctcttgttcctgctyctcccatgtgacatgcctgctccctctttgccttttgccatgaaaaacagctcactgaggcctccccagaagccgagcagatgccagcttcgtgtatagcctgcagagccatgggtcgattaaatctcttttgtttataaattagcccacctcaagtatttctttatagcaatgcaagaatggcctaatatagtcccatcttcagaatttctgatttagtaagtctttggaaggggacaagaatttgcatttctaacaagttttaggtagtgctgatattattgatctgaagaaccacactttgaaaaccactgccataggcaattagacaaggaagaaatcactaagttttatatataaaagttataagtgcctcatgagtgtagataacaaagctttgcagttatttaaaagtggataacttttgcaattcagtaaactgttactgagtcttgatatacaaaagacactattcaagaccctgttcttttmtagggtcaacccctcttcactcccacattcccagtggttttcaacccctttaccagcttggtttttcactacaaaaatataaaagtgtcctttttgctgacattgacttaagataaccttaggcaagtttggagtcaagacctaagctcaaaacccaaatttacacctgactakccatgagctatggaaattaatttaactcacttaattgtaacttttccaatatataaaatggggaaacatttatagggattttgtgaagataaaatgaaatatcaacttgcctagtgcctgaagcataatcaatgctcaaaaagttctaactcaaaagagatagtcttttcaattaattatgctggaccagttagttatttctatcctgactcccacttcacaaacaaaaactgattttggatagattgtagaagtactggagattggtaaatgataaagcttttagaagaaaacatagggtaatatcttcataaacttggagtaggcaacagtttctcamacaggatataaaagaactagcamtaaggggaaaatstggtaaagtcaactacattaaaattaagaatttttttattatccaaagacmccattaacagaataaaaggaraatttatcamtaataggaagatattgcaatacatgtatctgacaaaagcatatataaataactcccataaatcaataaggtraagtcaatctctcagaaaaatgacamagaatttgaagagaatcttcataaaagaggattaccaaaagacamaaaaaaaaaaaaaagaaattgaaaagctactcaatccttcattagtcatgaggaaaataaaaaagtctatattgtacacactcatcagtatagctaagatgaaaaagtgaacaatgccaagtgttagtgagggtatagatgaaaagaaactctcatacactgatggaggaatgtaatttgtataactattttggaaaactcttcagcaatcagtatcaaccaaagcaaagcatatgcctgtcccatcacccagaaattccacttctagttgtacacctaccagaaagagatgcatgcacatgttcaccaaaagatatttattgtaatactgtttataacagatccaaaatggaaacaacccaaaggtctagctagagtaaaatagataaatatatgtggtacatcaacataagagaaaaccacagagcaacaagaatgaatgaactactactacatgcaacaacatggatgaatttcataagcatatgattaagcaaaagaagacagacactattcaatttatgcagtgttctaaaccagtcaaaatgaatctatgttgagaagagacttttgcttctgatcaagatggaataactgggaccaaatttattctcttgccaaaaccaaccaaccaaacaaattaagacaaaatagaattaactacggtttgcatgacactgaacagcaggaaaaggaggacagtaatttctgagagatagtaaacaagcaaggcaagccatgtgattgtcccagtttaccaacttgagttcccaggttgtaacacaaggagagaaaactacaatagagcccagaagactctttgagtttaagggacaaatatgagaatccatgaacaaggtgtmtagagttctcaagacaaagaaccagaaaggtgcatgcagttcaaagagagaatgctgaacatctgctgaggcttcccattgggtattcagcaatttctgatgagtacatgcatatgtcataatgacccaaggcagggaaagaacctgggttagaaaggattagaggggatagtgcctgacacttacacaagggtgggaacagtgcctattcctaccaaatatactggaaaaagttacaatttttagggcattgagtagatgcaaaaatcttcccaatgttcgagaaggtcctgcctcagtgttaattagttttagactggtcactgttttagatccatctaaatcataaaaacaagaaccaaagtgatcaaactctctccaagtaatttaactgtatcctggtataaagcctgagaaaatttctaggaatacaaaaacatccaatataamacaggataaaattaacaaagtctggtattcaatcaaagattacaaggtatgtaaaaaagcaggaaagtaagatcaataatcagaaaaatawataaatcwatttaacttamacagaaattactcagagatgagaattagcaggcaaggatattttaaagagttataactatattstgtatggccaaaaagttaagtaaagacatggaaaatacaaaaaagacctaaattaaactgttagagataaaaactagaatatttgggacaaaagaattatacgggatatgattaatatcagattagacaaagattagtgaaatttaagccacagcaatagaaattatcaaaaacaaaaacacagagaaaagatataaaaaaagaaaagagaattagtgagctatcagacaactttaagcagcctaatattttgtaattggactacctgaaaagaggagaggaagatttaaaaatctgaaaaataatagctgaaaatttcatatttttggtgaaaactttaagttcagagatctaggaagctcaagaaacctcaaccacagaaaatctgaagaaaaccacatcaatgcacatcacaatcaaattcctcaaaattgacactaaaaggaaaatcttaaaaacagccagaggaacaaaagacatgttttatactgaagaacaaaattaaagatgacaggatttcttgttggaaacaatgcatgtaaaagatctttgagtaacaactctatagtactgaaagaaaacaacctgtcaatctagagttttatatccagcaaaaatgtctttcaaaaataaaggttaaataaagatgtttgtgtacatataaaaattgaaataatttatagaaaaataaaaaggatttctttaggcagaaggaaattgatactgaatgaaaacctgtgtttatacaaaggtataaaaagcaacaggattattagccatgtgagtaaatgctgtggtttggatatgatttgcttttccccaccaaaattcatattgacatttgatccccgatggggcagtgttgggagatggggcagagtgggaggtgtctgggtcatgggggccgatccttcatgaatggcttggtgctattctcatgacaataagtcagttctagctccagtaaggttgaattagttcttgagggaatggattagttmtagggagagtagttatataaccaasacatcccttaggttttggctctctttgcacrtgtctgcttcctctttgacctctctgccatgctttgcagcacaaaagcccttgtcagaagccagtgtcatgtgctttaactccctagcctgtggaatcatatgccaaataaacattttttctttataaatgacccagtctcagatattctgttatggcaacacamaattgactaaaacamtaaacataaaaaaccgaaaaaagttgtttaaaccttttaaaagacamttgactaagcaaaaataataataatgtattgtgggatttatggtatataaaaataaaatatatgacaacaacagggtggggaaaatggaagtattataaagcttttatattatacaccaagtggtacaatgtctgccctgatctgaatgtgtccccccatctcctgcaaactcatatgttgaaacctaaccccaaaggtaatggcactgggaagtggggtcttttgggagatgattaggttatgagagcagagccctgatgagtggattagtgcccttataaaagagacttcagagagcttccttgccctttccaccatgtgaggacccgaagagaaattggcagtctgcaacttggataaggcccttcactggaatctgaccatgctcaacctgatactggatttcccagcctctagaactgtgagaaataaattctattgtgtataagatacccaatttatgacattttgttatagtagccacaatggactaaaataaaataactgaaaagtagactgctaaagttaatgatgcatatctaccctaaaagaatgaccaaaaaaaataacctaacaaaagaaataaaattgaataattaaaaaatcgattaatccaaaagatggctgacaaagggaaaaagggaacaaagaagacaagagacaaatagaaagcaaatagcaaggagatagtatttaaattaaccatatcaataatcacattaaatataaatggtgtaaacatgtcaattaaaagatatttatgtttattggataaagaagcatagcacaacaatattctgcctttaaaagggcacttcaaatataaagacagaaataaaagtttgaaaaaagatataccattgtaaaaccagtcaaaagaaagctagagtttctatattgagccaggcaaagtaatattcaaagcaaagaatattaccaggtataaagaaggtcatatcataataataaaaggacaataagtcacaaggacaaaacaatgctaagtgtttatgtccctaaaaatggagattcaaaatacatgacacaaaaactgatagggcaccattgaaaaatagtcaaatccataattgctgtcagagaactcaatacctctcttccaataaagaatagaatagacagatactcatcaaggctataatagacttgaaaaacatcattaatcaaactggcttgattattaagaaagactctatccaacaataggataatacacacttttcaagtgcacatgcaatatttaacaaaatagaacataagtstggtccataaaacaactctcaataaatttaaaagtattcaagtcatgtaacatatgttttctggccataatggaattaaattagaaatcaataatgtgaaaatctctagaaaatctaaataacacaaaggtcaaagaaaaaatgaaatgaattttgaaatgaatgaaaatgaaagcatgacatatcagaattttaaaaatgtccctaaaacagtacccaggaggaattttatagtgcttaacacctatataagaaaaaaagaaaagtctcaagttaatgacctcaacttctattttaagagacatgaaaaatgagagcaaattgaacccaaattaagcagaagaaaggaaataaagagaatgaaaagacaaagaatagaccaagataaatatatgcaaagcatatcactgataaaagaattatatcagaatacataaagaaaacttaatttaaaaacaaaccgtagaataaagaaatgaacaaaagatttgaacaggcacttcaccaaggaagatatagggatggcaaataagcatatgaaaagatgctcaacatcattagttatcacaggaatataaattaaagcaccatgatatacccctacatacctatttagaatggctaaaatgagaaagactgaccatacctgcattgtcattgatgtaaaaggattacaaatatcatacattcttgatggtaacatgaaatggkgcaaccattctggaaaatagcttggcagcttcttaaaaaattaaacatataactacccttgatccaaccttcctaggcatttttcccaagagaaataaaagaatgtscatacaaacacttgtaaacaaatgttcatagtggcattatttgtaccagccagaaactggcagcaactcaaatattcatcgaggctgcgcctggtggctcatgcctgtaatcccagcrcttttggattgcttgaggccagragtttgagaccagtctggccaacatggaaaaaccccatctctactaacaatacaataattatttaggcatggtggcaggtgcctgtaatccyggctactcaggaggctgaggcacaagaatggcttgaacctgggaggcagagattgcagtgagccaagatcatgccactgcactctagcctgggagacagagtgagactctgtctgaaaaaataagtaaaaaaataaataaaatttaaaaataaagaaaaaagttcatcaacaggagaatggataaacacattgtggtatatccaacacaatggaaaactactcagccacaaaaaaagagtgaactattgatacatgcctcaatcttgatgattctcatgataactatgtagagttaaagaagccaggtggaaatgagtacataccatatgattccatttatgtaaaactctagaaaatataaaatgacctattgtgacagtgattggggtggtagggaagggtcaaaagggacacaaggaaactctttctttaaatatgtgcaatttgttgtatattaattatacttcaataaagctattttaaaaagctaatggcatagagctgagtgttagtgattggaaggaggctggagggattctggggtgcaagtaactgtttcttgatctgcatgctggttacatgaatgaaaatgtattgggttgttaggattcacttttttataagtatgttatgctccaaaaactattttgctttaaaagttatatgtgtttcacttccaaaaataatctgtagccaatggctttttggtagtgagccttaaaactctccatcaattaattaatggccttagcattttatgtttcatgtcatgcatcattttctctagcatgctgtagtaatttaggtgtttgctgtgtcttccctgcaagactatgtgtgcctcattcctttgtgtctcattcctcakgcaccctgcagaatctgtctcctgtcttgctcattatcactggttgaatattgtgtttaataaatgaacacaaatttgttgaggaaaagaaagttctagtccattgcaatcccatgttccttgccttgttacctttccacagttttcttttattcttcccttcccttcctccttctgctcttcaggcctatcttatttttcttcaacatgcttgctgcctccccagcgtggctggaatggagtgagaaaaggaaggaagagaaggtaataaggtcagagagaaacttggggctgagatctggcagcatggggatagggatttgtaaggttgtgtgaaatgggggacctatgcagtctctgaacccacttacatattaaaataatcacttaaacatatctgttgagattagacggtggtgagtataggataagagggaaagaaagcagggtcacttcttaagaggctatggcatattccaaacaagagatgatgggggcttagaccagggcagtagcagcgacaatggggacaagtggtgcttgacatttgaaagtggaatcctcttaattctctaayggattagatatgggatgtgagagaaagaaaagaatcaaagatgattccaagttttattgcccaaacaactgtaagtaagaatgaagatgccatcaatggacatgtggaagactgtagactcatgggaagaaaactgaaaaacatgtttagtttggacatattatgcttcttagacttttaatgataaatgccaaatatgcagttggatatataaagctgggatccagagagagatgtggttggatatgaatttgatgattaacagcatgagactagctgaggttattaccacggtgtaagaagggaagaggacaaaacagcattgagctacctcaatgttagaaaactagggaaacaggaggaagcagcaaggaaactaagaagcacctgccagtgaaagcaggagacgatggtgacttagatgccaagcaaagacagttttctgaggaggagggagtgatcaactgtgtcaaatgtttctgacaggtctgatgaagacgaggactaagacctgaccactggatctagtaatagggtgttcattgatggcccagagcagttttgtaaagtgatggaagtgaaagtccctgtggaagggctttgagaaggaatggacaagaagaactcctttgaagagcattgctgcaagaggcagagcagtgggcagttgttgtgagggaaagtagggttagaagagaatattgaggatgggaggaagaacggcatgtttgtgtggtgaaggaatgatccagcgaaaaaaggaaaaattgatgttgttwtctgtcacttatgttcttgttcatatcccaccctgttcctatgtttggggatcccaactttgaggttgagcccacacatcctagattctcactttcccagaatccacaaagatggggcacaggaacaagaagctctactaccagatgcctcagcccctcactctgaattagaagcgagtgacatgaagaacaaatcacaccacatctatgctggaaacagatgctagtgagccttcagacacagaaagtttgagaaaaagaaaagtgttatgttttcctttaaaggaktttataatcactgagggtggggattgactgtctcttatttaccactgaagctcctgagcctagcgcagttcctgataccaagcagaagtttattaaatttgtgatgaataaataaatgaatacagactagttttacttagttggttggttgacagattagagtgtgaaaaaattcacttcaaaggtatacttcaatcactatcccttgtttagcagaccttaatcagacttaaagggacagaactgaagttatgattgctttgaaattctttcttttttttttttaaaggaatgtgattttgtgtgccttgatatcagaccttatatttggtattgactaaatggcctgtttaacatttcacatgatgcgttaacactggaaaaggagaagaacgggacagaaaaatgaaaaacaatagcatttttttcttgagcaatgcgatggcattaagccactataatagttttaaataaaaagaacaagaagagaaataattatgcttgagtttaaagtgggcatttttacctatataccctgtaaatccactgtgagtcaagtttctgtaagtattcatttgcaggctcttttgtttagttgaagttttcatttccttataatctgcaggcagacaccctaaatgcagctcaaatacttaaacacatctcataacttcaaactactcattaagaacatttgtctactaggcatgataatcaccactctcctctccccatgttgctgttgatgacaaccaataggaaggagtgggagggacacgttatggtttaaccagtctctcgtaaattctagaggattcaaatctcagactatccacacagagctctccatggttaatcttgcttagcatggcaggtgttaaatctgtcccaacccagaatacttccacttcatagtaaaaacacttaggtaccatgagcttttttttaaaataggaagaatcacagaaattaaagagaattgaaaccttaaattttattatctggggaaaaatcagaacttttaggtccagaaatgaaggtggttttaaaatggtattagtaaactaatgttgatgactgtctcataaagaataaccaaagaatccaagaaaagttctttatctgtgactttttatactaccaacatagagccaagatttctgtcaagccacaagtattgctactaagacactgtaaaggcagtttaatattatcttaagataaatgaggaaacaatataataaatgagtaaaaagaaagacaactaaagaaagaaaaccagaaagactatattcgatttaattgtttttagaaaattaaacacaatcttaaaaataaaagagttagaactatgtctggaggaaagtaaaagcaaaacagaacacttactttgttctaaatatggccatttggaaactgtgaactgagattgcacagagagattctgatcataaaataacaagttgtattagtttgctagggctgtcataacaaaatgctgcagactgcgggcttaaacaaagatgtactcctcgtggttctggaggttagaagtccaagggcaaggtgccggcagggcacgtttcattctggggcctctctcctcggctgggggatggccctctttctcttctcaccttgtctycacatggtctttcctctctgcccttacagatttgatgtctctctttgtgttcaaattgcctcttataagaatgactgtcagaatggatgaaggcccactctaaaggcctcattttaacataattatctctttataggccttatctcaaaatacaatcacattctgaggtacaaggggttaggaattcaacatatacattttgagggcacacaactcagttcctaacactaggtttccgaaaagattttacacatcaatgtatatatttaaaagataatgctagaaatgtgtttttcattttcttttctcttataatttttctgagggctaaagtgacctaatacataacagttatgatcagccaaatgcttactctgtgttgtgtgtgtgtgtgacagagagaaagacaaagagacacagggagacagagccagaaagagcgattttctcagtaccttttctcaatactttttctcttttgatttctgataacacgtttgttaggcagcctcccaaatggctctcagtggtctgcacctcctgttcttcatgcccttgtgtatccacttgagtgtgggctggatttattgattctttttttgcggggctggggggtgsacagggttttgctctattgctcaggctgaagtgcagtggtgcaaccttggctcactgcaacctctgcctcctgggttcaagtgattctttgcctcagcctcctgagtacctgggattacaggtgtgtatcaccgcacccagctaatttttgtatttttagtagagatggggtttcaccacgttgcccaggctggtatcaaactcctggcttcaagtgattcacccatctcagcctcccaaagtgctgggattacaggcgtgagccattgtgcctggcctggatttattgattctttcctaacaagtagtatatagcagagtgacaggacatcagctctaatattaggttgtgaaaagactgtggcttccatcttgggtgcctctctctttgagtgctcacttctggggaaagccggtggacgtgtcttgggcaaccctgcggagggtcccatgtgactgagatggaagcagagcttgtgagacctgccaacagccacatgaatgagcctgcaagtagcaacccttaagatgactgcagcccagtggctcacgcctgtaatcccagcactttgggagtccaaggtgggtggatcacgaggtcaggagatcaagacaatcctggctaacacggtgaaaccccatctctactaaaaaaaaaaaaaaaaaaaatgcaaaaaattagctgggcgtggtggtgggcgcctgtagtctcagttactcgggaggctgatgcasgagaatggcatgaacccgggaggcggagcttgcagtgagccaagatcgcgccactacactgcaacccgggtgacagagcgagactcygtctcaaaaaaaaaaaaaaaaaaaagattactgcagccttgaggaaaaccccaaggtaaaactttctagctaagctggctggattcccgacccacagaaaccgtggaataatagactgctgctgttttcagctgctaaatgttgacataatttgttatgcagcagttgataactaatacaagcttagcctgcaaatgtcagtccaaattttccttttcaagctgtagcttgggatacatgaaaaataagcaagtgttttcaaaaatcagtttcagaaaactttcattaacacttataaattgagatgaaaaacctaggatgaaagttttcaacacaataacaaacctgaaaagaaagactgctttgctttgtctattattaaagcaaaattgcttattgtgtatcttaatgtaattgatttacattttcgttctataataatttagtttaggctgaattttgaaaataaatcagctgcaattttagtttccctcttaagagagagctaaaagttcaagaattacaaaattaatagtgtcagcaataagaaattatatagttaatatgaaatgcccgtctggatgatagagccagattctttactcgttgcttacatgtcttataagccaggaatgggtctggtccaatatctgagtccatcatgatttgtttctcatggtgctcaggcacctgccctgtccatccaagatgatgtgggcaggcctgggtgatacccagggtagtccgtcatgcaccattcttacactctcattctttgtacttctgctcttacaacttataccctgtaaacatgattctaagtcagcaacattttttttaattggaaggctttagacacactgatatagtttggatgttttgtcccctccaaatcccacgttgaaaggtaaccctcaacgttggaggtgggrcctggtaggaggtgtttgggtcatgggagcggatccctcatgaatggctcggtgctgtcctcatgatagtgagtgagttcttcagagatctggttgtttaaaagtgtgtggtacatgcaggatatgagggagaggaaaggcctcttcttccgtgcttttataatcattggttaacagttagggtagcagtgcttctatataggacaaaaccaaactccattggctggagaggctgcaaggcaggaaggcggatacctgccccaaaggatgttagagaatgggcagtttcataattttcagacaggcctgaggatacagactctagttaaagtactgccttggattactgtccaaaatactctcttgtccctccacagtgtgcatgtatgtgaaatgcatggctgtgtgcatgtatgtgtgtaatctaacatcagatgctatatctatgtgtatatacaggtacctaaactatgcctaatctcttaatttgactmtatgctgcttgtcagagaaaagcagtagaaaatttgatttgggccatatttcctctatcgtcagcaataatcctttgtattttaaacacatgtcccacaactatcagaaaaatatgcagtattttttgttagtattttaaacatcttagcacaatgagtcatagcatgggtctggaattctgacctcctgagttccaattttgctttaccacttgctagctacgtagrtatgttgtttcattctgtgaattccacctttgcatctttaaaagggaataacagcagatgttactgacagggctatagagtgcttaggatccacacacagctattaatcaataaatgttggtgatcatgcagaaaggtggaacaactttcttaaaataagtaattctccrgcatataactgcaaacaaaattctaagtagagaaagtgttattattagtagtataatcctgagctataaaataaaatgctccagtaatatctatattatccattataaacacaattagtataatgtaatccatctttctaagccatctgtgggggtttggttacttcttcttacataatctcattgaagaggatctcatggcatggaattagaggagaaaccactatgtagtgatgagatttatctgcacaatgcaagatttctagctaagcttcatgtaaaaggtatgtcttgacatgcatcttagacaataatgccatgggaaagagttctgcaaatggagttggaaacttttgataaggaaagggttaagataaatgtgatcttgtagcttggtggccattccacgacatcaccctagaatagcactcaaaattaatctccaactgcgaatcactttccctttataatagcacataaccactttactatactacctaacaagacattttgggtaatatcactgtcttcaaggcctgggaataaggctgaaccatgatttttcgggcctaatataaatttctgccacaggcctctagtcagggcctgcatagggccatttacatatactctctgccattaatttttgccacaaagcacacagttctaaaccacagcatatgatgtggaactatgaagaagcgttatttttattttgaattcccattctgcatagctagtaattttgcatctttttttgttctgtaatcaacaggaggagcagtgtcaacagtcctagccagctgttgctgaagggcccaacaccaaatcccagctgaagaacagcttctcatcttttgagacacagcacagggtgatgggcatggagctcttccacactccccacagtctgacttrgctctctccgttgtgccctcctggcaccctgctcgtattttattgtggcacctatatcgctggatctcactcactggtttgcactcctgtatcccctttgagggaacaaatcccatgcctctgcaatcccaggatctgatactgagatagacactaaacagatatttaaaaatttttgataatcaatgaatggacaaggagaataaataatatgaaagatgaaataaagaaataaaagtattaatgagagtataaacatatccagattgggctgggtgygatggctcatgcctataatcccagcactttgggaggctgaggtgggaggatcacttgaggtcaagagttcgagagcagcctggccaacatggcgaaaccctgtctctgctagagatacaaaaattagctgggygtggtggtgtgtgcttgtaatcccagctacttgggaggctgaggcaggagaatcacttgaacctgggaggcggaagctgcagtgagctgaaattgcaccagcctgggtgacacagtgagactctgtctcaaaacaaaacamaacaacaacaacaaaaaaaaaaaaaaaagaaagaaagaaaaaaagaaatccagatagactattatgtcttactgttctttttcattcataccaaatgggaaagaatttcctgtcaatgctggcagtctctggctatcatgtggcagcatccgggaaggacctttgaggccacgctctttccctcaggggacagtgaggtgcgttgtccatggcaccgatgggtttttctctgggtagcaggrggttccacaattccccagccccatttccttttaagtcattctggttatcatttcagttgaaagaattggagctacttttcacttgggagaacataataaaaatcacttattcagtactaaattaggatggacagcctttctcttgggaagaaaagcaataacagatcacaataatgagattgtgcaacaagctttgaaaatgcttatactacatttatatgaaacagtatttgcttacacttcagatatggctgtcgatttatggttcagagccatggagcaggtaataaatatgactgtgacaactttctgaaatcatttttattactttttaaaaataaaaatactatttgctgttcaattcctattaaactatagcttctaaaatactcaactttggattttcaaaatcaattctggaaggatgtagtccataatgctataattcatttttcaaagtacatagcatcactgatgcagtgtgytctaaaaacttgtgttccaagcatgataatgatttttagtccatatcattgatattgactttactaggtctcataaaatgcatttccaaaagtaattacatgttttgtaagatgaaactcaatatttaattttaaatttaaatagaacaaacatttaaaagtttatataaaaaaattggtgaaagaaaaagaatttcactatattatataattttgtatatcctgagaaagttatatttttctctttaactttctaaattctaacaaatgaggtccaaattacctacctttcagggatttttaagtattgtaatgtataaaatataacagagttggtagtagtaaagttattattatctaaatattaagggaagtctatggataaaataaaaataaaaacaacaaatacatacaatcagtttagttgggtacttagaygttaagtgggacagtgtgtaatgatgcaaagccaactatttagtagctggttataaagcacatttcttaaaataggaggggaaaccccttaaatacaagagaaccacgtaataaaaatgcaacagaaaagcagcttgatgatgtgcacattcaactcagtaacatgcttgtaaatacagagacctakgctgtcttttttcattttggggaacagattctaaatgatatctccaactacctcttaccccatccctggtaggatcacattacagatatccaccccggttttcaaagttgtgcagatagctaaccatgctcctagattcaccccagacctctgaattgtctaaccacatctgctttgctcttagtttccacatacagaactctagatttgttggacgtttgagggctttagcaacttcagcaagaaaaaactatagacatagaatagtctttcaagaataacaagatgagttaagtggcaaaggtgttcacttacgaagggacttatcaaaattttagtccaggtatgccttgctttcagctaactcaaatgtagagaatctaaaataatatatctattctttcaaaattaatttgtcgggcaagtgatatgtgacgtggaaacataagatgaagccctagcctagcagtccacagcctacagaaacagtcttaaagcctttttcattgtacagcactttctctccatcatttatttgtttkgyatctatctatctatctatctatctatctatctatctmtctatctatctattattctatctatccaaccatcctttatcatataccaccatggtagaatattttgatctcataaaatttacctttcccctaaaatagagatttaaaaagataaagaatacacacaaatgacatctccaactccctcctaccacatccctggagggatcacattacagatacccatgtgggtttccaaagttgtgtatatagctaaccatgctctcaagattcacccccccatctctgaattgtctaatcacatctactttgctcttagaacaaayggaagttctaatcatttctccctagtagatgatcttgcataccccttgggatatgagcaacccacattggagatcagtgcccccaaaggttataaagcatgtgaacagattaccatcagaaggcacagagatagaagcaactaactccctaggggaattggaaaaactttacagggagagtagatttataaacagggtctttgaaaaatgaggaggatacaaaacataatgtaggaggtgatgatgtgtgtgcatataagtagattatgcactgatcttctctaagggaataataaaaagccagactgactctaggactggacattaaacttggtagattaagaggaggaagagaaataattctattcccttggaaaagaggcatgaccctcggctgctcacattccatgcccaaggagggctgagatgctgcatctagtccaagaatgtatttgggtgaagcattagcaaaagtataaagaagtttgttttgcaaacaattttttactgctttcctagaagtgcttttacttttagactcttaagacaagctgagatttggatgtggaactagttaagagagaaaagaaggttcatggcttaactaggttggaggctagttggcctgcctctaactttgtcttgcagagacttcatggggcttggagtaaaggcattattaaaaaaagactatgccctcctgattctgtttgctgggcacacccttcctcagagacctcagaatgcatggtgggagggtgggagggcaggagggataggacagaacttagttattgaggatctcatttcagataagactacttatgacagaagtttggactgggtaaaatgtcaacacaaacatgggttgtggattggcacactcaggtgaggaatggcatagaatcagaaacacccacggaacagaagacatttaccaggaagatgggggaaaggcagagggaacagtggaattatgagataacaacctaacctctaaactcagggccaagcatatacagaacattttgtgaatttcaaaatgctgcccctgcagaaagacaattttttaaagaaatgcccactcaagattgacaaagtaaaaaaaaaaaggcacatcctttgggtggatgaatgagaaagagtcactccttcctttaggctaattcagtastgggccaggacccacagcttgagaaacaatgtaagtgagctttcagcccccattcaccctgcagtgcacaaactgcagaatcctacctggaggcctgcaccatccttaatttttttttttttaattcattgctcacttggaaggctacaatagccttgctatttcctttattgcattatgtagcctcctgcaacaaaaactgagctctttgccaacatggatcatcttgatattcctagaaaccaggaagtaaatgcaatatagaaatgcaatacagacctatgtccttgacttatgatggatcagcttatgatttttcagttttacagtggtgcaaaagctatatccattcagcagaaattgtacttttgagtactcatgtaaccattctgtttttcacttcagtaaattattcaaaaaattacatgagatattcaacacgtaattgtgaaataggctttgtgttagatgattttgcctaactgtaggctaatgtaagtgttttgtaggctaggctaagctatgatgttaggtaggttaggtgtattaaatgcattttcaatttatgatgtcctcaatttatgatgagtttaatgaaatgtaaccctataataagatgaggagcatctgtggattacagttcacagaaaagcaaatattctatcttcctaggaaaaatgttaagaaattatgcaatgttaaagtaatgactgtgtgaataaacacataaattgtgaagttaggtcagcagagtagtttcaagtgggaggaaatgttaatggcagaaatgtgaaaagatgaaaatcttttactaagttaaaaaactgaaattaaaattaatttatctgtacattgtaactcaaccacatgggttggctaactagatagaaatcttataatttgacctagcrctacataaatttaaaaaagttaacagtatcctgaaaataattttaaaataataattgtgtgaaaactggcattggaaataacatttgttgtttgcgtgaatgaaaagtttatttaaaggttgarggcagagtgaggtgctaagagtggcttattgaaatcaaagctctagagtaatctgcataataattatcctaatcattttcctaccagaaaaactgatgatgtgtagactttcccatgaccacatggcgagtcaggggaacaaggaatcatattcatgattcccagtcccagaccaccatttcattattcaagaagacctagatctaccactcatgggaggttagcccaaagctcacaaactaggtcgctgggtgaagtgcagcgaagttttctttgtttcaatttacaggatgaaataatgggcatggacctggtaaattgtacttgcaattattttcttaattataactgcagggtaatttccgcagatagggtgtataatatagaaagattttttccccctcacactaaggagtagggcaattgaaggtcttccatttctcctataaggtgttgctgagacatctgatattcctcacatatagcacttggtgatttttttgtactttacaacacctgcacatgacagccaaaagaaatggtggatttggaaaagaaaatgaattaaattggtttttgggtatcacatggacmaaaacaagcttttgggagtttttttsctatacttttcacttttcaatctaygggcttagtcttgtatatacaccatgaaatatgtttttctgcttgattgtttcctataaaagactgtaatgtaagaatgtgttatttgctccaatttttctccccatttacttgatcagtgtgagaaactattctcctctagcctcagataacatgttatctattaccatcacgtttaggtaaaacagagcctggaaacacattttattgatttcttatggaaataggaatatgagtgtctggaaaaaaaaaaagtactcacaaaacagagataaaaaccaaaaccagaactcagtctcacacctaatgaaagcagagaagaacagtaaagtggaagaacacaaccaggcataatgggaggaagaacmsaatgaaagataggcttgtaaaaaggaagagcaaattacygcgagcaacagagggaaggagaatttcctcaggcgaggattaaggagggaaaaggccasagagaaagaggccacamgaaagcamtgaaaagaatcaagcagggcgggggcsttttgctaggcttttcttttctgtctttttttttttattattatatttctttccttaacaacacatttgtgcttccagtggtaaaaggcagaggcagagaaaagataagatttctcacttcaaaattgtgcccacttttaatggtcctttttctctaacccatttggcacctaacaataatccatcaagagaggtgctgaatccttatgtcgataaatgtattttttccctctcttggaaagacatatgctactaattgttttatttcagaaagtacttttggcaatgctgattttatatccctaagtgccccctagtgacaaggtccaatttcaaaatctctttcacagtaattttgttctaacggtttcccttttcgtagtacaaatgtggctgtcgtagggacaaacaatccaactttcgatcaatttattttaattaggcagaaaggagggtttcttgagcasgtctaggacaccataataaattactgtttttctttatgaattaatttataattggaaaaattcacagtcccttagaataaaatcaggcctctccaaattacactattaacaaaataaactatttggactgtgagtagtcacattcccttctcctctgttaagttatatgaagactcagattcctgacatcgtttcttttaattcagtttgtgaaacaacaaaatagcagcacagacatgaagaatgacaggctatacttttccagttatgatttctcctgatcacttctgatattcctataattctagcatgaaacatagacactgcaagaataaatgttaaggcttaaatactgatttagcgactcgtgtgatatgggcatattatgtaatttctttgagcctcagttttatgtctgtaaaatgggaatactactactaataataaaaagattattgtagggattaaatgagatattacatgtcaagcttttagcagcatctctgcatatatttaggacttaataaatgatagttattaaaatgctcagcccaataatttatagaggccaaccttgggtcttttcttctctctttaaaatttggtggaaccgatcttaatactttgaagcagagtcacaatgacctttaaatagagtggggatgatatttacttcaaatcgatgctatttttagattctctttagatcctgagtactcaagagcttaactagaacattcaacaaatccagttctggtgtaccatatttagcaaattgtctatgaatttaaacatgcaaataggagatattataacttctctttgtatattgttttacacattaaaagatcctggaatatattttcctcattttattgatgaggaaactgaggcacagaggggttatatcaattggtttccatgggggaaggggcaagtctccaggggaggcatcaacatctgctggaggtgagggggaagctcttcctagctacgaaccttcttcttccactaggggcaggagaagcttaagatttgaacagttctgcccttgcagtccctgagccactaatattgatgtaagcatgttgaatttcttagccacttctgggatggaaacaaagttaggtactactgggctagtaactgattttgaatgagaatctaggtctattatatttatattcccatagctgcataaggagactcacttctaattctttattcagaatttttagcttcaaatatttgtgttttttctcacttgcactccctgtaccaccatagtcttacttccatcacctttttacagagctagttaaaaggaaaactgattagcatgaagttaaaacgatcggtatgccactggaattttctctctgatgtaatcagaaaaatagatctcagtctgtgccctaagagaggaggtccactgctctaggctttattaattttatttatttatttatttggtcagcatcaagtgcccaatgatgaatctattttcagagctctctaaaatttatacactgggtgtggagagggtatgctatattcatagaaagaagtccaccaattccaatgaacttgatacaaataagtactttgattgttctgaaaacctccagcaatgtgtgggtcatgaactgaatmtataatagttttccctgccatataaatttttattataatgctgtttggcctgtttaattatttaatttccattcacttgatttcaagtgtggttgagatgtcagagatcattagttgtttatcctcatagtgtcctagatagctggaacaatcgtttgtttctaaagcccatttcccgtctgcagttgcagctctttttgtactacatttgcttgcctcctccaccattccagattcaaatgatttatgtgattgcttctcagtctttctgggattgctgcaatttttagaygttatttcggttcaacctgtcacataaaaactgcagagaaaagtccaatctccctgagatagattgagtcaaagccagcaaagccgggtcatttgaacagccttggtgcaggtaaactagacactggtgaatgggcagagatggtgatcctgtcatggcaatatcaaacacagcatgaaagcaggagagagcacatattatgctttccgtattccagtcccccttgtgtgtatgtgagcatgtgtacgtgcatgtgkgtgtgcgtgtatatgcgtgtgtgggcattccgtggagcttacttcaagctcctaaaattccacattcaacaggcgcaatccccactctggtatcaamgtctccatggtggagaaacccactgaagtgtggattcactaaaatatgaatagttgacaatgctacctctttatgacattttstgcttaagtatccctttcaattacaactatttaataaaatggctgtctcctgtttccatagtcagtgagagatggtggctgagagagaaagacacagacagcacaatatatgttttggaggtaaaattgatagatagcccttaattgaaaatgcagactaaagaagagggaaagtgtccagtcctaagtttccagcagtagcaaggaggtgacacttactgaactgagrgattttggaagagggccaggggtgaggcaggtagcactaatggcatatcaataggcaggtggttacgtggctctcatgttctgaagataagcaagtgaagaagagacattggcttacaagagcagatayaatcactgtaggagggaaagaggatagattaaaaagcaaaaggccaagccaagaataatccagtgagtaaaattccaatagaagaacaaaactcaaagggatggaaaaggaacagtcagaaagggaagggggaatcctatttttctagaaggagaggataataagattaggacaggtcatgtcagatggacaataaagtgtcctctgaatttaacagcatggagatcaaccattcgcaagtgcaaatcagtggagtggctgggacagagccagactggggtgaacatggagaaaatagggtctggggggacaggaaagggtatagataactcttytgaaatgcatggctaaggaaaagagctgtatctggaaaaggatacaggattcaggaagatcatttactgactgatttattttttggtgggggagaatacagagcattgcaaatgctgacagaaagcatccagtagagaagaggttaaagatccagaagagaaagtgagtcwctcatcagggaggttcatgggaggacacggagagacaggacccacagcataggagggacgactcaccactgataggaggtgggtccactcctcccttgtaacaggagagaaggagaagacaatgagagcaaagcatattggtgtatacagatctggtgaagatatcagagatagatctcagcaggtgccttctattaacttctctggaacatgaaagtcatccactgaagaggagaagaagatggggttgggagattaaatttcaaactaggggagatatggaatggttacttcagagaactgacctaactaaagaagtaatttcagcatggtcaagcagtacttttaagcatttgtattaataacaacaatcaagtagttagaaatgatagcatatcacatataaatctgaaaagcattatctcccctcttatacttggtccctcctaagcatgctatattaaaaccaatcaatttaaatgtagttctttctctagtttgtagttctccaccacttaatatatcttttggctttgaaacagtgtgtattgagcagatgtttctttaagttgacaatccttaattggaaaaaggaaaaataaattgcataaagtgttaaatgagttccttgcgaggmtaggaggcagtcgttcattcaactgctccccctgtcctcttgtatctatctcttttccctacctatctcggttgctttcttattcctttagcacctgccacagtgctgggctcacargaagtattctggaatactggcattccattcttcygccatcatcaggagagttgaatcttcagtggcccttcaatcttgagacaggattgmagcaggttcttgtttttttggttctgttctgttctgttttttttttttcctttcctttgtcaaaaatactgaaactcagaattgaaaaccaaaggaatcacttgcgagtgctctcactctcgtcctgtgctcttctctctcacacatatagaaatatacctckatagttcaggtagggtttttgcactgtatatcaaggacttaaagaggaaagggggtcctgttgattctgcttaaatattttgttgcaatttgtaacaatctgtaactcggattcagtcatggaatctcaagtctttaatgttgaaaaggatcgtagagacagtttcatctcccctccagcctggactacactctattttatggatgacaaaacctacaatggttaagtgtgtgtcctgaggagcccattctgtaaaataatgaccttagagtttttatgaacatgacaaagaactctttcctaggaggaggccaggcatttacatgctcatttttctagaatggtgttctgcactcattattgcttaatgaatgctggataatttgaattcgttgttcatgatcctttactaaaaaaaataagcacagatctttggactaatggaatttgccaagtcatcatcaggctaagatctgggtcttagtataatttcccttctttcagttcagaattaaaatattatagataggtgggtgaagtaatgccagtaagtatggtaatacatttctgacacatggcatgcaatctgtgagggcattccttcacttggtcctgtactttgggcagtaatgaagtggaaaattaaattaaataagcttttattattctgtggctctgttgaaaagggtaccatcaaacactttaaataaaaaacatatcttctgaaacaaagcttctgagttctttggcattattgaactgtgaagaagccttcctctcatccactttatgactttcttttcttctgcttttacctttggtagaatcatatccatggtaaattatttggggttgcatcagaaatacacacttcatgagccttggaggtaaaaccasaaggcatagtttctaaattaaaccagcaaaagtaaaaaggtaatacttttgttttattgttttcacttatatctaaccctctaacctcagttttctgtgaaggcttataagtcttagactgcaatatttctaattctactaggttctttacttaaatataattgtatcatactcagaatcattctcctttataacatgtctgaagatacgtatttttttcatatgaagtaaatttatttaagatcacaaaatgatacttgacagctgaaagggagatctcatattcttaacttttagccctggggacttaagggaggtcactctcatggkctatgtttttttctcacttygacttccttcttttagactattacaattttagtgacatatgaaaaaaacagcctcctctccctgtgttcttgtctactgtaagtcattggccacacatgaatattacatgacttgaagtaattgtcagggtgaaatcaagacagttgttgtcttacagtcaactcaagtgatctgatgttccaccaggacagagacagggcaagtgcaatgggaggagtgtgaggtctgctgccctacagcctcgaacttgtatcctaactcctcctctacttcctgtggggctgtggatgaggaacgaaactgctctgaaccttgggtttctcatatacaacatgaagataataatgtcattgatatagagttgatctgaggattgaacgagagagagttcccatctctcatcgtactcaagaattagtacctatcattactgtgtattttggcatcagcagaaatgtctcaagggatgatgggaagccccatcttgatatctgattgggaatttcctgatcgggactgtttctaaggggctcaggacaccagctgcagaagctatagtcacttgcaggaattatggccatgagctgtctcaagggcagatgggtggggaaaggaaagagagggcggtgaatacactcagcagaccaccagcctctggtaggcagtggctgaggagtgacaggtctgctgaggccagggctcttggggtggggccaggtattcagatattgtaaaggctcctggtgatttctgatatgcagccaagcttgagaagccctggcatggagattaacaataaggaggacttgaagccacaggaagatttatctctgggtctttttgggtaattagtgacatggaagtctggcctggacaatgtagtaataaagtcaaaaaagaatgacaaaatagcaagcctataatcataygcattaatttatttaaattymtataataaaacaccactgaagtggctttcattttctcttggtgaakgcaggaattattttaacasagcasagagtgctcattggtgtaaacagacaagcttcaaacagttcatagaatcaggcacaccaatgccctgagtgcagggccgtgagyggaaggtaagggatgccgcccaggcagaatagaagagccagggccccatgaagaaaactttgagccattctcaggctggggaaaaaaacagacaagagcagcaccatgcagtaaatcacttgttgaggggccaagtcagggttagcagaatgaaggctgctagaatgaggaaatcccaccaggaaactagagtggctacccagaaygggtggaaattgaaaaggggagatcttttaagagaagaccatagaaataagttcagggagcctttgaacttgaattgctcagctgtctattgtatctatttattttacttaacaaggttccaaactctcagtctcaaggagactggaatataccagtgagtgagctgggcttctctctagagtgccaggcaatgagctagactcacggcttctgcttcccagtttctcctcttcaggagagttcccacaaggccagcaggtgctggccactggtgattcctgacaattccctgcacactggatccgaagtttagattgcttgccttctactgtcaagaccacckttgcctttgccctttgcaacatggaagcaagctcctcctcttttggtgcacaggcccacatgtatctagttgtgctttggtccatgcaagcctttctacatgatactggggaaaggggaggcrtgcatctgcccagactctgatgccactagtatgctcccaagtccataaactgacaaatacataagtacattcctatttgttaattataatttatgtactgttgacccttgaacaatayagggtttaggggggagccaacccccctgtgccatcaaaaatctgagtataacttttgactcccccaaaatttaactactgatagcctatcgtagactaaaagccttactgataatgtagtcgattaacatatattttaatgttatatatgttatatactgtrtttttgcaataaagtaagctagagaaaagaaaatatttttaagaaaatcataagaaagagaaaatatgttcactattcattaagtggaagtggatctcataaagatcttcatccttgtcttcacattgaataggtagaggaggagaggaagagaaggagttggtcttgctatctcaggggtggacgaggcagaggaaaattcacatataattggatccatacagtttaaacccatgttgttcccagggttaactgtagttccttacagtttacagagcactttggcatggaaatggaaactmtaaacaaacaaacaaaaaagacaaatgcctgcagttcagcaaggtagaacaagttttcccaaatcacacagacaggatgtagtgaacttakaactctactccaggtgatatatttccaagttcagagtccaaaataaaacaaaaggtacagtaattataagtcaatttaattytcaatagttttggacatgcggctaaaaattatakctagtggccatctgtcaacaaatgtraactatgaaactggatattaaattatatctaatttaatacactgtacataggatctaattttacatactgtggcctaacagtgtgcaaaatgttaggctacccctgtagygtacagtgtcacctctgtcatatacctctgtcaaactggtgcagtggagtcctgccttccagatctaattctttcattactgtatgagcttgggtagggccactcaaactctgtcatttatgaaataaaggattatatgattcaactagtaatgactttcatgacacatgcagtgtatccaatagcaacaagtgaagtggtatccatagtttctcattccatgaacttgtgtggtgcataatatttgccaagtctgtgcatgtaatagcaatagctagttttcagagcatgttacacgcgctgaatatactgtccatttcagagccctttacgcacaacattggcagattcatgaattattatgttatttacctttctactattgagtgaacagttgttaatttaaatattcttttataatttgattgatcatttggcatgaaaaaattaggaaaaataattaaacaaacaagaaagccaaagcttgagcccgaggccctgatccatgacatgaaattcaaatacacttatgagtatctgagcatattttactcttctaacaacttctaaagatttaattcaagaaaggrctccttgacttaaaaaaattagcaaagagccttactcaaggtactgtgcaattaatatcattattgagaatttccctagttgcttctctcttttgcatatattagcagcaggtgttgttttgtatttaacttattatacacattttgttatgtcacagaaaatcaaaaatttcattttaaagttctaattacctagaatttcctagatgatcatttatttcttgaaaattaatgtcttgacacagtgcctttcaaataatattaatgtagaaaatgtaaactaatttgaatttaataaattgattgccaactctttcttttatgtaaaagtaggttgggcacacctttggtaacatcaamcctttggaaaagttggtaaataaaatttaagttcaattgtattaatgaaattaaaaagctatgattgtggtattatcataaataaaatatgtgagtgcaacaaatattaaataacaagattcaagaactctgcaaccaggccctcattcacaagcctacaagaacatgtgcacttcattaaagtcaatggagtgtaccagttcatcttggcattactcataatcgaaacatttcaattttagttaacacacacacacacaaaactaatttaaaagtcaaatgagtaaattagttmtatgctcctatgttccaattccatgttgatatcaactagctgaatttagcctcaggaggtatgaaaaaatatctaatacaatgaatggaaaaccttttaaagaattacagatctgaggctgaggcaggagaatggcgtgaacccgggaggcggagcttgcagtgagccgagatcccsccmctgcactccagcctgggcgacagagcgagactctgtctcaaaaaaaaaaaaaaaaaaaaaaaaaaaaaaaaaaaaaaaagaattacagatctgttaaaacgaatgtttttgcaactaactcaacaaacatatattttatattgtaagagcccctcaaactgctccattagaaaacagccaagcttaactacagatttacttctrgattttgaaagcagcgaatcaaaaactggaggatttatataagaaataaagtccacctcctgaaaaaaaacatttaaattgaacagtgattgattgaaaaatattttctgtgtacacattcccccagaaaagggggaatttttctggtttacatctggtagatttctcaattgtagtaaacactattcacaacacattctagacattttcttgacctttatttctgtgatactcttctttttttgctttcccagtttttgtcattcttttagggtctctctcttttctattgtctcttttttgcttatttctttatcaatccttagtgggggtcaccaaggactctgccctgcattccttactcattcatttctacatttttagtcttttgactccacctatgaagttaatgatttacttcatgaatactygtttccatttgagcctcttcctaaaactaggttttagttatggtcatttgcagatatctaatgtgatcccaaagctcaaaaaagaagtattaaaattcctagagttttctgctaagatattcttgtagctggtgcattctggctgtgctgcaagctcaacggcctggaatttcatgccccatgattagacatcctggcacatttctccaatttttcagtgtaaagaaacatactttttattttccgaagtttaaatgatcaccagagaggcakttgtgtgtgtgtgtgtgtgtgtgtgtgtgtgtgtgtgcaggcactacgcatccttcggagagtgtgaggggaagggacctgagaagaggaaagcaaatgctgcctggccagtgtagggcgtggaatcaaggaggggacactgactttgaactctgcacccagctcatccatctgcctgcccccagtcttgttgggagcatccagtcacacagacccctgcctctcctggcgactctgtgtggagggatacgtgctagcatatgtgtacatacttcctaatagcaggaaataatggcttgaaaaattcaaaagtcacagagagggttaygtaggggctyctatactccaatagactaggctgaccaaagggtagaggattccacacatggtttcaggccttcttttcctttatcactctgcatcatttctatgaattctttaaaaccctttttagtagaattctctgcttcttgtttctctgcartccatattacctgcctcagattgatggtgtctgtgagatttgggtccctcgcaaggtctcaatctaagtcctggatataatttcaagactttgcttcagccyaatcttgtgacacgtggccttctacaaacttcttcagtatatgcatgcacatgtacctgatgtggatcctaaattcaaacccacttggtgagcatccccctttctgtctcactattctacagacctcctgtcttgagaattctgaccctgctcatcccagccatgggctatcagtcaccacttataaatgtaagttactttttgggcactctaaacaaaagcattaattttggcttattatggctatatacacctcatgcttcttttgtaaggagtgtggcttggcttataagctgctgaaaggcagagcagtctgccttgctatcacccctgagcatraccagcatgctcaccaccgcctctttcctacctcactctacccgtttctctcctctcctgttaccttggcctagaacacgtggcttttacctgcctaaggatttcatctttgctgcttttcctgcacagagtgctcttctccactggttacatggctggatcccccttgatccaagtctgtgattagatgccacctgcacaggcaggcccctgttcctgtctttatagcactctgttgcttccctgcagaaaatctcacaaaatcaaaaactgtacgtttgtttacttgattaactctcccctcasacagtaagctcccggaggtcaggtacctggacgtttgctcaccactgtatatccagcgcctagcacaatatgggtcaataaacactaatcaaaggaaatagtgttagagctttcctaagctctaggttgtgttagmacattatcttaataaaggtgatgaggatgttttatatatctatacttacatcaatctctctttctatagttgtgtgtatgtatacatctatgatgacagatatagtatgcacrtatgatattaaagactttatttaaatactgatttacagtattgaatcactgtatgcaatacataatattattaggagagtttcataatttgccatcatcctctcactgcaaaggtgaggataaagaacasaaatcatatgttctgcctccctggaactgaagtccttgctgaaagacagtgaataatgctataaaatcacttgtgatataaagatcattatctaaagtcattatcatacatgggacattcaaacctcacactgagtttttytagtacttcaagcctgacaattttcaaaacactcaaatttctatttctactttatatttctcagaaaaaagagagtaaaccaaggagacactggaaaatttacggttaatcacaaattattgggatattaaatgcattttcaacataacgatatttctgacttatgatgggcttcttgggacataaccccatcataagtcaaagaacatcatattcacaaacagatctgtgcaaaaatgtccatagcagtcctattcataayagcctcaaactagaaacaatccaaatgtcaaaaacaagataatggataagtaatttgtaatgtagtcayacagtagaatatcacacatcaataaaaaaggagtgaatgwctgatatatgcaacaatctcaaaattattacggcatgtgaaaggggcctttacaaagtacatgctgtgtgattccatttatattaagtccaagaataggccaaactaaactatggtgaaatatgtaagaagtggtttcctgggaggtagagagaaggtagaagaagggtagggaggtaggtgatgaggttttgaattggaattgactggaaagggcaaagagaaaactatttagggtgtgggattcaayaccttattttgggtggstggtacacaggtgtatctaattctcaaaacttactggattgagagaatacttaagatctgggcattttattgyaaattatacatcaattttaaaattaagagattctattattttgtttaaaattgtattactgaacactgtktggaatatttccctactttctaggcatgtgaaacatttttagaattcttgtrttttataaatttatcaacttagtttatcaagtatgatgacaacattaatgcatccagtttccttagmttaagcctcaatttattgtgaagttcaaamacatawagaattacamaaaccaaaaccaaaaagccttgtccagaatcaagattaaaatttcagagatgaatgtcattgccacactatgccagcaaggggagtagttacactttgagaagagctccatctccatcaccgctgaattattctatggggcactttaacaaggccccaaaaattgacttttgagtgttgtcatgatggaaatgacasatcattttaatgcaagagaaaaagattgaaaaccttgaccctttagattactccgaacctcaatgagaaggagaaaaatacttgctgatcagcttattagaatattatgttcatgtaattctggtaccaggaaaatatttaagagaatagctaaattaactgcagggtgccactttttctttgctaattattttcatacaagaataatcatatacagccctttccctacaaaagaaaaaaacccaacaacttcacagtttatttttatacatgtgagaaggacagccccagtgtgtgcagaaggtacaaactgttggaaaatcgaggcttggtctgacagtagataaggctggcaaacagtactttttctttcccctgcaggataagggcttttcagttgagattgttaggctacaaatctgaagatttatgctgaattttaaaaaatatcatcatgttcatcaattcttataagatttgtaaggcttaattctcacaaaagcttaggaaggctgcagaaaagtctctaactatcctttcctaccaactttggtaatcctggatttacagaaaagaatgttcaggctgacggtgggaaacatgcccccaggcaagcaggagagagagcaggagaatgggcctgccagatatggacacttatgagatgggtaccggccctctttaccctctaaccttcgtgacaaccacacccttgattctaacaccatagcaccttcttctcaatttgtctcattctccggagaaactgagtgcagaggagctagcaatgtgtgccccagaaaataccctgagccacgccctgtgctgggctggagtcttgacctatgtttgggaactgtatctccgcaatctgcagtgcttgtgaatacgatgtacctccctccctttgccaaatgagggcaaagacactgagtataggtaaacaatagtccatttcaggacccgtgcccaggagaacatgcctaccaaatgcaaagctmtakggcaccaagtgccggtttgtggacccacagtagcctgcaaggattaactctagctttaaaatcacacggcactgcagtttggcacaaaagcagccctctactccgagagagagtatgctatcaatatgtaaaaaggtrttatccttgaatatgtgtatccttttgctggtacataaaccctgcctcaagatattcttcatgaaattccaaggaacatttctcagttcaatgaccctaagaaatgatgttgaattactctccacttacaaaatagaggaaaagcattttctttcagttcctgtaaatggaggcctakagacgtaaaggagtcagagtcaraagagtcaagttttagattctgctttgaactatatcgagatctccaaatcggagatgctagtctgggttatattcttgccgtcaaggacgcacagaactggtccaaattgaccactgtttcactacatggcaaaaaaaaaaaaaaaaaaaaaagagagaaaaacatgttaatgacatgccactgtacacctttccctaatgttggctttgccactgaatggatgtgagtcttgtgttctaagtgggaaataaactaaaagaccatattccaaggattactaaaatctgtgagatatgtaaaggatagamacaagagtgaaaaagmacatacacaaagaacccagaaatgggagacatgttgattacaggaggaaatataaggagggtgtaattagggtcaaagaaataaaatgaatagatgcttgtctttgcatttgtttttaatgagtggtgagttgctttcttgagcaggcaactgggtacaamccaggcagaaataaaatgggagttgtagagggcactggcgggggtgggtgtctggcatgacactaggagattaaagcaccttggagaaaggactgatgtgcatttgtagaatgggagagagtaccctgtctgaaaccatattaggagacacattacttggtgcttcctaccctgggaaaggcagggctgcacttcagtgtggttcatgctgtgtagggaagtcccacctgtggggttgagggtagtaatgtgccatggggcaatctccacattagcaggttaccacagtggaccgaaagaaatgtacaggaagcaaggtgcttggaagtgaatttcacgtgattcatgttggaagtcacagaagagtgggctttgggagccaaggctgagaagagagaagaaaatactctcggtctctcaacccmtaatgagtctttggagctgtcttttcacaggtgcctggaattttgtccaattggataggtttttccagatgtttcaaatgttattcatgggagatgtttayattcattatctccaaagatcttgactaggagctagcaccttgcatttgatatatttaatgaatagccattgactgagggaatcaaccatgctcccaaatgaggaatgtgtcttatattaattaaaataggagtcaataacrtgcaagatatagcctatatttcctttattactgccatttggcaaattgaggacgaaagctctaacaattcaaatctctctcggaggtaagtttagtaactatcaagatagatcttggcagctctctcttggggtccccaaggctcaytaaacattttaagaggacnctgaacattttcctagtggatggtgagataactcacttccaagtgtgggaggaagtgcaatcttgcctgttgcaaccagcaaattctggaatgaggtttagacttggtgctaaaggtgtgaggggcaggtagcatgcagtctggctcctttttattaatagttagctgaaacttyacctttctatttcagaggaggtggacagcttttttactaccttatgtgmtagggaagaatgaaagttcaagtgaaaggggaggctgggaataggctgcagttgggatgtgagacaagggtgggaggtgagagggtaggagggtcaggcaggggtctggctggccactgtcctaaatctgagcagtagcgtcagggctggaggttagctgatggtgacagcatataaccttggaggcatctggctgctcagccctttgcacaagccactcacttacttgacaacaacaagtcacaggatcacaggctgcggactctgaatagaaagggcgccattctgtcaaactaatgctgaggccggagaacagggcctctaaacttctgagatctgcactggccaacgtttccaattgtcccctcaatggcacttgctctcagccactagtatacctgctttgatctaccccaaccccagaccatcaactcattccttttgattgctccagagtacacaggtgtggctgtacctgcaaactcatgttttcaggatgggcttttaattccgctcaaaaatatttttccatgtctctttcttgtcttgcttccccattgcagaattttttcctctttccccagagataagctcttactcacagaagacagtaacccagtggttcctatctatagagcacacatggtggataccatatctttaatgctctcagtaacccgtgtaagctatgtgctgttgtccttattttatttgattttttagagatagggtctcactgtgttgcacagagtggactgcagtggctgcttacaggtacaataatcatcacacactacaatcttgaactcttggcctcaagcaatccccctactttagcctcctgagtagctgggatgataggcacatgcccctatgcccagcttgtccctgttttataaacaagagctcagtgaggtcacccagcatgtgttctggccaagtgcattgtagtttataaaatgcctccacatgtgttatgaagttctctgacctatgaattgcatgttattattatctccatttcacagatggtaaaatggaaatttagaggggttatgtgacctacccatgttgcattgttcatgggtggctgaactgagtttcgaacttgtgtcctcgtattctacatcccatgcttgttcacagtatagtggcaagaaaatggaagctttcaggcataaactctctcaaatttctttatatccatctttaaactcatcttagyttttccccactcatccttttctcctgtctcaggaagaarttgattctattgtgtgttcctaaaagttctctcctgtgcccttgaataatcttattcatttccatttcttcacatttcaactctttatgcaaaagactctcaaatctttctttctctaaactccaattattgttttcgaccacttaaagggtatcttttcttggkaatatacctttatgtatagaccatacactactcccacattccctcagctctatacaactaactctaagtctacgttgttttacttgggcaatacatgtgctytgatgtctccatgctyttgcttgtactgcctgaaatgctgcccttccctttctctacttgcagaaattccattcattctttaaagaatcagttcaagcrtgataactgtkactgaatattctcccaactcttcctgttagatttaacagtgtattctgtgcattcccaaagcactttgttttttgggataacacattgcttatcacatgagaaaatcacttgtctccatctctgtctcaacttatgggctaccagtaaagtgaagacaaaaagggaattttatttatctctacatcccttgatgcaataagcatggcccttggctaagtgtttattgaatgaataaaggaataaatggatgcatggtgactcagttactattccaatttttcaatatacccctaggagggcatggtctgattttgtctttttccctcacctcaaatctttgctattgccctaggaatctgacttgcttgctttgcaaaaatgttgagttttaaatgaaaacaaatgttacctgccatgtgagatcatgaaaaagaaaatggaataatatatcatttttttcttgtaaagtaaacatactactgtcatctaggtgatcaacattacagatatgcatcccaaaattagaatttatatttataaatttttaagataataggaattgatcatcttctattactaaatgcttccatccacatgttacacaatagcaaacctcattagattagaataattagtttggaaaggaggagaggaagatctakcctgaattatggaagtcagaatttattgaaagcaacattgttttattactttcaatactattacctgccaataaagtctaaggggatatctacttcatgatcttaataatctttattttacagctgaatctttttgcctaaagaccactgtatgccaaagccatgaaaacaatgtattctttttacatgggtcacaaatattccatttcacttagcaaatccattccttgcagaaaattcaaagctaaatttcagcttagtctagatcaaattctcaagaattctgtattagcagtatctgaattaatgaggtkttactctattcatagaggaagacactttaaacaatagactacagtgcaatgtgccaggaaagtgttaagtacttttaaaataaaaatagaaaaatatgtaaactttttcatataaggaaaacaccatcctatatataactgaaatcagtcttcagagcctttagtttcctttgtaaatcccttgaggacaaggatcgtggtttgcttgctttttctccccaccctccaagactttacgcactccaaaaatgccacctaggcagtgcttcctagggatggctatcatcagcagaacaggtgcttaaaagccacactctgaggttttcagatattctagttgttgctctgcttatctataactacccaagattcaaacattatgaggaagttactcactgattctgggtacaggccgcaagtacttcactggtccccatcctgaaaaagaagaggaaagaaattcatatattaccatcacatccaaagacatttataaaactttctacacaaagatgcctcaaagcctctcatattttatttgtaacaaggaaaatgatgggaarggagagggkcatgaaataaaatgtgtcatcccctgtgtttctggcctgattaagcttggtgtcacttattakgaaacctggcattaccaygaaaatttggtatakaaaagcctgggctttgagcctgtactctttatggcagggaaatggagccagggactggggggtgggtagcattggaaaatgaccatcacaaggaagacaatttcctttgattctcagcattccatcccataacagatcaatgtgctaatatacaataatattttcatttattaataaaatctttgtgtaaaattgagtactygggctckatgtctttgggtgaaattgagatagagatgccatgtacagctcctggcattattagtgacccactattggatgccttagtttgggaagcttggaagagtaaatgaacasaaagctaggataaaaaagagggctctgaggcaagcaaccccacggatatttaaattatccagaacgaatgaaagtttattctgtagtaaacagctataagaaagaaatcttaaggttttccttgaacgggtgatttttcatggtgattaccaagggcatctttctgccagatgaagttggcctactgtaacatagtatatttcttctggcctagtcacctatggggagagaagagcctcagttccttctgagaacaatcttasagagcagtaagaatgtaattatatgactacttagtttttggctttttgggtyacatggttccatttctttcctttaamacattatatatatatatgtatatatataatatgtataatacmacatattataacatatatactatatgtcataccatatattttatataatatataactataatgaaatatatattatataatacacttacatatattatatattaatatatattctattstgtattttataaatatataggtaatgttttgctctctgcaygccttttaaaaaatatctttcaacatatgttgactaaaacttgaatgagtactaaaggatggtgtggcttaagcaatggtaggattaattgtctgtcctgctagccygcctcatttaaatcacctagtctcagtgtgactcatttataatattgctttgctaaccctaattgagataaaaatcttaktggtacttgtcttttaagttattttttagcaaatttcacrtgtgccaaaaaataccagtttacacttgcatcaatgatatgctattctgtttttagaatgatttaaagcatatatccaagggcatttttaattgtcttgttatgaacttcctggtgtaaggtactgsccattctacttgatttagtaatatctgcattttggaggcaggtatttatgagtcatatagctcatcagtaagtcacaggtccttcagtacaactgatccccaggggctggacctggatatgtaatgcattgctcccacccaatttattgtaattgcaactctatattyacctgttcacccaggtaatggtagcatgattaaggtcacactatcatggcttagtgataagaatattgtttagactagaacaaaatcttcctccacacaaaattgattatttmtagcatattatcattatttatgcaggctgtcactgaatcaaggaaggaagttaaattggtgtggaaaaactggttattcaaaaaatctgcttctttatatcctacaatattctggtaagttgcttattgattgtatgagagattgttctcatcaaatattgcttttaagctatctgacttataacaatcaagtcatttccttaaaaaatgtggacatgataggctctttcctccatctccatgatggctcaaatatgaaggttgtgcaaatctggcaatttcttaaggatgtctggagacctgatattagggcattacaatgagagtacactcaggtattggtaattcttccctggtctagtttgtccctccacacatcatggatggaagtatactagttagataaatgccgttctcccccactatagtaaacttattgaacactgggatgatccagtctggttcctctttttaacttctctgaacctagtttagtcttatgcatatatattgaattaacctaaatttctgaaagagctatttctgtaagcatcgattaaatgatagggaaataaatacamtttattttttatcttttgaattgtctcctaargaaaagtatcctctcccacatctcaataatagtaatatagtatatagctctttaaaggctttaactatatcttttaaatcattgttatttttctgtatatttgtacataataaatatgtaggatgttgggctcastccatacaatcaatatagactgactgactagctacaagatcatgtactgaatagctatgcatattcttccatggttaactgtgaaaataacttgaaaccccaacaatggggattgcttcacaaacagaaattaattgggtttggccagagccactaaaattaatgagtttaaacctcacatccagtatatctgttcttatattgtgtttagaagattgaaaaagaattaagacttaatttagataatcaaataaaataggatctttgcctttcattccataacttattctgatcatcgttttttgtggtgaagcatgtkttacctcttgaaacttggcataaacatcataataagtgaataggtctagagctttgatgaaaatttaattttttwaaaaattagcatttcactgatccttatcctgagggktggagagcttcacacascactgagccaggtagagctcacactcaagtgagagaacacaaatacaaccatggtgtacttttctcaaagaattcaaaataattcttctggccatgtgataaattaatttagttgtttgtcatcatccttatctaactgagaatacaaggatakgaaaaggttagagagcttcctaaggctatgtggcagtttgttgttaaagttgaaatagggttacatttggaatgccaaggctttattttcaataatgaatcaggatttgtttttccagctaaactttgtagatatttgatcatcaatatcctcttaattttacacacagatatttggatgcaaagaaaaaaataatcacagtgaagtttaggtcctttggttgctgggtttaaaagwttatcccaatattttcttttgaaagatwgatttggkctcaccttgccttttgttttatcttttcttttaaaatcgcctggatgcgccattattaaatgaataataaccacaataacagctaacatggattgaatgcttattaaatatcasacatgctgctgagtgcgttatgtgaaccttatctaatttagtatcataagaatcccatggaaatactaccaggatttctgcatatagaatatagccacatatttccagttctgcattttcttacataaactacacccataatcatcatgtatatttctcagtttctgtttcattaaagtagattgaaaaaggcacaaagcagaatccttttagatttaagtttttccccaatattttaccactatctagctcacatataattctatagcctttattttattttattttgtatttttttgagacagagtcttgctctgttgcccaagcaggaatgcagtggcgcgatctcggctcactgcaacctcctcccactgcaacctctgcctcctgggttcaagcgattctcctgcctcagcctcctgagtagctgggattacaggcatgtgccaccatgcccagctaatttttgtatttttagtggagatggattttcaccatgttggtcaggctagtctcaaactcttgaccttgtgatctgcctgcctcagcctcccaaagtgctgggattacagatgtgagccaccatgctcggcctatatagccttttatttttagtaactcaattttattgagtctttacaaaacattttaatagaaatagcagttctcttctacacacccatatatcattggtttacataattatcattgaataattatatgaactagcaaaactggcacagcacatstgggtacaaacaccactgacgcttggtccacayacatctccacaggagggatcaggagtttacaggcgggctagagggcatccggtactgaggtggctgtgaacatcagtcgataggatataatgagagaacggacagagttgcttaatcaggcaaatcacttaggaggccagtaaaagtaacttctttttttttttgagatggagtctcgctcagtcgcccaggctggagtgcagtagcacgatctcggctcacggcaagctctgccttccggkttcacgccgttctcctgcctcagcctcctgagtagctgggactacaggcgcccaccaccaggcccggctactttttttgtatttttagtacagaggtggkttcaccatgttagccaggatggtctcaatctcctgacctcgtgatccgcccgtctcagcctcccaaagtgctgggattacaggcgcgagccactgtgcctggccagtaaaagtaactyctattgtrttttatactytaactatgtatgcatttgataaaattcattactttgataaaattattaaaacgtttaaaatggaaggacaaggaggaagagcatgagtttaggtatcctacccaagattgcaaaactagtggtggaactagaatttgacgcctgaatttggcctccaagtctagaattcttttgctccctcccattatgcgttaggacagggatgattgtggtgggttgggtgtgctgctgcagaccagaaagggggctcaagacagttctcctggtcagcaggagaacagagcaaaagaagatagaagaaaccacamagtgattaaatagttttagaaaaaagacaattcttgcaaaagaagagcactctgattctgttttccttgagttaacccatgtatttcttgactttgtacctcactggktcaaaacaaaagggktttagcatacaaattttgctaatagaactggkttttctaactctaaaattgaggaaatcttgaaagggcatcgcgtctctccagcaaacagtaacaacacagaagaacccatgatgcamtggtcccatggggaaccaaggaaccaagggtgggataaagcttaaggaratttgtgaccaaaaatagcaactgtacttcaaatgaagtacagttgtctcttggtatctgtggcagattggttctggggcaccctgcamacaccaaaatctgtgaatactcaagtccttgatatatatcatgtgcatatcacctatgcacattctcccatatactttaaatcatctctggagtatttataacacctaatacaatataaatgctatgttcatagttgtgatatggtattgtttaggaaatgacaagaaaaaagagtctgcagttattgagtacagacrcaaccatgttttttcccccaaatattttaaatccacgtatgatggtatccatggatgcagaaaccgacatacatgaagggctgattgtaatttgaatctcatcatccacctttttmtaatctttgggtttcatatgttctatttccatcaagtccttctttaggtaatactatttaagcaccagttttgaagaacttcctagtcccctagaaaggattttgtagtagctgttttaaaatgcctgagaatagaatattatgttttcccattaggtattaatgatttcagtttatgttaaatgctttctccgttaatttccttggcacttcccaagttatttccttcaagaagaaaatttgaaaggtactcagatttmtatgacttcacaaggaattcataaaaaggtcaagctctcaaatggctatcccttcaataaaattatgttaaattgttcaaaatgtttgtacatgggtcatcacttttatggactttgaaaaatagctgtttagtttttaaccgatctggttataaaagtaattattgccatgatgtggttgagattgaaaactttctttttataaaatagaattcagcttaaatatctttttggaaggagattacaagccatggattaattatttgattaacatgrgtaaacaagtaaagagtatatgagtagatggcttgtttcatgatttaaagattgtaaaattagttaattaaaaggaaacacaagcttaaaagayggcgagatgcaagatcagtgtctgaaataagtgcttcttttcaggatgccctgcataaagccttgcctgtgcggaggcagcttcctgtgcactgccggctgccgggtgtgcttgtccatgtgccagaccccctgtgcaggagaatccagcactttagagcaygctttgtgtaaaatagagtgaaaatcgaatcatattcggggagtgtctgagagacaggactagctcaagaggcagcctctaaagtgagaatagcactgaaaaggggtggagggcctgatcccaggcctgattcttcagcgatctcatgggaaacccattcattcagcttctctgagccctcattccctcaccttcacctatacaatgctttaatgtccacttcagccttgagattctaggaaatagggcaaaaacaaacaaacaagctcttcattatcatgcaatcatcaagattttcctgtttatattgtatttaatagtccaccccacccccatcccataagtgttctcatatgtgttacttcatgtaattctcacaacagtttcccaagtatggtgggcttactggctggcatggtagcctgccttaatcttgccatactatttctctctctcaattatttcactctcacctatacttgattcagttccaaatatttatgcaatcttcgctttgacctctcctgaacttcaattctgcttcttcaaattctagcttccacatcagtgtcccattgttgcctcaagtgcagctggacttgaatgaaacttgtaatcctkgtmcccaaaccacccacccctctgaacttgcacaagtgtctattatatggacacttcttcctgccattccggcatgcagctttgacatatccccccaccatctcctctccccaacacttgcttccagccaccttttgatcctttctttmtatatctcataatcattctttttagcttttcagcgctgcagcattctggccaaggtccttagcacatcaaattacaactgtctgcaagctggtatccctggcttcagcatccattttcatcttaatttatccaatgaattgttttaaaaattgtttttcctatgctacactcctctccaaaaaccttgctttttcctttcactgttacaggatccagtataactgcattaaatacaatctctgcttccctgtgtaactcagaattctctacaaattctgaaagtcccctgaataggccacttctaatcccaagcttgaaacagccctcatccttctgtttgaaaaattcatatakattcttcaagatctaagatggtttcttctctcagtttcagagtggccatcctctgaactacascaggcattgctcgttgggaggaaggcaacrgcacasgcatgagcascatgccasgccaagccctttatatatacatgaactcatstgctcttaaccttaccacgcatgcatcatcactgtccctactttagaggagcaaatgtggctcagagaggttaataacttgtctaggtcacagatttgccaagtgctggacccaaatcttggtggtcgggccatakagtttgtgcttctaacctttacaccacacgatctatcaaagcttctgttgctctaaaaatccttttgtgccactggtctmtakcatttgcaagctcyttaagggaaggctctttgtctctgtgctctgtagcctgtgactggcacacagaaacaccccgtatgtgaagccttagaggtccagagatggagtttagcagtagaaacaagagcaaacccctgacagtgtctstgggctcaaaacacacagagacatacaccytccttcttgatctttcctmtactctgacaaaagtgctgactgcatatttcatagatcagaaaaagagtaatactactaataaaaatacccgatacatttccacatttcagaatgtgggccagataatgaagaaaggtctttgaacagtacagcctccstccttccctctcttccttcttttcttccttcttktgtcacttgctcaacaaacatttgttttatgcacaccctgtgccagaacaacgcacctcagggtttgttactaatggtttctamtgagctgctaaaagacagagccaagtgatattaggtgattaccaaaagcaacaaaaaaattgctaaaatgtattgtgagcataccaccaggtakacattaggcaagggcttggcagatattatctcacttaatccttattaaaactctatgagataaaaagattattatctccattttacatataaggtgagaaaggtgaaggtsatakgactcataagggacaagcaaggattctagtttgggtagtttgaaacgagagcctgcactcttaccctttacacttgacttccgccagaagtagatacagctttgcaacayaccasaggcatatttaaaattagtttcatatcctttgaaaatagctccatamacagtatcagggtacaacaggaatgcctccactatcatcacacactttacctgaaagcaggtgttcccagggctttattcaattcatttgtaaaattaaaaattagcaccaagcaatctccagaattcctcccagacacagaccttgtattattccasaaaggcagctgttggrcagtgagtgttcactaatcttggagtcagaatgaggtttctttgaatagcccagcacccttgctatcagttcstgtcaccgtggtttgtacctattacttccagtttgtcatctgctgtcctcaactgtstggtagacaatcacccaacccaaataatcacctggatatacagtggtstgtcctttaccccacccctttcatacacgcagttcaagatcaacrtctcagtttctgagttctttatcatcctgctctgtggttgcaggttttgctctttggatgtgagacttgcccttatgtccaatatttcctagttgcaggtcctggctgaagaggagctacttctgataaaatgatgcatctgatttggaaggatgtttgcgtcattccctcccttctctttttctcattttcaagattgctttgctcaccagcatgacacacatcaagctttttcttttgatctgaaataaagtctctttttgttttttatgmtatgggccttttstgggyaatctcattcattttgttggctctaatgacaactatattagcactggtgactcctaaatttctgaactgtatttcttacctgagctcaaataagaatgtgcccagagcacatggcctcaggttttccacgagcaccaaaacagagcctatctaaatatgaagtcctcctcttyccttycaaacatgctccggctcctgtgccgcctctcagggaatgtggcactcastcactcaaatcaggggccttggaattcctcttgcattcctccattacttacatgtcatmgataaccaagtcctgttcattccttcttcaaacatttctcaaatccacccactcccccatccgcactgctgcttccctgtttctaacctagataattgcagtagatatccaagaagcatcattgctttggtagctaacagtcatttcaaattkaagataaataaaatagaaatctccttttatcctcagccccccaaatggatcctcttgtgtctgctgtatctcagctaatagtattattcaccagcttgttctcagcttaaayctggagtcatcctttatctctgttttygtatccttccacatccactctatcagcatgtgctgtcagttttacttctaaaatccttcctaaatctgacagcatctcattatttctactgaaaccaccttggtctcggccacttcatttttctcctggtttactttaacagctttcttaaatgggctccctatctccacttttttcctaaaatcccacctgtgtcagagagcttaaaaaaaatttcattacctggcttaaaattgtccagtgtttatttttttctcaatgcaattataataaaatccaaactgcttcccacagtctataaggccccatgtaagctgcatgctgccacacgttcacctttgctcaccatgctccagccatgtcaactttctttcttcttcctcaacccaccaagcttgccctgcctcagggcctttgcactcttctctcagatctgctcaaggctgkttccttcatatcactcaggatttagctcaaatgcctcctcctcagagaagtcttcctctcccattctggctaatgtgatgcctgtctacaactcctcagaatttaattttatctcttctgatgggataattaccatagactgatgaatgtgtgtgttcttttttaactaaaaaattgaaagtggaaaaagttgaaagctttttttcttaaaatagaaaaatacaggcctactgaagcaggttatttaaaattagagaaaaatagtttaatatatctctttgagatgctgaattcaattcttttggctctacatacccagaaatgggatggctggatgataaagtagctctatttttaattttttgaggaatttccatatggttttctacaatggatgtactaatttacattatcaccaacagtgtattaggattcccttttctccacatccttgccaacacttgttttcttttctctttttgatgatagccattctgrtaagtgtgagctaatatgtcattgtggttttgatttgcatttccctgatgattagcggtgttgaatatattttcatatacctattggccatttgtatgcattcttttgagcagtgtttattcagggtctttgtccatttttaaatcatggtttttgttgttattttttgctatgaagttgtatgcatttcttatataattgcagcattattcaaaatagctaggatatggaaacaatctaaatgtctaccaacagataaatggataaagaaaatgtgagacgtgtgtttgtgtgtgtattccattgtttatgtgtgcacatatatacattttatatatgtatatgtattatatatgtgcacatataatatataatgcattatatataatgcatacataatggaatattatatagcctcaaaaaaagaagaaaatcctgccatttgtgatgacgtggatggacttggaggactttatgttcagtaaaataagccagaggcagaaagacaaattctacataatctcaattatacgtakaatctaaaattgttgaactcatagatataattatgcaagatgaataagttctagagctccaatgtagagcatggtgactatagttaaccacactgtattgtaaaatttaaaatttgctgagggtagatcataagtgttctcaacacacacacatgcaaaaggtaattatgtgaggtgatggatatgttaattagtgtgataatggtgattatttaacaatgtatgcaaatatcaaaacatcaaattgtacaccttagatatatataattttgtcaattatacctcaatgaatttggaaaaaaataaaaatatataaaatgctatatatatatctatattcatgtgccaaattcaaaagtacacaccctttttccgagtgtaacagtacgtatgatattatgaatgcagaccgaatacagacactggatgattcaggttggtgaaaagagagcaaggtgcatcagctcttccgatgggacatggaagaagcaagagtcctgcttcataggtaagtctcaaggctgaggataactggacttccacctctcctttatctccagttcaggaaagaaagaaggatggacaattaaaaaaagaaacaaatatctcttgcttgtctaaactgtctggaagacacaaactgatgtggcaatccaactagacctctgggaatacaatgtaacctagaattaaataacgtaacctagaattacattacagggtttctatagaaggaaatacagaggcacaggtgctgtgttttgtttttgtttcccaacattttgttaagataattttcaaacatgctgaaaagttgaaaagcttcatttcttaagatcatatttctcccacttcaggcaaagccaagcaacatcaaaacttcctacctgcctaagaccagtatattctaaatctctaagtgcctgggaccaaggactgggccacgacatgatttttgacattttggttacctttttagtgtgcttatacctgcaatgagccaatcactcttgctagatagaaagagactattttttttaaaattttattttatggtaagaacgcaacatgagaactgcccttttaacagattttacatgtacgatacagtattgtgaactgtaggtatgatgctgtccagtggatctctagaacttatcaggggctgcagggaggaggaagtggggagttgctaaacagctgctatatttttgttggttgaaaaagctctgaactaaattttgtcttcaagtctccttacaccactgctgggaagaacatctacatgcttattgggcacatttgttttctgtcgtttagagaggtccttcatcaatgagtattgattattgtgtcacgtagtatattgctcatacaaattctgaagtcaaattgtttttaaaaatctaaattggtcacatcttagccttggcgtttacatttttttccagcaatatgaactgagtggtccctcatatctgccatcttcatagccaaacctgttacttttcacccagaaaagaaatcttcctttgacattttctcatgagtaacgataatgaatttgataatttactagtggaaagggtatgatgcctaacttacactgaactagatcctattgtgtttataccgggcacaactcagtggtctctgaaaagacaaacaaatgcctgggcatggtggctcacgcctgtaatctcagcactttcggaggccaaggcaggagcatcactggagctcaggagttcaagaccatcctgggcaacatagtgagaccttgtctttactaaaaataaaaaaaatttagctggatgtggtggcacacgcttgtgtgtccttgctactcaggaggctgaggcaggaggattacctgagcccaagaggtctaagctgcagtgagctgtgattctgccactggattccagcctgagcaactgagtgcagagagagaccctgtctcaaaagcaaaacaaaagaaaaaagasaaacaatgcaagctgattggagacacctgtttgcttatttttgccactaatcattatacgttatttaaaagcaagagatgattaaatccatctttcaggtcatttagttaagtttttttttttttaaatttttacaagctctcaaggtctttgactactgccaattctcaagccattcagataagaaagcattgctgccaagtatgtatattaaatkcttcttcagaagttcactgaaattcaaacattacaactataattaggataccaagaataggacattactggtactttaatgtgaaaccaggacctaatacacatatgttgggaagtgttatttaaagacttctgctatggggttatatttaaaaaattgattatctctctttttattctctctcttatgaaaatgacaagaattgttttttcttatgttttagataaacactagaaaagtaaattttaaaaatgaattcatgtcttactttaaaaaatattttgtacatttgcattgggttaaataaagaagataactttctgtccaggtgcagtggctcatgcctgtaatcccagcattttgggaggctgaggtgggcagatcacttgaagtcaggagtttgagaccagcctggccaacatggtgaaaccccgtctgtactaaaaatacaaaaattagctgcgtgtggtggcatgcgcctgtaatcccagctgcttgggagactgaggcaggagaatcacttgaactcgggaggtgaaggttgcagtgagctgagatcatgctccagtctgggtgatagagctagactcagtttcaaaaaaaaaagaacttccagcaagggcttcagttctgcagtgtccactatggtagctgctggccacatgtggctgttgagaacttgctatgtgactagcacaactcagaaactgaatttttaattttaattaattaaaatgttactttaaaatctgaagtagtgtaaagtgtttttttcattaaccataactttattgtttccatagactacatttttcttcaatgattgcatcatgtaatctactattttctattataatacacatgttcagcctatctatcatttctagcatctaatgaataatttcttatattgatagcatgctgcaataatactttcaatatcctggcttaaataatatatcattaaattaatttcccctattgcattttgctttttgaaatgcagcttttcaaaatgtaatttatatatatggcttacattgtatttttattggatattgctgatccagaagaaagcgacagagtaaaaaacaacagcaacaacaaaaaatacaccaacaagtaaataatgatgaaatctggagagtcttacaaatttacttgttctttctgcctaagttaaaaccttgtaaagtaccacatgatccagcaattctatttctggggtatataccaaaaaaatggaaagcagggtctgaagagatatatttgtacacccatgttcacagcagcataattcaaaatagtcaagaggtggaagcaactcaagtgcccattgttgcatgaatggataaataaaatgcaatatatacatacaattgaatcagtcttaaaaaggaaggaaattctggcacatactacaacatggatgaaatttgatgttatgaaattagctagtcacaaaaccacaaatattgtatgattctacttatataaattacccagagtagtcaaatttattgagacagacagtgaaatcgtgcttgccagggacagagggatggaagaatggggagttactgtttaaggaatacagagtttcagttgtgcaagatgaaaagatttctgtgaatgggtggtggggacagttgcacaacaatgtgaatgtacttaatgccactgaacatttttaacacataaacatggttaaaatggtaagttttatgtgtattttataattttaaaaaataaataaataatttttaaaaatcatatagctatattgctcctattgctgcagaaagatatagtccatttcaagttaccatgaaggttaaggaaaaatattaaatttaatgtacttcatatttgcttwtctatatgtcctgggatgmacatttttaaatggcaagaaagctagcagattaggtaagaaaaatggccagagaaaacaagataaaagtkcattaaataaagtcaggttttgaatgtagtgttttgtttgtctctggatatcagtgaaacagagaactattcgttttcagagaaggcttggtaaaattgcatttcggggactttttggaggaggaaaggactatatctgactgacaagtacagattgtttctatacagtgtgaaatgtattagagatttatagtcatactaataactaggccatagtaaaggtgtgtaaggaaatgaaggtaagctagggtagacggacatttgccaaggactcaaaatgtaatttatatatatggcttacattgtatttttattggatattgctaatctagaagaaagcaatgttggaaagatgttcaaagaaaggcatggggatcatcccaccctttaaatggtccaaatggaarccaagatactggatcacgtctargaaaatttaaatatgctagctacactcaataatgyagtaattcatggkcatctgtaactcctcagtgtgaattaattaatcagatcactcagctgcttctgaaagggacccctggttctggtgtcccccacaacaggtacctccctttgtgggtctctctgttttcccactaaagcttagcctttcttgraattcctccaactgccactcaagtcataacctcacttytggggtgartggacttgaggtgtttcatgtttccttagagtttcatggcttctctgttgtcctacgaatgctcttatctggggattttcagttaaataatcrgacaatgtatatgattgatttctatactgcatggctcaagtgacatacattcactttagaaggttttaagttgcacagtatacaagtatatcatttacagttgattaaaatgtkkgtggtcatttctatttaaaagaacaagttaggcatctgtttcttggttagaaataagcacctcatttttttaccctgtgkgaaaatcaggtatgacttaacactccttgcacaagccaggctgaggatctctgatattctatttctgtgtgcatttgtaatcctttgtttatacaaatgacactttcagctagtcaaaatatgcatttacctagaatgctcaattacaggtcatgtcacataagagtgtagttactgtcattattatattgactgatacagagatacacacacctaggttgccctttgatacaacttccacgataaattagttgatcattcaacacatacatatgagcctaatagcatgagcccaattttgtcaagacstgyttcgtctcatgctgccttgatgagatttgtcatctagctcttgaatattcatttttatttgagttactttctatttcaattgggaattatttgtgatttgtgtttgtaataccatatttaattgaagatgaaagtgtaaagtaatttttggctaacaccaactatgaaattattctccacttcctcttctgggtaaaagaaacacatacatgttgtttgtgaaagagtcaacacagatwaaagtttctctttttcagttacacaaggaggcaccctgtgaaatttattgtgatgcagctgaagataatayttctcccctgccacctaaagaaagcatgtttccagtctcaactgtgagcaaataaatcctgtttggtgtagtataatagcaatccaaattaaacatcaaatatgtggagggaatttcaggtagatgtgttcatatctgtactttgactatgtggtgtgacatggcaatttctccttcattagctacttagcatttcagatttgtctagtctgcatacacacactcctttaaatgcagtgttacacaataaaatttaaggtattttaaaaataatgtggcacagctgtgttgctatttaatctctatcataaattcgactggctggaaaatgaaatttgtttaaagataaaacctgtaggacttcttttaatgaacagcccaagtgtaagtcttccattttgaggaagggaaaacgcatctaagagacttcatttcattcaataataaatattgttccgaaaccataaacccagagaaaattggttgcttttaaaaatagacttcattaacatagttcagagagccaggtcttcaggaaagctgcttaaaaaagcaaacatgctggagatggattgcctgggaggccgaggcagaaaattggtagttcagaactacaggatggaaaaatgtgagactttgtttataccaacctgggccactgggcataagatcttaggaaaaaatattttgcttcttttttcagcaattccttggggtctgtgttaagccagatgtggatcacaggtctgggttcaagtctcaattctgccatctgctagctaacccaagtgaycttgaccaagtcacatagcagggcagtgcaaaatgaccaggctttgctatcacacagacctagatccaggggcacactggtcaatgtttaaaactgaatgaaccctggtttgtagtgtttgccaatctccatgtgtaaatactcccaccatggccaattttaagctacctgcatgacctcactgaatgcagagctgggaagagaggagcacaatcagttttctccagacagctttccagatattataagctggctccagcaagccacagcmtaggttccatttstggttccaccagttaataaatggggcctaaagcaagtaatttaaccttcccaatctcagctttccaatttttaaaatgttgaccataaacaaactttacatgttcatttaaaggctcaaatagaagatactgggcgcagagcctgaaaatagtggttcaataaacatcagttccccaacttaatggcctaaggattaagctcttctctctctatctctctctctctctccctccctccctctctctctcttttatatcttcttccttctcactctccttcctttcacatattccttgaaagaacaagtctgcatttgtcttatatttgctccccaaccccttgtcacttggttttcacttacagaattcctccagcataatttctctgtggtgatgagtagatatctccctgcaactccaatagatgttttcagtgcttattttacttgctcactctgtggcactggacaggtttgaccagtccctccttttaactttctgtctttcttggattcagagacagagaatgctgttgattctcacaggacagctttgatttatctttcctagggtctcggtctctgagttatcttactgtgttctttgttaatgttggggatgttctaaggattcagccttgccttgtctcttttctcactcctgactgcctttggagctcattcatatccagggcttcaactcttatccaggaaccaattacttaaaaggcaaatctgcatctctctgaagttctaggctctattgcccataacctaccacttatttgacattcttgacaaaattctgtccccatatcacacatgccacattataatcaacatagatacgacttaatttattattttctccaccaaacttgtctctctccccgtattccctacacaggttgcagtatacatctcttctctaaggtgggaaacctaagagttatcctcccgtaccttccatatccaaccaggtcagtttgatcttgtaaatgtatctggattccattttcttggcttcctctctaatgtcactgtcttagtaaagacacctcagaccttcatcctgttattcttgggtaattaaaatgatatgcttcctgatttccttgcctcccgtcaatttctcttccaatccatacttccgctgaggtttttagaaatctctctcctggagagatttttagaaaatgcagatggattctgtaattccttgtacttcattagctttcagcacttactgcatgaagtccaaactccatggaacggcatagatggtccttgttgattctagtgtgtgcctacattttggccacatctcccacctcttgtttatgactctgttccaggcttattaaatcactaagctttccctcaataggccatgccttttcccactaccttcatctctctggcaatgtctctttcattaactattaggtgtttcagatttgtttagtttgcataaacacactcctttggacagcgagcccttccccccccctttattttaacctggtaaactactccaattctttcttcaaggactgactcaagtctcgcctcttccaggaagccctccctgaaattcctcatgataccttgtacatcattctctaaaaggcactcttcacaccatgttgtaatcatgtgtacttgcttttctccctgaactgaatgtgagtgaattaagggtatttatcccacatcttattcacctttgcatctctgatgttaagaacaagtcctggaccattaaaatatttatcaaattgaaagtaccaacttataaatacctcagattccttctctgccccttttgtggtgcctgaagtgctgtcaagaaaatagcttttataagctacgaacaagttaggatgataagcattttaagcttgattctaactggaataatgattctcaaagtgagaatgaaacatgtagatattgcaaaataccaatgtccaaaataatgggcttttcaaggataatagtttgcttaaatgtatttgtcacaatgtcttctacctgctaacttcatatgtttaatgttggtcaccaataattaaaactatgacaaaataggtctttctcactcttgatttttaagtttttttttgatagtgtataggaactatgtcaaaaacactataaaaatagaaatagcctagagaaaaatcatgctaaatgtgctaaatattatttgcattcaataaatgtgacatataataaaatgaacatgttattcatgcacagatggaagattttattcagtatctacttaactattttttttatcctgaatgactgcatgttcaacgtgtgttaaaaagttttaaaatggaggtgccattgctgttgtagaacatttccaagcatcaacacactcagtcaaaaagtaagccgcaagggactgagtttgcaaagcagatgttctacatttgctaaatttccaataatgaatttcaccttttgagttgagaaaaaaaaaaaaaaaccattgttcctctctgtgggtagctttttgcaaatgatgtaaatgaacaaaccatttctaactttagggatgctctaatgtaataaatgaaaagtacgcaattgatttctccattctctggtccactagggctattctttccattatacttaactgaatttgaaagagttcttctttttggaaatgttggaatatagatttaacagatggtgttcccctagtttatgttagtaagcatcctaacatacctttttctaaacaataatttataatccacttttcttcacaagaattcctctttgcactttatgctgtgttgctttctaatatcgagaattccatggcccacaaagaggtctttcttctgatgagataaaggtacttcaaacaatgaagtttttacataaaatctatgaaatagctgatctttttaaaaattttcccggtaaagagaatcaagggaaaatagaaaattgatgacatcaggtatttgcctcctcatatgtatccacttatcattatatcaccatatattttataatattctttaccaagccaaatcgccaaatttagttttgatgtttctaaccatattctatgactatgacatagactttcaagcttagtstcaaggaggatataatttgaatgggttttcaaaaatgacaatgaatgataccaagtgatacatactctcttgtgaagttatttctggcttatgaaaaatagcrtcacacatgaatcaatagcccggactgcaatcagtgtagacggactctaaatagaagtcactaaatagactacaggacagttttattccatagtcctggcaccatcagctagacgctttactgagaaactcagtcgaaactaaattagtgtaatctttggaacatgattcactcagttatataatgaaatgaaagccacttaagttttgttgaccaccattatacatagtagagccatttcaattaagtgaaaatggcaatagaatcatagacacaaaattagaaaaaacgttggcaatgatttaaccaaactctttatgaatctcttgtcaacattcttttagggggtgcccaacccctgcacatgtttacaaacataatctcattctttccaatgctagagacgtttccttgttaggaagttatttcttaccctgaataaaaagttacttctgtgtagctttcatcttagtgcaagactctttaaacaaagaattaaccttaaccaaccaaaaaatgagggtcttggtaggtcccagttttaataggaatattctgtctaaaatattttctaatttttttgtttcaattattatacatttagtgcaataggatagggtagattgaaatggtccagaacctaatattggtctttcttagccaggagataaactcagctgtaaacaagagggtgcagggtatatagtaactggggaggcaggacatagaacctgaggaaaatgaactaagatgtaaaaaattccaagcaggaagtcagaaataggagttcccatgatgtttttggtatcttagccacacactttatctaaagaagtctacattcaggccagtaccacagactgattgtagtatttatgactatagtggcaaacagtatgttccaatcttgaaaactcagactattgttacaaatttagatttcctgatggcrtgatttgttgtcatttgaaatgattaggagccccctaacattcccmtagaatatgggctctatccattagttatccttaacctcaccctctcatagaaatcaggcaattgacaagctacaratcagatagggcaaattagtaaaaattccactagtaaagggatttttctcatagccctrgtgacctgtgttccctatcaaagatgctgttgccttaaagattttccatttgttgaaaagtgttttattaagcaagtaactgaacaaagcattaaagtgattagcactttgttttgaaaagaaacgttagcatggtgggggtgcaggaaagggtagggagtggagatgcctgagtccttgtcctgcctctgtctctaaccttggtgtcaccttgatcacaaataatttcagaagccatgactattgagggaacctaatgaggcatcagacttaacactttggccaacttagctttcttccaaactgtgcattttctttaactaagaaggtagtacayacagcattatggaaatagcatttagaagcaatttagaaattatttagaaataatttctcccccaaggagcaataatgaaggtaatcatacctgtgagggactcagacactttcttgccttcataattgtgtgtgtgtgtgtgtgtgtgtgtgtgtgtgtgtgttcatgatcaggctttaaaaggttcccagagaatgcaaacaataatatttaacaggaaattcatgcaggtattaagttgcccacttatctgaaatgaatgctaagattggaaaggacaaaagagacagaagcttatgctgtttatacacttttagattaagatggatctttgtcttctattgactatgctgactctttggaaacacacataatatcttattaccagacaggaaatgaaagctaaaagaagctagtggatgggagtgattggtagctcttgcttatcacaggagtagtgggttggtagaaacttgggaaggatggcgggcataggtacacatgccaaattagcgttctmtatgattgttggcaatttctgggcactgtgagctgcaacactgctcctatgcaaagatcgacttggtaaatgaaaatctatcttacctcacaactttaagctaaaaggcaagtcatggaaatatgaaaatgtaaaaacttaattttgtattagttagcaaatactgacccctactatgtgcaatggcattctgccaaagcatgattcacttctgaatccatatgaatttagaagtgaaggcattcttaaaattcctccaaaatataaagatgcttctcagttaacactgtcctgaaaagcatccactacatatacggttttaagaaataaaattgagattcatagtcatttgggaaagtaaactggttgtcaactatcacatcacaatgtstgtattttaatactgttggtygcaagacttacctttaaatagataatcatgaaaaaattaagcmacattcccatctcattttcttttgaatgtaatgattggatgaaaagggcataactgatgtgaaagtgagaaagctaaatgtatgaatttattttaattaaattaatatygatcagttcaaaaaccataaactattaattttagtgtgaatttttgaataataaattttaaaaaatttaaaggtggaaataaaatcaggaaataaagctggagcccattggacaaaatcttacctgaagttactttktgttctcttctcttctccactctccctgaaatgagaagtggaagataagttacagcatggagtcatgagaatatgatgaaaataagatgaaagcccagtttacagcaatttccaaacacaacctctacttcagccatgtccagtgtgctcctagagatgactgggctcagctgacaggcataagaactgcttacaaaccaatttatgaaagtaaaaaataaataactatgcattaawtgtgctgttggatttttaaaatcttgttagccagagtcgtttactcaacaataaacttacaaagggcaaatccccatagaaaccattatggggaaaacagctaaataagactatgccctcttacaacccacttgaaaaaatagaaaggacagacaatataatatgaagtgagatgtgcctcaaatagtgtagaatgtttaaagatatgagatgatgaaacagttattttaagaaaggagggggtgctcatgaagttatggagaaagtggtatttgattttgaccttgagatacaaatgggatttgagaaatttgaaatagagaaatgactgactcttggcaaaggaaacagtatgggctaaatggacagggtatttgcgcaagaagaacttgcacacttacagcagtgcataggaggaggactatcctagaggttagacacaaggcaatgaaagggtggactgagtcatggcagtgggagtggagaggagggaagtagtggatgcaagagaccggggggaggccgaaataatagggcccagtgatttataaaatgtgagttgccaggaaggagaagaagtcaagatgagtggttagctaggtgactttgggtatagagatgcaagttggggaaatggtattatagaatgtgatgaggctgggaataacaagttcagtgtyagacctactgactttgaagtactatggggacaaggagcttgtaagaggtcagaaaatttaactatcctaatatatacgcatctgacattggagcatccaggcttataaaacaaatactactagatctaagaaaagagatatagccatacaataatggtgggggacttcaacaggcactgacagcatcagacaaatcatcgaggcagaaaactaaccaagcaactgtggacttaaatgaacttttgaccaaatggacctaacagacatctactgaatagtccatccagcaaccacagaatgcacattcttctcatctgtgcacagaacattctctaagactgaccacgtgctcagtcataaagcaagtctcaataaattcaaaaaaatctgagttgaaattacagatgcaagaaatgttcatcataagatggctgaagctgaaggagtgaatggggcataaaggcagacagcacagaggagtgggtggaggacaataactaagataacatgactgctgcttttgttttgtgatgtaggcccacgggaagtcagaagcagctgagatctggggacctcaacaaagtgcaggctccggtaccacaaatcaagttttagaagtatgggggttttcaacagcatgttgctactgcttgctgagttcacatgattgttgctagattgtgagagagtagttttagcagagagtgggcagagaacacaagagagactgcgagggtttgggaagtaagtgtgtgatgagaaagtggagctgaggacatggcttcttgtttatcaactttggcagcctccaaatgagttgaataagtgaaatggggtaatagcttgactagaagccaactaaaggtttttgctaagttatggaaatcctaagcatgcttatagacttaggtaagaaactgtgtacctgggcaatggtgtgtatgaacaccacggtggaggtgaggaccgtggtttgggataagtgaagaccatccttccagctgtcacttttttttgtcatctatcaacattccacagctggagctagttactgagaagttaggccacaygttgaagctacatgtaaactttatccaagcttttctaacagcccttcgagtcttttaaaatcctaacatataaggtggaaaatgtacaatcttcccttatgtcgctgccaaaagtgtagaattcatttaactggcaccttgattaatggcatgttatattcatttgggtgatttccagaggacttgtttgatgcaatttatttcaatgattccaacagataaatagcatgaataatccatttaaaggcctcattcattaygaagtgtgacagggtaccttctcatttaagttttccactgggcaagccactgcttactgttggattattcacttatgaatactagaggcctcggacattttcataaattttaaaaaatggtattcaaggcttgaattgtaaaatatgtaaacaaaaacaactttttggagtgtctttaacctatattagaataagtcactaattctgaaagttggaagtgtatgtatttgagataaataatatggtgtagtgatcaaggtrtcccaaatgattcccatcttctcttcttttgatattcacgtsctgtgtaatcccactgaattagattgactgtgtaatcaaggattttgtgggaataatatagtgtgattttgaggttgatccttaagaaaattgtggcttccagtttgggtgtggtggctcatgcttgtaatccctatgctttgggaggctgaggcaggaggatcacttgaggccagcagtttcagaccagcctgtgcaacaaaatgagaccaccatctctaaattgtktttttaaagattagccaggcatggtggcacacatctgtcacctccctaattagttgggaggctgaggcaggaggatcacttaaaccaaggagtttgaggttaccatgaactatgactgcaccacagcactctakcctgaacaacaaagcaggaccccatctcaaaaaacaaagacaaaaaactatggcttcaatattcctttcttttggatcactccctctgggggatgccggataatatgttgtgaggacactcaagcaggcctatggagaggtccatgtggcatggaactgaggcctcctgtcaactgccaatgaggaacaaaggcctgccagcagcccccaccaacttgctaggcayatgagcaatccatttaccagccccagtcaagccttcagctgacagcagctctgggcaacatgttgactgtaatyttgagaaagccaaaaccagaaccatccagttggctattccagagtcccctacagaaaccatgtgagctgataagtttattgttgtttttagctgctaaatcctgagataagtgttaaatatatgtttcaaaagtctgtaataatttatcatttaatatactatacctacagtaatgctaattgcaggcatatcaatcagtctccctgattttcttatttttaaagtggggatcagggtctgcttctctggaatgctatgaggatgaaacaattccatatggtaaagctagcaagaaatggacaaaattcacatgaaatattggcatctcatgtttcagaagggaggctgaaaggtgcaacttttttttatgaatacctcaaataattttttttatgaagacctcgaacaattctcagcccctatgttatatgaaagggctttgtaaattgtagagtgctatataaattccacctattagttttatcatgaattagtcctgttacaggaatctacttagatttcttagttatatatatgtatgtgtgtatatataggtgtgtgtgtatatatatatgtgtatatatakgtgtatatatgtatatatgtgtgtrtatatatgtatatatgtgtgtatatatatttatacatgcacacacatacacacaaaacatcaaattagaaaaataaaaattacatggtaggacagtactatattgatccatggacacagagattgaactgtttagatggagacgaccctctaggcttccttctttagtatctttatctcagtctgaataggtgatcttatctctcattctctcaatgttcactttcccccaaagagacaactgtgacactacatctctagctccaaaatctacttaggttttaaagcctcttggaaatctctacttgtgtcctccactgcacttcaacacatgtttttaacttaaataattatagtcccartttctctaatgaccagtgatgatgagcttaatgtggcacatatacaccatggaatactatgcagccataaaaaagaatgagttcatgtcctttgcagggacatggatgaagctagaaaccatcgtcctcagcgaactaacacaggaacagaaaaccatacacctcatattcttactcaccagtgggagttgaacaatgagaacacaaggacacagggaggggaacatcacacactggaccctgttgggggtgaggggaaagggaagggagagcattatgtcaaatacctagtgcatgcagggcttaaaacctagatgacaggttgataggtgcagcaaaccatcatggcacaggtattcctatgtaacaaacctgcatgttcagcacatgtatcccagaacttaaagtaaagaagaagaagaaaagaagaagaagaagaggaggaggaagaagaggaagaagaagaagaagaagaagaagaagaagaagaagaagaagaagaagaagaagaagaagaagaagaacaagaagaggaggaagaggaagaagaagaagaagaagaagaagaagaagaagaagaagaaggagaaggagaaggagaaggagaaggagaaggagaaggagaaggagaaggagaaggagaaggagaagatttcattaaaaaaaaaaaagcaataattatagtcccctacaaaactgctcatccttggtgtctgctcaggcacccaaacataaaacctaggaaccaccgtcttctttcttttgctccttcttcccatctaatctgtccctcagtccaatacattcccctccatcaggactttgagacatatcttctcctttctcactgccatcaccctagttcatgaactttatatctgttcctggggttatctattttctatgggctcctaacttgtttgttggttttttctgtcattgtaatccaatcactcctaaacagcaaactctacatttcttaatataaaatttatgaccttggacaatttggccataactttccttctgctgtcactcctcaagcatcacagagaggagttagccattacaccaggaattacaccttcaccccagttccccattcatgctgtttctgcttcctagaatgtcctgtcacacggctcctgcctatcaaaaccctattcagcttttagagctcagctcagctgccagtcctctgtgaagtcttttcttttgtgccagctccccaaactctccatgccctgcagagtgaagcacccttcttctgtgcttctgtaacctttcatttactcctttgccatagcactaattcttattttggttcacaattagttgtgtgtttgttttcctgactggatggtggcttccttcaggacaagtcgagagtcccatatcgttctctctcctgatgtctagcaccgtgccttaaacacaaatgctccaactcactctgaaatgctggagaacatgaagtcaattttagtactgctaaaatgcagtgaaagtacamccaagaatagagcttttagcaggtatgtatattacaactgacaaccaagaaaactattatattagaaaagtgggtgataaaataatagaaaggctttcagaataatgaacacacattctgtcctagttgtgctttattttatcacagattctagtttaaaaacaaaacattaaaatatggtttgcatcttayttctgcttaaacctggatgcagcactccacttgcgatgaataaaaatggaccataacctcataaaaattgaatttgtaagataaaactttttccttatatgagaaaatttatttaattgaacactaaagttccgcatctcatgactatttatctatgtaaactgagtctcaatatttttaaaagctattttagacttgaggttgtggatattgtttcatggagaaayattacatatatgtcaatttacagtacatttcagtacttcagtatggaagtagtctcttaatcacagtgattgtttctgatcttttaaaaccacaggcacataaatggcaatttgatgctgtctcaccaataatgagtatgggcatctgtatcataactcagtatctcatgtcacttctcaggagaaggaaattgtatatgtgtgtgtgtgtgcgtgcacatgcacacacatgtatgtttatacacatttatatgtacactatatatatgtaggtatatatatatgtacacacacacatatatactatattttcatgctcaactatagtctcctctctaaaatatgttctctcttctacttgcttccatctttttataataaagtctgttgtggtatcttatgaaacttgcctcaccgcactaccaatttctcagtagccaattctgagtttgcgttcactttcaggcattttatctgccttgctctgagaggtattattaatcacatcctgttgctaggatacctgagaatgttcatttatgtctgatgtttctttggcaaaatgcactatgaagaaggcatagaatcatgacaatgaaaattactgtgcacatgctacttattaaaaaagggaggaagagcataaccaccagataatataatgctaactgccatgaattttttaatatcgtttttgtttcacctagattttaaaggaaaaaaaactcgcaatatttttggataatgagaatctgtagtgcttctatacttccgagttaactagaaaaagtggaaggtggtagggttttggttctgttcatttcatagggatttaagagaggaaggagcttgaaatgcttcaaatgcttcctttacagacagggtaactaggttatagtgctagttgatttgcagggycagacctaaaacccaggtcaccactattgccatgtttagctattttaatgcaagattttttagaaaagtgggatgtggaattggacaataatagtaaaaaaatgcctttatcaatatattaaaataatttcaaaattagtgctgtcttgggtgctagtacaccaaaaattcctgcttattggttgtcatgagagaatatggatacataaaatccacctcaatgcaagattttcttagtcaatttcttcctacaggaaatagcatgatataacaaaaggaacacggatttggagttcgatggactaacttctcatcctacccagggatgcttstgagccatgtaatctgggaatgaggtcttgagtaccttctcattacatgtgctttttsttctcacctcttctctctttcgtgtgtgtgtgtgtgtgtgtgtgtgtatacacaagatacgtttggcatatccataagccatatataatcagtctctaggttttaaaagttgcaggaataaattatttaaaaaaattttctgcagactagctttttattagtcaattattgtttatcaaattatttgtttgaatgaaacaatttttttaacttataattatctaaccacaatgtttcaggartaagatacttgaaagatcttgcaattttctttttatcaggtaagtatttatttagtacctactatgagttgggcattctattgacacttaaatatttcatttaattttcccagtaaatgactttcattttctgatggtgaaggcaggctcagaatcttttttcacatgcacaaggttccagttagtgaatgtcagaactggaatatgaatccagagatttttaccttttctgtgctttttagctgtggtgattaaggacaattttgtagagtggtgaaaactttgagttgtagctctaccacttgatcactgtgggctgtgggcacctcattttaatctaaggtgaattgtttttttctggaaatgggagtaatacaagtacctacttcacagggtcactgtgaagattaaataaaatgatgtgtttaataataatctctacatgttttgagtgcataacacaacaatatttataatgctctcaccttggtgcctgggacatagcaaatagtacattgctaggtgctcctctttataagtattctgtatcaggttgtccttaatagcatataataattctttatatccttaaggtcgatgacttccattatgaatattatamagttgagactttgggagttttctgatatgtttacatcacctccctctcttcccttctttttgtttccaaggaaaaaggggcttcccattttagtggattccctttctctcatcctcatgtcctaactcttttcaaatacaaattagtttgatgaaaaccaaatttacatgtcaaaattctccccagttatgagctaagatcatatgattttaggatgcaggctttatggcttaaattcctattcacattttggagtggccaccaactgtggactgycaatagtctaatgtggtctgaagagaaagggagagctgctctagaaatcagasacctccctgccagaacttgttctcttccacaattggtagtagaatcttgaacaagtaacttggctcttgcaagattcaatggtctattcatttagataggtaaatgctatctttcaataattccaaaagaaattatgcaaacagggatgtgaaaggattttatgtactacattgtaagaggaggaacagagaagtttaactgggccaatttgaaaaccaactggtctgtagaagtctacataaaactgyagaaactgcatagcttctgtgtggtcaatggtataaaagaatgaggagtttattttataatttatggctggattcatgctgctgattaaacaccagcctccgcmgacattgaggatagcctctatatggctgtgaatcctctctgccctcctgcaggtttagataaactccacttgctcctgtctgtttctatttgcttagttgatatgttgctaggacgcttaggcaaagagagccattatgagcacagcgagtactgtgagctccagacagtgtgtactgagatacaaaaactggcccttcagaaacatatcgatacagatagatctgggcttctgaggtcggccatctgccttggcagggctgactctccatctgcactccccagccctggggtctgccatcccgcatagcgtggagaaagcttgagaaggactgaatgctcaaagatttgcaggcggctgacctctctgtaaagaaatagtaaaatcagtatgagaaacaacagttttaggttgtcttggaaattcccaagtacaaaatttcttcccactgagatctacccgacaagcaygtaattaatgtgacaaacaacagcccctttcagattcccaacattggtctggctgaattaaatcttagagtaaaccttttgatattcaggatctcattctgaggcagtcatttcttggcagagaagatttttggaagacctttagaggttgaagtcagactggcaatagtaaatacctaattattgccaggttttaaatagctttgcaaaataggaatrctagtcttaattgcgtaagctgcagctactgactaaaggagggatgtgagcatttgtactttcctctgagcattgaacgtgtttctagtaagttaggtgtgagtagtcacttttaaataatataatattctaagtgtctttggtgtgtttattatattgagaaaaactggaatgaattattttgtaaaatgacaaatcttttcataatgtttattcactcctgtgctagaaaaaaatgataacacattaagagttagagtttaattcccttcccctcgaatctctgcaggcctagtaacttgcttaccyagtcggatacagcagaaatgatgtttttccaatccctaagcttaggccttgagcatcaggcagcttctactttccatctttaaaaacgtgctccagacaccatgtaagaaatcagacaaccctaagaccaccatgctgtaaggaagctctagctaaccacacatggaggccacatggaaagagagctgcctgaacagtatgtgaccagctcccaggtgttccagccatcccaacccagggaccagatacgtgggtcaagaaaccattttagaaggagattttccagctctagtcacctcagcaaacgccatgtggatttgagacaaactgccctgccagacttttcccaaatccctaagccacaaaactgcaagcaaaatatcatttttatatcattaggttttgtcatacttggttacacaggaatagtcaaaacaacgcttttctttttttcataatgagaatatttattgacatacatatcaatatatattgatattttttttcctttgaagcagggctcacctagattccttctttcctaagagggtttgttcaatatacctataaatatgttctattattcagcattttagcatctaaaattaytccttttcatgaaaaaagaataaagcctgttattaggagtgcagttaaagcacaatttctatagattactacatattttgttttattagagwkttacaattttaccctgtaaagtggagtaaaagtaaagtggagacttgccagtggtccagcacatcagaacttgtaaaccatcaattggggtacccatttgaaacaatgacattaaaatatgtatctaggcttcgaaaactytaccatatattgttagaattatgtagaaatcctctgaactgaaacactcaaaagattcaacacaatttatggtaaatartttaaaatagtcttattttccctgggtagatttacttctaaaggatcaattagtggaatctatattgaattaagagttttaatattatttagagttaattttctgtatgaaggcaacaacrggaagcatttcattaggaaaggtaatgatatgagtccaaacagaatctatgcttgtgaagtctgagtttgttcacttkaaatagcaatttatgtggctaatgaacacacaatcctgcctagattttcatctgggggaaacaaggacatttcattgctctttttccccacactcttaatcatcatctcattagcttgtggagaaaactggtggaggccagaggtgagctttattttcttctttgagatgtcagtacaggttttaatcccgctagccccaagtttttccttttttatcttgaaaatatcctcttcacactcatcttttccttcacattgacccacgtcaaaggtttgggcctcagacattcagggaagccgatatttcatggatagaaggaagaaaacatgaaaagtatgtttagatcagtggatattgattaattgctttcaggcctttacaggctactttgtaagcttgtaaagactatcccccataaacttggttgaatggagtttactaggaaaattgttaattgtctagttcattttaggtgtagaagaggctccccacmacttgggcacttaggagaaaacaaccagagcacatcttgttgagtgtctattatgtgagagacagaaagataggtacttaatgtctgcaacgctattgtaaaaagtaaacaagaaattcacagtcaaggttcagggaggggccctagagaagaggctgtggactggtgcaactgctagggccttcaagtgggggctggaagtgggcctgtacctaataatagagacatggaggaagagacactccaggagtgaagagaaatattgtctgaatgcctaaggcaacaagctattttctggaaaaatcttttattagtgttcagtgtgaattgctgacttcagaaaaagcaagccaggcactggcacagtgcagctcaccagaagggcgggaagtagggtactccagggagtgggtgcgggtgagctccaggaaggagagtgggaatgttgaaaagagggtcccaactagatgcagtcactgagagctaagatttgcacaagactaagaatttggcattgtcagggaagggcagtaactttctagctttatttactgtgaaaaacacaactgagtgcctgtccacagtccattctcctctttttctactctggtacccaaccctcttctcacatgacatgcataaaacatgtaaactaatcatcgtggtccccatctcccttagtttaggtggtcatttgacatttctggctaatgacatgtacatttatttatttagagatgaggtctcactatgttgagcaggctaaactcaaattcctgggctcaagcaatcttcctgcctcagcctcccaagtagctgggattacaggcatgtgccatcacatccagctataggtgagatgaattctgttgaagaacttcattaaaagatttttcttgccaataaaaagacacgcatgggagaaaccatctccttttctttcagtgcatgttgtcacatctgggcatgatgactggttcttgacctacactggttcttgaggagagtaaagatcacctggtggccacaagcagatcatctggaggyaaaactccttatctgaggacaaaaycaactcacttcaagaatgactgaggggaacacaccccaaggatgaagtcaccaagcctctgaattaatgcaccacgggaccaccctgcatcaggttttcttgttatgtgttatttmacctttttgggtataagttcaagtttttggtyacktgtagctgaaagcatacacaagccaactacaaaaataatattcaatgctaaatacactaggaataawatctaaaggaaagagcattgcctttaagacagttccaaaaattgtaggcgtgagactcttccccagccaggcactgtactttagaggatcttctcttgctctctttcacacacatcactttcacagaaggtgaggagggcccaggtgtctgtatatggcatccacacctttcmtagaccatgcactgagtacctgggatgccagaattctctgacctaactctgcccagatcagatctstggaggaggggaccagattgcatcattggtgtgtaggctccaaggcccgaggagtgttcaaaggattcctggggctttgatgtgtgtatcaatggccccagtgcacgtgcatgaggccccttgcaatgctggagggactgtgatgaaggcagaaagaaaaggggacctacacttgttctcgatgagagcaaagatcacctggtggccaycaagcaggtcatctagaggcaaaactccttatctgaggaattcagaagtaattagacttctagaatttctatacatttctggaatgcaagcatgtcgaaacccattgtacaacctttgccgacataaaggcaccaaawcatccacaaatgttaatcatttctcatgaccaatgtgaytaatatggtccaaatcacccttcagctcctgcgttaagtccacaaatacccctacggaagatccaactgggcacactcagtcctctcttactgaagctgcactctgctgcagcgttcctcctatctaataaaacattcctcttcaaacttatactgttgtttggtcaattctttttttttattattatactttaagttctagggtacatatgcacaatgtgcaggtttgttacatgtgtatacatgtgccatgttggtgtgctgcacccattaacttgtcatttacattaggtatatctcctaatgctatccctcccacctccccccaccccatgacaggcactggtgtgtgatgttccccttcctttgtccaagtgttctcattgttcaattcccacctatgagtgagaacacgtggtgtttggttttctctccttgcgatagtttgctgagaatgatggtttccagcttcatccatgtccccacaaaggacatgaactcatccttttttctggctgcatagtattccatggtgtatatgtgccacattttcttatccagtctatcattgttggacatttgggttggttccaagtctttcctattgtgaatagtgctgcaataaacacacgtatgcatgtgtctttatagcagcatgatttataatcctttgggtatatacccagtaatgggatggctgggtcaaatggtatttctagttctagatccttgaggaatcgccacactgtcttccacaatggttgaactagtttacagtcccaccaacagtgtaaaagtgttcctatttctccacatcctctccaacacctgttgtttcctgactttttaatgatcgccattctaactggtgtgagttgctatctcattgtggttttgatttgcatttctctgatggccagtaatgatgagtcaattctttttactgccgggagccaaccactctttgctgccagggctctgacacctcacctggtagttctcttgcctcaggcccagcaattacaggggcaggtgtgtcatgacaaaacaccaagggtagttcctgggagaaggcacagagatgactagcacacatgcattgtctcactggattctcagctcagtcccaggggaaagaagggggaaatattttgtccatagcttgtaaataagaaatagagactcagagaggtaaacttgcccaagattacccagtaaacattagattctggattagaatccagggctttcacaaatcacactgtttaccacatatgctccctcatatwtttgtgatactggkctaatttatgtacaaaactgagagacacaaattgatttaaactatccttttgatttatacagtctccagtttcctatctcaaacacacctagcaaagcttatcctaaggagataaaatacaaataaattaaatacaagtatctttataaatgatcatcatcaaatttattgtacattttaaaaattgaagaaattctttttaaaaatcctatactggtgtgaagtaaataaagtgggatggagttagcctttcctcctagcattattttataggatacasacaatccactgtcatgtgtataaaatgttctctgaagtcttgtggaaatgggtcatttctattctttttcctttgttgtgcaaaatatgtaagtttttccttccataaaattatctgaactggctgcttacatagccccaatctgtcagtttgattttaaactcctcaattcactatttgctatagattttttttcaaaaaagttatgagattatttgcatattacatgtgtggttttttttaattgaagttttatccttcagttgagccagttgtattcaaatctgggtgagggtggtgggggtggtgaaggtgggaggccacgagggctgtaaattttgtagtattgtgttccatcttaatggggtggctctggaaggaggagaagccaatcccaaatgtgcacaatccaattatatttccagggacatctaacaggtatcctccagaatcctgaatacctatgggctatatacagagactttttttttaagctctgttgtgacactgctagatattatgggtaaagaaaaatcaggcctgagtatgaataggctggctgatcttagttcttaacaagctcattggaaaccctgggmaagtgataatagatagagaaaagagtaatttcaaaaggtgaagaaaaatgttacaaaattcagatcacacatttgtaatacctaagccttacagcgaaaaaaaaaaaatcagcttgtgggctctgccaacattttcctggagccagcatgatggggcccaggttgctgtctctggcttccaacaatatccacccatgcagacggcaccatgattaatacaagcagagcactctgttccgcacgcatcagagcagtgacatttttgcactggaaagtactatttgagctataagcaaaaatggcaaggctagcttcaactcaagacagttcgaactccagattttgttctaggcattcagatgatgccctcatggatggcggaactattcatttaaagaatcatggtgggtgcatttttccatttaaaaacatttgacagaattccatatgacaacataaacatttgaaagaaatgtggagtatacaggttccttctggtgagctgctcctgcctctggtgatgatacgctcttttgttctctggctagtccagagactttcacttaatcccatattcaataggacactgcttggggtgaggctggcacttcttggtacaggcttcaccctacaatgcacacacaatttgaaatagattgccagcagcccagggcaggagaggaagaggccaggcctgctgggctatttgtcatctcaaacatttcaagcatcacatgccacctctttagcagggcacacagggatctgtatcccctggcaagatgtttagttttggtgcatacaaataaggtctgtaatgtataaacttgaggggacagaaagaacagccgtcgcctgaagcttttcttcctgtgtgtaagtggcagaaaactcttccataaacatcttaatatttcatcttgaagactggataatgtcatgtaatggaattaaaatacatacatattaaggaagtctgctgggtaaagaacagctcacagccagctacatttagtcggactttggtctgctttcagaggaatgtaagaatcttcgaggtattttgtttttctccaattttggaaagccaagaattttagacctcatttttttaaaattctggaatcttttataaccactgtgtgcaaatagatagtattaaaaacacaaatgtaacaagaaggaaagtttgctatcaaaacaaaacaaatggcagccactttcttttgccttctaggggaggagcagaatgccatctccagaaaaaaaataattctttaggaaaattccctgattccttaaaaattcattttggttattcaagtgagactcctggtatagtccagttgggagagagtggagaaaaggaaaggtataatgaagtaagaggatttatagagtcgttcactgctttttttttttttttttttgagagagataaggtttaatgaccctgaaaatagtaagggagaaacgatataaaaagagaggcctcctctaggtgaatatataaatatggtagtcagttggatcctaaggaaggatacaatcaataagaaattccctttttaggaaacgaaaagaaaatacttggaaccatgataactactttcaatattaagttatttccaattctgcattatgttggaccccattctatcaatcttccaattaacaaaagtcactttggctttatagtgccatgtgagggtggcaaaagtttatggcccatcttggggttgatatacatcagagagtgtcttgttctaggaggtaaaacatggagtaggaacaagaatgtggcataagcagaaaatgaaacaggtgataaccggaagagcttattagcccccagtaaaggtggcatgtagagggcacaggacctcacagagggtggaaaaacagtccatttatttggatcttaaaaaatgggtacctcatgaagggtgggagacttttggatctgggcaacaaagtcaaaaggagaagaacttgctgcaacgcagctattacttatttgcatattttaagttttaattgctaggagttaacaaggtaaaatagcgagagggccagcatttggaccctctctcttccaggtgtagtaaagtgaccttggccagttgctgtcctctctggacttccatctcctcatgttcaaggtggaagcaataatactaaactgttaggcttattataaaagttaaaagaaatgctgaataaatgacaaatataaattcacaactcttaagttatagtaaaataaaaataactatgattctgttttttaaatttattttttagagtcagggtttccatttgttgcccaggttggcctcatattcctagcctcaagcaatccccttgccttagcctccctcccaaaagagttgggattataggcatgagccacaatactcagccaatatgattgttatacctgtcaggatgacactgacccccaaaggcctaaatcattcacatttcctacattaattatttaattaagtgccttaactagttggtgatattttagcatttataatttgacataaacctagttgtgtttttcattaattatacttcactatataacctaaattattttaacttcttacatgtatttatttggttcttgaaaagctagagtaaattctaaaaatatttactaaataggactcattaaacttataaataccatgacttctaggagagcacaaagttcagtaaatatctttgtcttactagtgattatttttaataaggccttacgtttctgtggtggtttctgtttcatgtgtgtgatctcttgattactctgatcttttttattaagatagaattatctatattccaaacattaaattccagtagtaggacccaattttctaattctactttcttgaaagtaaaatggtatggtaccatttattattgcaccacccaatcaatattttcatagttagaccaaagtttcagattcatatactaacctatgggaatgtcactagtggataacttggctggtaaactgcactgacacttcaccataaccgacttttttttttgaaaatcattcagttcaattttgtttagaagattaagcatctctttggagagcaaaacatctagatcaaaactgacactgcattaaatttacagggcgatgctttctggtttgctagttatgctttaataatattttgtggcaggaacaacacactgctgtctggcattttcattctccttagaaaaataaaaagaaagaaaaagaaaaaagtaaaataaataaataaataaataaagggctttcctgtaatagggtcaaaggattcaacgactaactcaattctgtcaattttaatggtgggatagtacccaaggtgtttctttttcatttatctatttttatcaagaagtggtttgttttgaggaggatttacagttctgctctcgtatcttcacttttctatgggcccatatgtactcttgcgtaaagcagctttttaaaaaggagtggttactgtgagttttagaatgttaaacctaatatattgagattgactgaatctgatggccctgatgattctaggaatgcctgtccagtttagtttattaagcccctgtgtccctctatcattttattgcagccacactagggcgtggtctggagaaagggtaccaaaactcaaagcagatatttaaaataatctgtgggaaaacaaagaagttataactattgcatatcatattactttgggagctgcttttgaatgatccattttcctctctcccatagagtccccaagactatctgaaacattcccttcctcaactttcactgtctgctcctctgtcttgcaaacctaaccatgcccctaaaagggaaaataaagtgcttactttatttgcttatattgataagaacctgtatatgttacagatactcgagtgggaattagagaaaataagaggaataaagagagatagagtaatyttgaaaactatgattgctcctctgtccttcccatttattaaattttatcataataggcacttttttattttaaaattttatttggtttttacttataccatatgtcctttttttcatactgactttacattttccttaagagttttgagctattcatttatttcttttatttctttgaacatttaagatgtacttgaggtcttttcattttcaggttctttgtttctagttcttggggtaaaaactaacttttgtgttatgtgtgctgatctcccttcaaataattcatatcaytatataagtttaaatctttgaattatccccagtgaaagatggcgataactctttgtgtacgttacatgtgtccttggctgtggaaatttttctagagtaatttgcatttgctcctgatgatatccaggtatttcatcaattttggaccatttattattttaacttaccaacatactactagggtagttgaatttgtaccctatattyattcacatagtatggaagtcagaggttcaagtttctttgggatgcctcattttattcttgtggcctttggcttacttgctagtgctgcatctctgggacaactgcaggtttcttccaggcccctttcacaaatgtggtcatgatttcacatcgtcatatgtatgaagcctgtggcctggatttctcttcaaacgtgatgtaagaatggaatcagctcctcctcacattttttactttgagctccttttcttttctaggacatgaaggttttctattgttgttttatggtgagtttgaaagcttttgttgtattttgcctgccattttatgtgtttggattcggggaagaaattccttcacatcagctcaggttgccaaattgcctggaaatccttgcttacttttctttaattatttttcccttccagtagattttaagctcttactatcaggagcagccaaaatgtaaagtggtgttagggttaaataagtaactgtagaatagataaagacatattaataaattgatttatgaaattggtacttttacttattgctaacttttggaccaccagttttcttatcatcctataataaaggctgtttatgttctctaatgtaccctatagttccttaatataattttgcagttataaaaagcaatgatcccacctgtgacatactctcttatctccgtttctgtggttcaataagcctgtgagacaattgcaaacatttctaagaatttcttttgtaagtcctcaacatgaaaaagtgagaaaatgtatgactgaaaaaaatcagaatgatagaaaatgttcccaaaaagccagtcttcttcctatactcatattaaatacaaagtcaacactccttcttcacaagcataaagtcttgatggattgcagatgccaaccattacacagatagcacaataaatctgctataaactactgaacatactctgmaatatctattgaaacataggggctatatgcactataactccagtttccaaattcctgctatattaattcattgtgacttttttgaatagacctgtcttctattgctacaaaatgaaaattaaacagatatgtgaaaaccgatttgggggctacctaaaytgaattgagcaccaccagacacaaattacagcaaaaggatactgttctaatttgaatcctagtaaaccaagcagcagcagtaaattagttggcatttgagccagaaagaggttcaaaatgaactgttttaagaacatgaattaaataatgcaggagaacatgggttaccattttagcaacagtgccttgaacacgttaaatgatttaaaaagcaataatttcataggaagataattggtatttaaatcaccctctatgccactgttcggcacataaaaagttaattccagaaaagattaggataatgcccattcaagaataaatcagataatggtggttgtcttatatttagaactttcttgtagctactatctgccctaagtttgacaattaacaatgatactagtaaatttatttttcagaggcatctaatataatgcactgggcttgggtcagcttcaggggctccacacttaatgctctttataaaattcttaataacatttgaaccagaggccctacatttttattttatactaagccttacaaattatacataatataattggctgactgggccaaatataataaggcttatctctatatctgttcaataggaagcataattttgatcatctttccaggcatgaaggtctgaaatggctctccattgcctaccaatgtcaaatagtagtaaatgtcaaaccttttagcctgccatttaatattttccatgatagggttccaatctatgtttccatatttagtttacatgatttcactcttgcatttatttaatgaagatgtgtttattgagacttaccatatgtcaggtactctaggtcccccactaagtgggaacaaaagaggtttgaccttgtcmtatgtcacccccctgttagaggtaaactatakaacttgccatttcccaaacactccttgctttttgttgtccttgcttttgccagttatgcaggtctactgctggtttgttctcaggtttattcacacccttatcctactttgctctgtgttagcagaagctaaattttccaagtttgcttgtgctttttggtaggtttggtcagtgctgggtattgatgaacctttggaggataaaaggaggggactagccagactctcctctgttgctgaccccccagtaccccacagggtcctgtggcctctccgtgggcctagttcccatgagtctccctctcctttcatggctccacctccctgtggccagcctctgccaactggcgctagtttctgggctctgagaatgatttccttccactatccttccaccctggtggcctcttggtcttgttcttcttggggtacctcgccatccactgttaggctcctcagctctctagcacctttgtaaccagagtagtttctctttctctaactggatcctgatcttctgaaatagtcttcctctttatctagccttccatcattgatacacatcagtatttcattcactcttcagggcacaagtttaatccaccttgttataaaggtttccttggcttcttccccagccctgaactataaaactggaaatgatctagacttaatatttgaaattccctaacagtttgcttatagttctcttgtgatatttaaaatgttctaactcattagataatgacttatgtaaatatatctgctgtccttgagcacagggacacactctagcataaatgagcaatcacacttataatgtgagatttatcctaagaaaatatttcactcaaagaaggtgctcaataaatatattgttgcattcctctaagtggtaaatattagactttttttctcaattcaaaaactttgttgtttcttttggagaaatcactaaaatatctgtattatcctcataaatacaktgttgagaaattagctgccaggacaaaatgaactgtgcattattcatataaaagtgacattattgctagaggacatacaaataatgagcaggcattaatataataacaaagggccttgggggggatccctattttcatgattccaagactgcatcaattatagacatcttcacaatgaattagtataaatagtctctcatcttcccctttttcctgctggtatatatctaatgtgatatattttattaccaattggccttctacatatttgctgtcttttctatttgacggtgatgctgttcctgcttaccattatgtataagtgtggctgttaggatgaatgttgactcaacagctttttccatattgcccggtgtgaagtttgttctttgattggactatagctgggcttttgagaggctgtgactgtttgtagctctagatcttaaactaatagtgagcttgtgaagtctctgctctgagaaaagttcttcctttgtggatttcaatgcaccagcctcatttccttgtgtctgccacttccttgcagtctgcaataaagctttgttgtttgaagccaggatgtagaatatccttaaagctttccttctggcataattgttggcatttccctcacttcaggatgctgtacaaccagggttgtcagcaacaatttcatgatttgttagctccagtggactcatgatgaacattgaagacagaccatctagttgccaaaaggcttttccttagcaacttcttggcaatatttacattgctgatgaaatgctttaagttagtaggggacataggatgtgccagaggtcgaagttgtaggcttgygtgtccacatgtgtgacctgtaactaagttgacactctgccttacacagagaccagttctccttggccagatgtgcagcctcacttggacccaaacctgatgagatccagaaaatcaggtcagatcatcctgacagatagcttctttcctaacagatacaaaaggctttgttgctccagtaatccaagccttggcagaagactttttagtccagtttatggctttaaagtaactgctagaaktaatggaagcatagaagtatgccttattaagacttattggtccagtaggggcttctctttctgtttgagaagtacaatccaactctgggtagatccttgcaactcaaagtatgggggacaagccgcagtatgatyaccaggaactcattagttatgaagagtctcaggttacatttcaggatctaccaaatcagaatctggacttcagcaagacttcagtagtttgtttgcccgctgaaatttgagaagcrttgggctaaatcaccaagtgactagagcagaatcagcaccagggcatcctctaattggcaatgggaattttgtacttgtaggtgaatatgtagctggatgaagaagctggaattcacactggtctgcctcacaatgttctgagaactccaaccactatgacgtgcaaggccacagtggcttggaagagcagagcgtatgttctggaggggcattgctatgactgcttaacctaatgtagttatcccgttggaatgctggcctggctgaggcattttctaggatctcctaaggagacaacccaggataagaatgatgccactgctgggataacaagttaagctggtgcaytggtagcgcccagctgatgggggtggggggtgggggtgggcagcgcaggtgctgggtcaaagtggggaagtgaaacccttagactgagtagcccagactgtaaaacactatgtgacacactgaggtgacatcagcagcaagtatatagtcaggaatgggtaaacctgcagtgtgaccagaggsaagatggcatagcctagacaggaaggttcctaggggtaatggagaggggtcatcgaggggctgatgctgagaggctgctgcaggaaggagagtcaaggtcgccattccatgagattgacgtattcagtagccactcctgctgcactctctgtggttcccctactcccccgcaaccccctgcaagaagctatttgtggcttctgacattcagtacctctttaaacagtattttgcttactttttgtgactatttatatatatatactgactatatatagtcacaaatatatatattatataaagtagcagcattacattttctgtctctttgggttcacatttattatttcatcttttcttattttttgtaatcttagttgcaccctacaactctatgaggaggtgcaggcatcattcatctttgataagtagcaacaaagcaataactgagacacagaacaacatgtcttacctaaagcagcatatatttggcaacaaagttaagaacagaacaaagaaattcatattttatcctagcacatttgaatatgacaactagctgtttaccatgcacttcaaatgtgtgaaactttatgagactaacatccttaagttacaaagcatggaagcaactttctcccaagggatatgttattttcaaaactgtgatttattttggccagcttagcatgaaggatctctcgtcaaattcattttcttttcttctttattatttaccccaaatatctgaatccacatgaataccatctatggagtaactgacatagtctttaatgactggtatgagttttcaaacaaaaacaaaactataaaaatgtttcaagttaatgagagtgcctttaaaattattagcatttaaaaaatagcctaggggtaaaaggtttgtgtgtttatagagttaaataaaatggaatctactaaagttatccttcccccrtctgtcaaattttgactttctctaggaaatgaggatgacaaagcattcccatcctcctgactacctgtcttcccctactccaagtcctggcattgacataaagccatcagcctgtctagggttgcgggggtttgatgttggtattctatttatataaaacacatgatatttcctagctttgcaaaattaacaaagcttatactttattttttaattattggtgaggttaggagagtatgtcaatatgttacatttatatgtaatcttaataaaaataaataatattaacttatatataattataaaatatacattataattatataaatatatgatatatagtttatgtatatctatatatctaatatataaattttatattttatatattgaaaggacaataacttataagatttaacatctatagtatatagtcaccaaataggaaaaatataatgctttaaagaaaatgtttttccactatgtttttcttttttttatgtgtaaaagctrggaaatagagactgtagatcactgataaagaaaaatgaaacactcctaaattggtgcagccattgcctctttgactagcgtatattgcagctcttatgagagggttttgggggttgctttttttktttgttttttttgttttttgttttttttttggctgayacatttcattagttgcaaggagctccagtggtgggttgatatttgtcacgctcagtttacaaacttttccaaccagatagcaaacatactaaatttccactgcttaagaaagcaaagtactcaagatacacacaaacacacacacacaaagagggggacagagaagaaaaaagaaagccttgttttcagatagataccaaagaaggaaaaataaaacaaattctaggctgccaactggtcttatctgaaagtatcattcattctttcctaggttctgattcagtgttgagaaaatacattctgactccaagtagtctgacattcttacaaaattaactttatccacttgtaggtggaattcatgtgaacacagtttattggatcataataacacataatattagactgtaccagaaacactttgtttttaacaaaacttaaaaatctcatttgccagcatcaattacctacaatgaagtatctcttccacacacatactcccagatgtgcaaaacttcttacatctcctattagacatggaaaacattcactcttctcgtatgtactgtgtaagaatgactaaaattgattacacaacacctaaatatttaaaaaaaatctgccagatttagggatattttaatggcacctaaaagactgtcatgaatgccaggatccatggagcaaattattaaactctaggagctcaaaacattttaacacctgtgtgatccccatacccccttgatccaggttgtgataaagatgtgaagtgcacagagctgaaacccgagtagmcattggaggctgtcctgccatggtaacataatttactgtgtcattaccattgttatcgcatcctccgcttcaaagcacatggtatccaggtgataaattactgaatctgacatttctyaatattcataaagtactttgataaaaagaacttggtttccttatctaaatgtgcaatttcaagacaataggctctctgaagaggattaaattcctgagagtttagttaaatgagagataattagaaattttaggctctttctgatatgggacaattccagaagcagtagcagtaactctatcctgtttawtttaatttaaaggactgacttgttattaatgaatgtgtgtgtgtaagtgtatgtgtgtagtattggtccattttagtaggttcagtttttttctaggtcactaagtttccacttaaaacttattttcaaaggagaaactctttagaattcttggaacactttggtgcctgaccagtaagcaaatcctggtataggtgtgggccagtgtggcaagtgagagccaaaggagttcagaatgaaattccacagtccrtgagcctatacttccctaccaactcctattgacagcagctaggttttcattagtgtatacccgaatgagtccagaacagaccattctatccacagcttacacgagggactcctggttttcctctgcataaccttgaggtcttgcaacttaaattcagcatatgaatcctctgtgtaagctttgaatcctatgcatctctcctcatccaccatcaggccaataaagtgtttgacagaaagcttaggacagaggttgttccatattatctgcacatgatgggaaaaggagacgaggctacatgtccaatgaggggaaaggagctgaagggggagaataatcaatcatttaaccacacatttagctctttagagaggtgatctgtcaaatggactcgagaggctttcatacaaggcataactgcaaaaattgatcagggagttctcactctactagaaaaggcagtccatctatattttatactgtgttcttataatgtgcataaaattctgaatttatagcttcacatggttcatttaacccaccaagatagagtttattgactctgtgtggaaactttggaacaatttttgttatagtcattggtggtgctagtgggtttttctttctttttctttactaatgtttagagtcaatcacgttgatagaagaaaacaattataattttaattagaacataaatgaaaatcaaggaaaattccaaatggctaaaattttagtttgaatacccttcaaattctcttggaatgtcttaagctagtgactaaatgtttagactttaatatacttgcatatattttattctacagtttttcttttctgtattttcacttagtgtcccccaaaatggtagaaatgcattggtgagaaagaaaaataccctttatatctgaatcttccatagcactcagtgcagtgcttaataaaaccttgttaaatcagagtcttgaaaaaaagattctgtttcctaatagagaaatattgtgggggagggagcctctttctggatgtgtttttgcaactaagaaataaacttctttcgggaatgtgggggaatgatgaagtgatttcatctctatgaattctgtatatctttttatctacacctctgaaatgtaatactgtgaggaaaacttataacttgccaattattagtaggtaaataatgtatcttgctcatataaagacagaaaaatatacraattgtattaatttgttctcacactgctataaagacataaccgagactgggtaatctataaagaaaagaggtttaattggctcgyagcctgtgggctgtacaggcttctgtttttggggaggcctcaggaaacttacaatcatggaggaaggtgaaggggaagcaagcatgtttccatggcaggggcaagaaaaagagagcatgaagggggaggtgccacacactttcaaacactagatcttgtgagaactctatcacaacaacagcaagggggaagtctgaccccatggtccaatcacctcccaccaggtccctcctccaacamtgagaattacaatttgacttgagatttgggtggggacacagaatcaaaccatatcaaacatggtaraaggaattcattattttatccattattgtttctctaagagagaaacagggtaacagagtgtgacatacagccagcctgcatgctaacacatgagtgaagcccatctattcccaactgaggttcattatgagcattttctaagtatcaccatgaccagctctagtccctctataaaatgcttcacattgaaatgtatagtcagttcctgttattcatggtagtttggttctacaaagcctctgcaaacactgaattaatgaatactgaaccattgcgcttaggggaagtatatacatgtgtatgtaaagtatatatatatatatctctctcacatatattataatcttaaaccttaaaaacatcttaaaaacaaggttgtcctggtagatactattttattacacaagaaaaaacaaggttcaatggtgttatgtgacttgcctgaggcttccccactaacagggatcagagatgggactcaagctgtccagatggccccagagcagagtcttcttgcactacattggactgtctcttccatctccatcctcttgtcatctctgtataaagagctgaaaaagggtggcagagcgtggccttctttagcctcagctaggaatgtacacagttggacaacacaaatttttgccactctgcacacatccacttttgaccatcaaagtgccataaatattgattttggggttacatataaggttttgtgagtaggtgaatttgcagatatagaattcattaatgaggtttactgtatttgtaaatctcacattagcagtcatttatggttaggaccaaatactgagtacctcagttcctaaagccatgagcaatgtcctgtgcatgcttggggtcccacaggtatttgtctccatcatcagcttgtggcaatgagtgggcgtactctgaagccctcctatgctctaataatggcagaactgtttatackataaaccatatttcatcctcattgtccaccaatatttactaaaagggattatggactttcttctttgaaaatactgggaagcttgygatgcacattacatactgtctttttactctaaattatggagctagtaaaagataaatggaggatgatattttatggaaatttgagtgaaaattcacagattgtgataattacacccagtcagattttcttggaattgtgttataaagtataggatatcattagttcaataatgtgactctaaaatcacaatatctagaatttctcttcactattttaaaaatcctctttgatgatataatattttctatttttttttactttatcaaattagcacaatctagtggttgttacattaaggattccctgcataaattttaaaaaaatttatatctgccatcctaataccatatagacgaaaaagtttaaaaatcatgtcacaaacctataaaacatttatgaatattaaacatcatattagttttctattacttctgtaacagacaatcacaaacagtggcttaaaatagcrcagatgtattattctacagcccggagatcgggagtctaccgtgagtgggcagggttgtgctgcttctggaggttcgcagggagactctgtccaccccggccttctgcagcttctagaggcggcctatattctctggctcacaaccctcttaaaatttggctatcccactgctctcacttgtgcttttcattctcacatctctttggattctgacccttgtgatgacatggagtccacctaggtaattcaaaataatctccccatctggggtcctttgcttaatcacatctgcaaagccctttttcccatgtaaggttacagagtcacaggttctgggggttagattgtggatatctttgggagcccttattcagcctaccacaaatgtataattggtccaagttctatagagagttcaaagataattgatgcatggtccttgcccttaaaacctgtaatctakgcaggagctggcaaatactaaaatgaccataaaacaaggtagaggaactttcatgtcatatgggagttcagaaaagaaagagatgggtcattaactgaccaaaaaatggttcaacctgcgtatctccacaaggcaatatatgcctttgttcatacttgtctctcatctggaaatgccatttcctcctcttctacttggttaactcttacttagcctttaaaattcaagtcatttcttttaggacatgctcctggatgcccaagcagagacggtaatttcgtcacattgtttttgaaaaatagcttatgtatatctctcattagaaagaatgcttgtcttctataaaactcttccaacttttttaaaattttacttttgtattctttggcacctcatgctgagttgcatataataggcattcagtgaatacttgatgagtgagttaatgtgggtaggcactgtgtaaagaaggcataggtggccaaatgtgtaatttggtgtgttgaggatgtcctgcagagtggaaaagtgagccacacactggaactaggggcaagtaggtcttttcaactaactagttatcagggagatctggaaagaagatgggagaaatggcagaatgcagctcaactgtcaagcctgggtaaccaggcaaatggtcatgtctttaacagaaatgaaacataaatacccaagggaatggcaggtagtaaagaagtgatctatgtttcactttaggctccatgaatctgaagaatttaaggcaacagctcactgacatgaccaagaagaaatggaatttagaagaaaaatcagagttatgtttgaggctagtttccctaggagtgatagtacaagccatagggatggcttaaaggaagaggtagacaaaaagagaaaaagagaagataaaaacatctggggcagaatgttggtgaatatattcagagggaccctaggtgggggcactttttaaagaatcagttccagcctagccaacacaacaagacctcatctctactaacaattagaaaaaacagtttgctgggcatggtggtagctgcctgtagtcccagctacccagctactcaggaagctaaggtgggatcatttgagcccaggtgttcaagactccagtgaacaatgatggtaccactgcactctagccttggtgacagagtgagaccctgactcaaaaaaacaaaaaagaagaaaagaaaagaaaaaagaatcaacatcagacgaaggctgcagcagtttttctcagatgatggtttctctgattgcaggagaacaggaaaagtgctcccctctctgagctgctagacagcagaaagcagtgcacctaccttacattattgttctttgagtatggaacttgtctcccatcccaaccctcctagatgatatatttcttgagggtggaggctttgtctttttatatttacgtttcctgggtgttgaactcacctctttacatttagtatatttattaatcaatggagtaataaatgaaagagtcagatgttgtgatatttctttatttcataatatatccagtttctcctaaagtttgccttaaggtcctggaatgaaaaaaatgttacaaagcagcttaaaaatactgggcatagccagaagctcaaagcacaccttgtgttaattctatcttgtttgcaaagtggaactgcctgaaaatagtcagaatcctgctgaactaaaacttcctgctacatgatactccttaggttcaagtaaaggacagaggcctgcacttaattaaaaatataaacccaagctttctatctccaagatgagacttaattctaaagtcacctgcgacatgtttatcagccagtctgactaaatgtttcccctgagggtaagtggtacctaagatactagaaatgtagccctaacaaaagatccaccaagttcccctaaaagtgtacctaagaaacatattaagtacaaatgcatcccataagacaagatttcaaaagactcaggacaaaggacatccacatatgtgaagttatttagataatgaaaatttgctttttagtactgtcaaaataacagatatttgagaaattcatcacaatgttcatattttatacttaagcataaaagaaattataatatactaacttcaatgagttttcctactatcagataattctcagatttagtattgatttatctaaagaacaatgttatatggaaaaacatacaatgtacagattatgtttctaccacacccaagtaagtacaaactccttataatgctgtgtcccacaagtgagttttatgacaatgaccatccacctggcccatcaatctttttaggggcttctcccatcctcagtgtagcactcaccttgcctcaacactgtgcacaacaaaaataaaaaataaaattaatgactgaattacactgttcaggaactgggattaatttatcaaaccaaggcaatttctaagtaaaactcttgggcaaaaatttcaaaagcttctcacagttggtttccactgtcatttacttgaagttttatcaatacacaagaaaaagatataactttgtgcatttttctacctgagagagtgaggtgacagtataagaggaacccactaagcctttgatacgtccagctgaaagggcactcaagcacaagaaaattttctctaaatgcttacttggtgtgctacgtgcaatttgttaggtttaaatccctatagcaatcaggagattttcacaaatcttttagcaaatagatatttttcagggtaagacaacatcatgtttctttggtaggtgtgttggatcttatgttagacaggttattaaagtacagggtattgctcatttcaacccaaatgatgaaggatccacaaagaaatatataatccatgtgaagagayagccgtaaggaaaggtaatacatttaatctgaagaatggtatgtatatataagtagatagatggatatagatatacaggtaaatacgcacactcatcaactcctatttaactcacattaagcttgcttaaataggcattggaagggaggcaatgcagcgttctttctaattaccacttattctcatatgtacaattgtgaagggcttattattaattactaaaatttaatatgaattatactttatgttgccattaattgtttaaggcacattctgcaggagatccaaatccattaaaactttgggtgggatgaaaattttacttttgtattacaaggctgatgttctttaacatatgatttgattgcctctgaacatgtcttttcataagataaatttaaaatgttaattttcccctgcatggtataaaaataggcctcatagcaaaacagaccaatttgctaaatgactaatttatccaaagccaattcactacaaaccaatttgtcaaatgaccaatttgccattttatccaacatttttttcagtgttaatttcatcatgtcttccctgcttccttttccactgacttattccaaattgggtgaatattcatttggcatgtttcaaaatgcagatgcctagaactcttggaacatctgcttctagtcttctcatgggccccattccatctgggttcttatgtctacccttgtctctgtctgtgacaacatatcctgggtcttgtttaaaatatttgtataacagtttaacatgagggaaagttgaattttattgaaagccctttctrtatctattgagataatcatgtagtctgtggttttagttctgtttgtgtgatgaatcatatttattgatttgtggatgttgaactaactttgcatcccaagaataaaacctacttgattgtggtggattagctttttgatgtgctgctagatttggtttggtagtattttgttgaggatttttgtatctatgttcatcagggatattggcccaaagttgcttttytttttttgcttgtgtctctgccagattttggtatcagaatgatgctggcatcatataaagagttagagaggagttcctcctcttcaattttttggaataatttcagtatggttggtaccagctcttctttatatatctggtagaatttggctatgaatccacctggtctagggctttttctggtcggtaggcatttttatcactgattcaatttcagaactcattattggtctgtccagggtttcaattttttcttggttcaatcttgggagtttgtatgtttctaggaatttattcatttcttgtaggttttctagtttgagctcatagtggtgttcataacactcgctgggttttttttttttttatttctgtggggttgctggkaatgccccctttgttgcttctgattgtgtttgtttcagtcttctctctttattctttatcagtctagttagtgatctaccaatcttatctattctttcaaaaaaacaatttttggtctcattgatcttttgtatggtttttttggtctcaattttgtttagttcagctctaattttggttatttcttttcttctgctagctttggggttgatttgctcttgtttttgtattcccacatcccatgtgatattaggttgttaatttgagacctttctaactttttgatgtgggcttttactgttatagattttcctcttaacactgctttagctgtgtccagagatactagtatgctgtatctctgttttagtttcaaagaatttcttgatttctgccttaatttcatttatttacccaaaagtcaatcaggagcaggttgtttaatttccatgaaattatatggtttggagagatcttattattaatttctatttttattgcactgtggtgtgagagtatggttggtacgattttggttcttatcttattgggaattgctttatggacaagcatgtggtcagttttagagtatatgccatgtgcagacgagaagaatgtatattctgttattgttgggtggagtgttctgtagatgtctgttgcacctatcatatccaagaagaaaacctaggaaataccattttggacataggccctggcaaagagtttatgataatgactccaaaagtaatggcaacaaaataaaaaactgacaagtgggacctaattaaactaaagagcttctgcacagcaaaataaatgattaacagagaaagcagacaacctacagaatggaagaaaatatttgcaaactatgcatccaacaaaggtttactatccagaatctataaggaacttaaacaaatcgacaaccaaaaaacaaataactctgttataaagtaggcaaaagacatgaacagacacttctcaaaagaagacacacaagtggtcaataaacatgagaaaatgctcaaaatcactaatcatcagagacttgcaaatcaaaaccacaatgagatgccatctgacaccagccagaatagctattaccaaaaaatctaaaaacaacagatgttggcaaggttgtggagaaaaaggaacatttatacattcctggtaggaatgtaaattagttcaaccactgttgaaaaaatttggaaacttctcaaaaaacttaaaacagaactaccatttgacccagcatttcagttaataggtatatacccaaaggaatataaattcttctaccataaagacacatgcatgtgtatgttcattgcagtactgttcacactagcaaagacatgaaattaacctagatgcccatcaatggtggactggataaagaaaatgtggtgtatatatagcatggaatactacacagtcataaaagagaacaaaacctgtcttttgcagcaacatggatggtactagaggccattaacctaagcaagttaatgcaggaacagaaaaccaaatactgcatgttctcacttataagtgggagctaaacactgagtacacatagacacaaagttgggaaccatagacacaggcctacttgagggtggagggtgagaggagggtaagagtctaaaaactacctatcgggtactgtgatcattgcctggatgatgaaatagcctgtacacaaaacctccatgacacacacccatgtaacaaacctgcacatgtaacccctgaacctaaaatgaaagttggaaagaaaaatatatatatttgtataacagttcaaagtgaatttttcttttgacaaattacaattcaagggactaaaaatttggtgagttggcctttgccaaaagtttggggatatttgttttctgcaaattgacttgcaatcctaaaactatccaagaaaatcaaagaataatactcattcctaattgagtatttcctttatatctggtacttcataagtatcatctcactgaattctgacagtaatcaaaagagttttctaacaggtaaggaaactgaagagtgaaataattaagtaacttgtctaaggtgacactgcttttaagtagcagaactaggacttgaatctagcttatttgattctacagcgggagtgcttaatatgaaactaaaacacaatctgaaagtgtttttaataaaggtgataattactttaaaaaaacacatacacataaaataatttttgatttttttctttggagaaagtgagtatactatatacactttcagagatttaaagccttaatgagtactcaactgaatcagagaagattctaacctgtttcttcaagggtctctataaagtaaggaagttgtcagactatgaggtgtggataatcttgcttaactgaaatgtggggctctaacatgaggtggtttctttaattttctaaaaaaaaataaatgaracagaaataagtaccctaaaacatgatttatgcacagcagaatggcttttatgtatagacatatgaagcaagaattgaagtgtgtgttatactgtcttgaaagtcaacctataaagacagtaggggctcctatgttttctactgtatgaatctaatcatataataataaaactacagaacacttattaggatatctgaaagttagcattcttgaattggactctattctctttcctagagccccttctaaaaatttatgtttattgacatcagaaatgtcagcatgaagatagtaggaaaagaagaaaaaaataatttaaaaggtgtcaggaagcatgtttctgtcttgtcatccctgttgacagtatctgtgactttcagtgctcatctggacccaacattagcagaaacactagcaaaaycacctttctaactgagcttcttcgcccttttattgagtctctttgcccttttggatggtttccaactgtagattgcagtaaattattcaatcattcattttttctccctaatatgtactgagtacctccttttaataaggaaagtgtaccaggcatatttcaccttaacattgtactagatcctgttttgcaaatttgtaacaattgaaatacacagaactataactcatggtgactatattttcatacatacttgcctctgagacctcactaaatcagttggaacactatcccacaatgaattgggggattaaactataagtatctaataaccttattagctaacaatagctaaccagatgaccttattagtgggctaacttccagaggaagctaatgtatacaacagtcccctagcgaatggcctttgtgaaaagggcatctgtaagggaaatgagagcttctcccgtacacttgttggtcctagacactgcccaaggtgatctgtgtgttaatgagcaatctcccaacaattttgggtattccaagaagatcatgttaaaaattcttcatcacttcaatttctcccacttgatgacttgtcaaaaagccaaacgctccttttcaaagactggaatttttggagacctatttgtgttctgtaagtacaatattacattataggctcccagtttatattagtgataattatcccaacattttagaatatgtaatatccaggattttgcagaatactctgcatatagttttggattcctcagtaaatgagaggggaatttacatacagccataggagaacaatgttagcaattaaaaggttggaaagacaggctttcctggcaaagataagggacacaaaactaccaagaaaagtcttctttatgttcccaataatttacacctttgtacctcacacattcaatttcccatgttactaatatacttagttacaagcatttgtactgcatttccaattattaacacttttttttttttttttgcttttttgagatggagtctcgctctgtcggcaggctggagtgcagtggcgcgatctcggctcactgcaacctctgcttccttggttcaagagattctcctgcctcagcctccccagtagctgggactacaggcacgtgccaccacacccagctaatttttgtatttttagtagagatggggtttcaccatgttggccagatgatctcgatctcttgacctcgtgatctgcccgcctcagcctcccaaagtgctgggattataggtgtgagccactgagcctggcctattatcactttttttaatgcctgtgtgctgggaaacttcccttagggatagacaaggactatctactcaagctgctagtaaatttaatgccatcttcgagatagatgcacagatttagggacatgctatggagaggagctgccagacagggtttcacataccagggacctggtttagaatcctcctacagaatgcccaggtcaatgaactggcagctctaacagtctgcccttcagaacctctgtaaacagagaggagaaaaggctacccttcagtcactgatcaaaaataaagtgtcatgatttgatttgatattaaaacatataagctaacagcctggttagttttccatagtttccaacttcacactattcgtaaaacttagaaccaatattccatgtaattgttaatgaagctctattttcttcctctttttctctttctttccttcatttttttttattatactttaagttctagcgtacatgtgcacaacgtgcaggtttgatacataggtatgtgccatgttggtttgctgcacccatcaactcatcatttacattaggtatttctcctaatgctatccctcccccagccccccaccccccgacatgccctggtgtgtgatgtttcacgccttgtgtccaagtgttctcattgttcaattcccagctatgggtgagaatgtgcggtgtttggttttcagtccttgtgatagtttgtggagaatgatggtttccagcttcatccatgtccctgcagaggacaagaactcatccttttttatggctgcatagtattccgtggtgtatatgtgccacattttcttaatccagtctatcattgatggacatttgggttggttccaagtctttgctattgtgaatagtgctgcaataaacatacatgtgcatatgtctttatagtagcatgatttataatcctttgggtatatacccagtaatgggattgctgagtcaaatggtaattctagacctagatccttgaggaattgccacactgtcttccacaatagttgaactagtttgcagtcccaccaacagtgtaaatgcgtccctatttctccacatcctctgcagcatctgttgtttcctgactttttttttttttttttttgagacagagtcttgctctgccgctcaggctggagtgcagtcacgcgatctgggctcagtgcaagctccgcctcccaggttcacgccgttctcctgcctcagcctccccagtagctgggactacaggtgcccaccaccacgcccggctaatttttttgtgtttttagtagagatggggttgcattgtgttagccagtatggtctcaatctcctgacctcttgatcctcctgcctcggcctcccacagtgctgggattacaggcgtgagccaccgcgcccagtgtttcctgactttttaatgattgccattctaactggtgtgagatggtatctcattgtggttttgatttgcatttctctgatggccagtgatgatgagcattttttcatgtgtctgttggctgcatagatatcttcttttgagaagtatctgttcatatactttgcccactttttgatggggttgttcgtttttttcttataaatttgcttgagttctttgtaggttctggatattagccctttgtcagatgggtagattgcagaaattttctcctattctctaggttgcctgttcactctgatggtagtttcttttgctgtgcagaagctctttagtttaattagataccatttgtccattttggcttctattgccattgcttttggtgttttagtcatgaagtccttgcccatgcctatgtcctgaatggtattgcctaggttttcttctagggtttttatggatttaggtctaacatttaagtctttaatccatcttgaaataattttttgtaaggtgtaaggaagggatccagtttcagctttctacatatggcaagccagttttcccagtaccatttattaaatagggaatcctttccccatttcttgtttttgtcaggtttgtcaaagatcagatggttgtagatgtgtggtgttatttctgaggcctctgttctgttccattggtctatatatctattttggtaccagtaccatgctgttttggttactgtagtcttgtattatagtttgaagtcaggtagcgtgatgcctccagctttgttctttttgcttaggattgtcttgcaatgcaggctcttttttggttccatatgaactttaatgtagtttttttccaaatctgtgaagaaagtcattgatagcttgatggggatggcgttgaatctataaattacttggggcagtgtggccattttcatgatattgattcttcctattcatgagcatggaatgttcttccatttgtttgtgtcctctttatttcattgagcagtggtttgtagttctccttgaagaggtccttcacgtcccttgtaagttggattcctaggtattttattctctttgtagcacttgtgaatgggagttcactcatgatttggctctctgtttgtctgttaatggtgtataggaatgcttgtaatttttgcacattgattttgtatcctgagactttgctgaagttgcttatcagcttaaggagattttgggctgagatgatggggttttctaaatatataatcatgtcatctgcaaacagggacaatttgacttcccgatttcctaatcgaataccctttatttcttcctcttgcctgattgccstggccagaatttccaacactatgttgaataggagtggtgagagagggcatctttgccttgtgctggttttcaaagggaatgcttccagtttttgcccattcagtatgatattggctgtgggtttgtcatagatagctcttattattttgagatatgttccatcaatacttagtttattgagagtttttagcatgaagggctgttgaattttgtcaaaggccttttctgcatctattgagataatcatgtggcttttgtcattgttcctgtttatatgatggattatgtttattgatttgcatatgttgaaccagctttgcattccagggatgaagccaacttgatcatagtggataagctttttgatgtgctgctggatttggtttgccagtattttattgaggattttcgcattgatgttcttcagggatattggtctgaaattctctttttttgttgtgtctctgccaggctttggtatcaggatgatgttggcttcataaaatgagtcagggaggattccctctttttctattgattggaatagtttcagagggaatggtaccagctccctttgtacctctggtagaattcagctatgaatctgtcgtcctggactttttttggttggtaggctactaattattgcctcaatttcagagcctgttatttgtctattcagagattcaacttcttcctggtttagtcttgggagggtgtatgtgtccaggaatttatccatttctcctagattttctagtttatttgcatagaggtgtttatagtattatctgatggtagtttgtatttctgtgggattggtggtgatatcccctttatgattttttgttgcatctatttgattcttctctgtttttttctttatcagtcttgctagtggtctaccaattttgttgatcttttcaaaaaaccagctcctggattcattgtttttttttgaagagttgtttgtgtctctatctctttcagttctgctctgatcttaattatttattgccttctgctagcttttgaatgtgtttgcgcttgcttctctagttcttttaattgtggtgttagggtgttgattttagatctttcctgctttctcttgtgggcatttagtgctataaatttccctctacacactgctttaaatgtgtcccagagattctggtatgttgtgtctttgttctcatttgtttcaaagaacatctttatttctgtcttcatttcattatgtacccagtagtcattcaggagcaggttgttcagtttccatgtagttgagcagttttgagtgagtcctggatcctgcgttctagtttgattgcactgtggtctgagagacagtttgttataatttctatttttttacatttgctgagaagtgctttacttccaattaagtggtcaattttggaataagtgcggtgtggtgccgagaagaatgtatattctgttgatttggggtggagagttctatagatgtctattaggtccgcttggtgcagtcaggtccctcagctgcaggtctgttggagtttgctggagttytattccagaccctgtttgtctgggtatcaccagtgcaggctgcagaacagcaaatattgcagaacagctgcctgatccttcctctggaagcttcatcccagaggggcagccacctatatgaggtgtccatcagcccctactgggacctactgggaggtgtctcccagttaggctacacagggatsagggacccacttgaggaggcagtctctccattctcagagctcaaacactgtgctgggagaaccactgccctcttcagagctgtcagacagggacatttaagtctgcagaagttgtttgctgtcttttgttcagctatgccctgccaacagaggtgaagtctagaggcagtaggccttgttgagctgtggtgggctccacccagttcgagcttcctggacgctttgtttacctactcaagcctcagcaatggcagatgccccttccccagccaggctgccgtctcgcagatcgatctcagactgctgcgctagcagtgagcaaggctctgtgggtgtgggagccactgagccaggcatgggagagaatcacgttgtctgcaggttgctaagaccttgggaaaagcacagtatttgggcaagagtctcccgattttccaggtagtctgtcacggcttcccttggctaggaaagggaaatctcccaaccccttgtgcttcccaggtgatgcgacgccttgccctgcttcagctcgccctccatgggctgcacccactgtcaaaccagtcccagtgaaatgaaccaggtacctcagttggaaatgcagaaatcacccatcttctgtgtcaatcacactgggaactgcagaccatagctgttcctcttcagccaccttcccttcctttttttttttctttttttaaacaaagaggctgagagatgattgaataatgctactcaaacataaaaaggtgtatgttcttagtttttatcttcatgttaagtcagaatcaaagtaaaaaaccatatagtggagcacgcaaattttacgttaaatatctgcaaargggttattttcacaatgagagaattaaagtatgtgatggaaactaattttttcctacttttatttgtgtcttttataagggaactatgtatacatagtggaaaactcttatttgctatagacaacagaatgaactgggggaatcataatcataaaacactgagacatcttgatcaaactgtaacaccttatcatattcacagtagggatgtggaatgggacaaaattattgaacacttgataaagaaaacaaaatcttattcaaagaaaatcttaactctcatttgtttattgttggtgttttatatatacaaaatagcaacctctcttttattcaaaattcagaataaatattaacatcagaaaatgtaaaaagcctttctgtcaggtgataacatcaaagtgaccaaaatgtttatgactgagttctcaagttttcattaccaaattgttaaagagatttagcaatttcttatgtataactattttatgttgataataatgtgcagttacatgaaacgttagcaatgaaaattataaatgatgtttcattttaaatatatcaaasagagatwtcaggaacaacttggagaaaaagcaatggtcagaaggaatttataaagtgttatgttcatataataatagatacaaagcttgsacatttttactccaattaaccctcatggcaacctaacaaagttcaaactacaaccccaaatgtataattcagcacaatgtggctctgcgagttcaggtgactcatcaaagatcacayagctagctagtgtctaaggcagaatcaacacctctgtcttttttatttcaaagcctaagattctgtcttctttttacagacaaggtaattgcactctaattatggttaagtgatttgaacaatttttatagcacaactaaaacccacattttctatttctactatccacactctatccactatatgttaagagacaggttagttgacattaaaaaatattcttttggggaagatccccttcaaaatgaggtagtgtattacataaaaagtttaactcacaattttccaggacgtataaaatgtgcaagttagtttcaagcattgagtaaacaatgagtaattagcaagatgaggggtttgtgaactgtgcaccacatatttgcagtcaggaaacaagagccactttgaaggaaaagcaatgtatattgtaaatttcctcatcattctctaatctagcatgaagatgaatagaataatcttttaatgaaaattaggttgatgctaccgtaaagacacacttaagtatatagcctgcagaacctataaggcaaccacacaatagaaactagaaagcaaccagctaacaatttcatgttaggatcaaaacctcatatgtcaatattaactttgaatgtaaatgatctaaatgctccacttaaaaggcacagagtgaaaagttcgatgaaaaaacaagacccatccatcctttgtcttcaagagagccatctcaaacataatgacgccaataggctcaaagcaaagggttgtagaaagatctaccatggaaacggaaaacaaaaagagcagagattgctattcttatattagataaaacagattttaaaccaaaaacagtaaaagaggacaaagaagggcactacataatgttaaatggttcaattcaagaagacttaattattctaaaaatatacayacctaaaattggagcacccagatacatagaacaagaacttctagttctccaaaaagacttgacagccacacaatgatagtgggggacttcaataccccactaacagcattagacaggctattgaggcagaamaccaacraagaaattctggacttaaactgarcatgtgaccaattggacctaatagacatatacagaatattgcccccaacaaccacaaaatggacattttttaaaatctgcacatggaacatactccaagattgaccacatgctcagctgtaaaatgagtcaataaattccaaaaaatagaaatcataccagtcatactcttggacaacagtggagtgaaaatatacatcaataccaagaagatctttcaaaaccacaatatcacatggaaattaaacaacttgctcttgaatgacttttgagtaaacaatgaaatcaaggcagaaattttaaaattccttgaaataaatggaaacagagacacaacatatcaaagtctctgggatgcagcaaaagcagtgttaagaggaaagtttatagtgctaaatgcctacctcacaaaaaaagacctgaaattaatgatctagtatcaaatttcaaggaactagaaaacaacaggaacacactaatcccaaagatagcagaaaaaaagaaatactaaaattggagtggacctaatgaaattgagacccaaaaatccacacaaagaatcaatgaaaccaaaagttggttctctgaaaggataagcaagattggtagattgctagctagattaacaaagaaaaacagagagaaggtccaaataagcataatcagaaataacaagggtgtcattacaaccaatcccacagaaatacaaaagatccgtagagagtattattaacacctttatgcacacaaactagaaagcctagaggaagtggataaattcctggtcacatacaatctcccaaaattgaatcagaaagaaactgaaacactgaataaatcaacagacttccaaagttgaatcagtaataaagattctaccaacgaaaaaaaagcctcaagccagatggattctcagccaaattctaccagatgtacaaagagctggtaccaattctactgaacctattccaaaaaaatcaaggagaaactcttctccaactcactctatgaagccagcatccctctgatactgaaacctggcaaagamacaatgaaaaaagaaaactacaggccaacatccctgaagaacacagatgcaaaaatcctcaactaaatactagcaaactgaattcaacagcacatcaaaaagttaatttaccatgatcaaataggcttcattcccgggatacaaggttggttcaatatacatcaaataaatgtgatttaccacataaacagaatttaaaacaaaaaccatatgatcatctcaatagatgcagaaatagttttcaaaattcttgagaaactagacattgaaggagcatatatcaaaaaaataagagccatctatgacaaacacagccagcatcatactgaatgtgcaagaattggaaccatttccgtggagaactggaataagacaaagatgcccattctcactatgcctattcaacatagtactggaagcactaggcagaggaatcaggcaaaagaaaggaataaaaaacatccaaataggaaaagaagaaatccaactatctctctttgtagacaacatgattctatacttaaaaaacactaaagactccaccaaaaggctcctggaactgataaatgactttactatggtttcagggtataaaatcaatataaaagttctttagtttgattagatcacatttgtcagttttggcttttgttgcaatggcttttggtgttttagtcatgaagtctttgcccatgcctatgtcctgaatggtattgcttaggttttcttctagggtttttatggtttggggttttacatttaagtctttaatccatcttgagttaatttttgtataagatgtaaggaaggggtccagtttctgttttctgcatatggctagccagttttcccagcaccatttattaaatagggaatcctttccccatttcttgtttttgtcaggtttgtcaaaaatcagatgactgtagatgtgtggtattatttctgaggtatttgttctgttccactggtctatatatctcttttggtaccagtatcatgctgttttggttactgtagccttgtagtatagtttgaagtcaggtagcattcaggcaacctacagaatgggagaaaatttttgcaatctacccatctgacaaacatctaatatccagaatctacatggaacttaaacaaatttacaaggaaaaagcaaacccatcaaaaagtgggtgaaggatatgaacagacacttctcaaaagaagacatttatgtggcgaaaaaacattaaaaaaaaaagctcaacatgactggtcattagagaaatgcaaatcaaaaccacaatgagataccatctcacgtcacttagaatgacaatgattagaaagtcaggaaacaacagatgctggtgaggctgaagagaaataggaatgcttttacactgttggtgtaaattaattcaatcatagtggaagatggcgtggtgattcctcaaggatctagaaccagaaattccatttgacccagcaatcccattactggttatataaccaaaggattataactcattctattataaagacacatgcacatgtatgtttactccggcactatttacaatagcaaagacttgtaactaacccaaatgcccatcaatgataggctggataaagaaaatgtggcacatatacaccatggaatactatgcagccataaaaaagaatgagttcatttcctttgcaggaacatggatgaagctagaagccatcattctcagcaaactaacacaggaacagaaaaccaaacactgcctgttctcacccataagtgggagtacaaagtggctgtacttcccaaagcaaactgcagattcaacactattcctatcaaactaccaatgrcatttttcacagaactggaaaaaaaaaaaacaaacctatcctaaaactcacttcaatgaaaaaggagcctgaatagtgaaagcaatcctaagcaaaaaggaaaaagctggaggcatcacattactcaactttgaactatactataaggttatagtaacccaaacaagatggtactggtacaaaaacagacacataaaacagaatagagaatcaagaaataargttgcatgcctacagccatctgatctttgacaaagtcgacaaaaataagcaatagaaagaactctctattcaataaatggtgttgggatggctggtgagccatatatagaagaatgaaactggattcctacctgtcaccatatacaaaaattaactcaagatggattaaaatttaaatgtaagacctcgaactacaagaatcctagaagaaaactgaggaaacatcattctggacatcagccatgggaaataacttaaaagtaagtcctcaaaagtagttgcaacaacaacaaaaattgacaagtgggacctaattaaactaaagagcttctgcacagtaaaagaactatcaacagagtaaatagacaatctacagaacaggagacaagtgtttgcaaactatgcatccaacaaaggtctaatatacagaattgataaggaacttaaaacacttgaacaagcaaaaaaacagaacaaaacaaacaaaaaacaaataatcccactgagaaatggtcaaaagacatgaacagacacttctcaaaagagtacatacaagtggccaagaaacatgtgaraaaatgttccacatcatcaatcacaagagaaatgcaaatcaaaaccattatgagatattatctcacaccagtcagaatagstattggtttacaaattaaaaacaacaacaacaacaacagatattggcaaggctgcagagaaaagggaatgcttatacactgtcggtgggaaggtaaattagtttagccactgtggaaagctaattcctttaatttctcaaaggacttaaaacagaactaacatttcacccagcaattccattactggctatatacccaaaagaaaacaaatcctactaaaaagatacatgcatgtgtatgctcattgcactattcacaatagcaaagacatggaatcaacctaggtgtccatcaatggtattttggataaataaaatgatatatatataatgatatatatatatacacacacacatatatatacacatatggagtactacaaaggcataaaacagaatgaaatcatgttctttacagtaacacgagtgcagctggaaacaattattctaagcgaattaatgtaggaacataaaactcaatactatatgtccttacttataagcaggagctaaacaatgactacttatggacataaataggacaacaattgtgactggggacttctagagtgaggagggaggatggagccaatggttgaaaaaccaactgttgggtactatgctcagtacctgggtgatgggatcatttatacctcaaaccacagcatcatgcaatatactcaggaaaagaacctgcacatgtactgcctgaatctaaaacaaaaattgaaaaataaaagataaataagtgctagcagtaaagaagggagtcaagcaagttaaaaacacacacctatggaaggaagaataagagtgggtatggaatagttagggaaaggggggcactgattcttgactgactgctagaggacagtgcaaaaattcccctgtggttttatgtgtaaaatggtattcaatttgactttgctttgtttgcggtaaaatatgatgcatgtgtaaataaaaaataagttaatgtacaaaaatgtaaaaataaagttgaacagagctcagtcatgactagaattcctagtgtgtatattatatgggcaacaaataaatcataatatgataagaaaatcaatgtagtggcctcaaatatgtttgtcacaattttagatttttaaataatttcagataaaaaatgaacaggaagaacttacagcatgtaattcagacatgatggtatagtccacagttcatcctaattgattttggcatttcctattggttgggacagaggagattgttgcagccaaatgttatcagccaagtcagttacatcttgctgtctgtgaagtacactgcttgctttaatgctcctttttaaggaatagtttgtatgcttgtcaagagaactataggaagctttgagtctccagccacagataaactcttgttctgcacaccctaatctgtcaatttattaacacaggaatctaaatccaagaacagccaaaatataattgattttctttgttgtcaagtaattattttatttaacatgcattattatttttgaataccatagagtgaagctaacatatgcacagaggtaaaaaatatatataatttttttgactttaaacactttctttttacatagtagttaacatctcaggccgggctcggtgactcacgcctgtaatcccagcactttgggaggccgaggcgggtggatcacgaggtcaggagatcaagaccatactggctaacacggtgaaaccccctctctactaaaaatacaaaaaaaattagccgggtgcggtggcgggcgcctgtagtcccagctactggcgggggtgagggtgggcgggggctgaggccggagaatggagtgaacccgggaggcggagcttgcagcgagccgagattgcgccactgcagtccggcctgggtgaaagagcgagactctgtctcaaaaaaaataaaaataaaaataaaaaataaaaaaattaaaaaaaatctcacggctattaactactataaatgacatctctgctctcagaattaccaagggttctcactatcactgcaaatactttaacttacctttctgagaaactgtatatcctaacacgttattgcaaaactatattaggtgtgaatattcttagactggcggcacaaaatgctcttagtcatcatgtcaaatcaaaatcgctccaaatttctgtatgttaagtgatcaggtgtcattgcattcagaaataagactacacaattgttccttcataatcacctattaagtaaattaaaaaccacaggaaatcacaggtggcttcatgaggaaaatttataaaaactttgctgaaaggcacagatagtgagttgcaactgggcttctgcatcattcccactaactgaagaattttcccagggttatgttttgtgtttgggtgtacacatggggccatgagttgaggtcagtgttttccaaagtttggtacccaaaatgatgttaactatactgatgatcaagttttatttgaagagatatgcattcattttaaaagttaataaaacaatataattagtatgttaaaacttttgtactaatttatggatatccttgtttagggtaamtgtaagtaagcatttttaagtcaatttgaggaaaagtattagtaatttatagaacagattgatggccatggcaaaatttatgaaggtgttgtgatgattaaggcttgagaaacaagggctgtgattttccctatttggggattcattctactttggtctagtggcgcaaactattgaagatggaccatcctcgactataaaaagggtctaaaattatactgccatatttaccccatcctaaatgataaatttttctatgcacatgtagcattcttcattggggaaatatagaatcttattcagttaacaatgtgtaacaacttcttagayaacgatattatcacctcaaaatttgatattaagctttgcacagataagtttattcacacattaatctttggatgagattgggttcctttgggacatacttgggtatcaccctgaacttctccctcacaggcaggttctcaactacagtattcattcctgtgattatctgtctaatatctgtctctccaacaggactcaaagctacattgagggcagggattgtgtctactttagccaaagctgggattcaacacttttttttttctgtattgaattttaaagtactgtttgtgactaacttaatgtaagaaggtaatatattgcaattatcagcttgcataatgggccatttgtttgtcattgacaaagagactcattagtcttgaaaatgtgatagtagccaaatgtattcttgttgttgcccaagtcttcaactaagtgtgtttgtagacagtggaaaaaagmagggaaaaatggccacttaaatgacaaatagaattttggaattccttggcttcaacagaccttagagacaccttctctaaccttttccttttattgttaaaatgagtaaactgaggcatagaacgggtaggtggttgattcaagatgacataacaagatagtagaatcagaatcaacacctacattgtctcaggatgattccatgctgtgtactttccttgctgctgcccccagtcctgactccccttgttaatgaggaagtactgtacctggtcagtctctgctaacttctgcctcagtggacaggcagtgcctctggtttagcctcatccctggcctcaaggtgtggaagcacaaggttaatggctcagtcaaggtccccctccacaaactcctaagactcaatcaaggtgaatgaaaatctactctaagaaaaaacaatggtatctggcaatccaggttgcaaataaccagcatggtgctaagatggtgaccgcaagagtatgcgatcaaatgaggggcttttaaggggagtttaccaaaaccaggttatcctctgatatcatttacaatcaataaggattattgaaagagactggattccttccatgggagtatatagatgcctttggcgagttaagccaagtggccttttgtggcatagatctctttaaatcatcaactgctggtcattagcagagtccaaggcaagtaattaattgtaataaccaaccacacaattggaattaatgcttttcttgctctcacatagctgtttataaatactayagtaaagagtacagagaagcaagaggttcattaccctgaagtccctgaatattatgagatttctaggatttacaggtaatttactaatcaatactacctgatgcaagggggtgagaattcaacttattttaataaactctaaatgcatactatgttaaatgtgcattaaatatataatatgatatttaaaatcttckatcatacttttaaaaaagccattacctgctatcttaccactattcctgccaccaaaaccaccacacatcgagcacctactaagaactaggcactgcactgggtgcccaaggaaaagtcttcatatgtcatttaagtaaattctacatccttccaagcttatcttataaattgcaacagatggactgaatatattcaaatacatagtcagggcattgttgtgatttttcacagtgtctgaacaaggagttgtgtgtctgactgattggcagatgcaaaattttctgtgctgtgctaacttcattggtaaaggttctttgcctgctttgcatgggtagaaatttttttcagaagttgttacttttgttttctgtgactggtgataaatcacccttaatgaagaccctttccttagactattatgaaagtcagattttgctcaggcaagagatgctgctgggagacaagtcagcatataagagtgattcttgcaacatgccaataagatagtcccaaaactattctggttagtaattctgatggtgcatctctacaccataagcagcacctttggctaagctgttgattttgactgtttatttcaacttcgaaaaatgattgatggtgctgttgagatatgcactttccataaactttcaaatcaaatttcatagactaagatgaagccagggtgcagtgtaatcatattaggacaaacaattatagcccacagattatttagaatatggcatcttttcttctttttcatgctttcgttttgaatacttgaaaaaaaatgaaatttgtttagcatttggatctgaggaagcaggatgcctctttagtgcctggctcatagacggcackaaagacatagttgttaaatgaataaaagatgcaaatactagtcactttaagcataggaactgttcgccttccagtaatttatggaaatgaagttttattagcatctattttttcaggttttctcctcttctcttttccccttcctttgtcctttcttctttttctttctttgttagtgacatttgaaaagaagacagcatgtgaggcattagtaaaatagataaattttttaaaaaataatttattactataaaaaaagatacatggcctttcacttttctttactcatcaaagtttgcataataaagacagaatttactaattttgaatttgttcaaatctttttcctcttcctgtcttaaagccactctacttgccttaaagaaaagaaagcaataaagaaaatctctctttgatcaatttcttctccttgacttctccctaagaagacttctgtctttgtcagaccaatctgaggactcaytgtgatttagaacctggagagtctcataataaagaacagagagaaaggaggatgatctgcagaaaagttatgcatgtttactgagagaaagttttgtaggtttggtgtatgagaaattctgaagcagccccaaagtagaggagaagagaagagaagttaagaagaaaaggaaagaaacttttgagaaatrtccctatgtgcaatgaattacacctctttcaagtcctgcaagggacccaattgaatatggaagttctcttttaatttctttggctattgcttttactattatgttatgcaaaatctgatgcatgtgtgattgtgattacacatgcagttatgaaaacttttaaaagtttatttggaccagaaatgtgctttggcactcaacccctcacacaggcaataatctgtttttttaaaatttaaggtgatagtctaaatggacgataaagttagaatgagattttaaggtaataaggatgaagtatccttcaaatgtaggaagttggaaaaacatgtatcaattaatacaagttatcaaatacatttcgcaaatttttaggattccgactcactgtgtaaactttctacttctggaaaggcaggctattttactcacgaaactaaaaaatttaaatgtgtagaggaagaatgtaacttatatagttagaaacttaaatttcttaaagatttagcaatttataaccttaaggatttatcaatatataaacagccaggaaactcagtcagacattattcttagtaatggttgccatcatcatccagaccattaattgaattatagattttttcaactgcttttatttgcctctgaggaaataaagacagtcccatgctgtgtgggactaattctaagagtaaaattagttgagcctcaactttgaacaacattattgactaaggatcattcttcttagtttcccgtcttaatgattagctccatttgaaaagtagctctctaattttgttaaygccattattggagttggataaattcgcctactagcccaaccaatttgttcctattttgttgtaattgttgtcttagcaacagcttcttattctctcagactttgcacatgacctttggaaaacacatttataacttgtgtactaaagctttcccccttctagattattttgaatgcatgataatttattcccaactatgttgaaataagaatttatttagtatttatagtttgttttctggctaatggtaaaaaatttaggagtaaagcctaaattaaagcattgcttgtttgtataacacatccttttactttgcaatgcctgtcaaaaagcagaaatcatataattttctttcttaattttgataaatttcacaatgaacaatttaccagtctatcgcagttggcaagttartctacctrcttactaccctatttccataaaataacctttttatttacctagatctttttcatcaataaaaaggaaaataatcctagcactttggttccacttaaatatctcactaggttatatatgtgtacatgtgggtgggtgggcactggaagacaatgctggacaatctgtgaccgacatagcttaaatgtggcatcaaaggatggagtgggtttccacagatgggaaaggccattgggaagaaaaaaggtgaagtgtgaaaaatggccagagaaggtgagggccctgggggaatggagtatatgattatgtggaagaatagtgaagtggtcttgaaaggtaaatagtgactatacgtcaaattgttattaaatactcacctatagacttagaattctatgactattttataagcaatgaagagttactgaagtttccgccagtggtatcatggggacttattttaggaaaataactttctcagcagtatcaaaagtggactaggaaagaacagagctgatgagggttccctggctttggtcgcctgttcagttcattgtatagagtgactgcttgggtatcatcttgttccctgctttttacataaaaacagcaaagacttgtattgagaattttctaagctctcattgtttatgggtcaattctgtcagttaaatgctctctggaattatacagatgctgaaatactattgctgacatgcaggcttaggtaatacactgcagctagaataaaagccctgaaaacttttgtcttcctagtgtgcttcctatccaagcatctgttaacagctctggagtgcacatggtctttagccgacacttctcatggcactgatgaagaggaaagatggctaccacatcatcctacaggacattccacagagatagccacaacttttctgagtcatttcagggaaaacttatgaggacttgataaatacctatctccagaactttaatctaatggaatgtgtttccttctaaatgtgttgtgtttggaggataagagtcttggtgaagggcaactgtggacaacaatgaagcggatcttgcagattccccatcatgtgcatttctgctttgtgttctagttacactcaatctcacgtccacgttattactcagggcttgtttctcttggttcccagtctacttgtccagtttctcagaaatgagtcttccatttatcctaagcagttctctttgaaacttcctaatgtcaacaatctacccacctagacacctaactattgcctgttcccagagttctctgttgacctattctacttgtttgctgggacacccactaattattccttattaggcctgcatgactcttgtaatcatggttcacctgcctgtgtagctctcccctcacagctgtggctggatctatttccaaatacatgtctctgctgaggtgttgtgttgtgtctcaaaattccctggtttgactttttaaaaaatcatcagtcaagccagtattctttaggactttttatataaaatgatgtcaacacgtacattattgtatagcaataagcaaatgagatttttctagtgtgggcaagtatttaaatggtatgtcactaacatattaaattatttttcactttgatagagctttacctgataaaaacaggtaatttctttaaaagacgggatttagattgcacatttacacatactgaaagatagattaggggcaggaagaatgaaaagaaaaaaatgcatccaattagaaatatgaaattttctgtcccaaagaattcttttctcttcaagaccatcctatttcactttttacaaagaaacatctcaatatttgtggacaagttgaaagggaaggaaggaatcatggagatgtaagaaaaatgatcacttcttatcctaccaatcagaagtcattatgattaattaaactgcaaacataacataatataaagatacacttagtctttcatattgggacacaaaaattattctttgttttttgttttttaattctggtccttaacaggacagagggtggagtgaactgaaactttatttttcctagaaattttaaactaaaatatcttttaaaatttgcttcaaagtttataataactgttattctacttctctatactacagtccttactacgcagaactgcactgtcacacattgatggacacaccaaaatatcacgtgacaactctcaaggcagtaagggataattgtatgctgaggaggtcagaagtcttgagttgtaaccaaaattagatgcctgttgtgtttctaacaaatcccactacacagcaagacttatgtagaaaataagcaaagcacaggaaagcagatgatactgcaatatcaagaattcatgcccacacctgggatggcctccagccacctgggagctggcgcataagttaagttcttaattaagacaccagcaccttttttttttctccctgcaaacccataggacacaagctgttggttcttgggatttattgtctctattttaccctgaaaagtggtatttttctatggtatgaaaaagcttgggttattttaaattgtgctgagaagtcgctcattttcgctttggatttatgcggcaaaatactaagtgatatagctgctgtcttgagcgtagagaggaaagggcatgcagccacagttgaagactacgcaaagcgtttgactgatccaactgagatctgtgtttatgtcattgttcagtcccaatgtagctgcgacagcttgtttatttcaagggagagcagggccatgcgcgcactgactgctctagtgccagatctaattggtgctgacgccagctgcttgactcccatcacgatctatctgaatccgttcatcactgctgcttcatttgtctgacaggggctcctgstgaattataaaattggttccgacaactttttttttttaacctcaaggctgtgccccagttacctaggtgagtttgacagtctgatgtttctcttcataatcagggatggttcaaggcagtcagaccctgagtccttggcaccgtggagagaagttaggcctctatgtcttatccattagcaggaggggaagctctcggatgagcacagaaatgggaaagtccaatttcctttatttaggtataagcagagttgagtcatttattaccagggtggtctgggaaggcagatggagaaagacagagcttttgtctcagggtttcaacacattaaaataaatcytactataaaagtgtaaagattcaatgtagagttcctcaccagagtgtttttagcccagtctttttttttttttggattattcctgccacttgaaaaaaggtttgttttgccaatttgctacttctttagcctggttgttttcttaccacttaggggtctaaatatttcctcctgtttgacactgtctagtatttcctcgtttgcatgtgatgattttttttttctatttacctctttctgttccttttatagttttcggattccctgacatttctgtattaatcagggtactttataaaaaccagaagtatctaactcaaactggctaaaacaatgaagatatttactttctctgaaagtgcaggccccaggctagttactctctgggccacctgtcatcatgtaaccaaattacttccagttccctgctctggcaatctcaggctggagtaatggtagggcttactttacaaagattataggatggtccagcaaggcctcagttgtttctaggttgcacatatagaaacacactacctagagggaaaagagtggggaactgggagggaacactgttcattctcaaatgaggtatgacatgtctcccagcagacatcccctcatgcttcagaggccaaattcagatcacatgccaatttcttcatctgtggacagctagagcattgctgacctaggacattgttgagctagggcattgtgacctaaggctagtggttctgaaagtgtggttttggaccagaagcatcagtatcacctgggaacttgctagaaatgcaacttctcaggctgagccccaaacctacattttcagaaactctggagataggaaccagcaatctgtgctttaaccctccagtgattttgattcaagttcagttttgacttccactgatcgtcctggatagaatggctttaaagtctatcagtgtggcttctccaccatctcttgtgagaagaaatgagttgctgaagtcatagagaggtctacaaagaacagggctccctgatgctgcggggctgatgaccatgagagaacaaaccttatttgtaggtaacttctttgatgtgaatgaacccaggagaaacagcacatgggactattatctgctggatcttccattatcatcagaaaccaccctatgtcctgctttctaagacaccataaattataagaaacaccagcaatttaatcaccacttttcagataattagtgcatacattgaccttacagggttttggaaatgcaaaaatgtgaaagatttagaaattataagaaaattgaattatattttatccttctgtggtagaaatgagagttgagtcttgaagctttagagtctaggccagtcagggcagaactacactgctcaggagggacaggcatgggggagcacttccttgcttccaggaaagtattttgagtagcaagaaaatgacacaaagccccttacacacataagaattcaagagtgccacacaaacttaaaacagttcaagatcacccactgaagtaaactgaattgctgtctgtgatgattaagtttatgtgtcaacttgaccaggccatgggatgcccacatagctggttaaacattatttctgaaagcatctgtcagaatggttctgcaacagattagcacttgtattggcagacgacacatcaccctccccaaggtgagtgggcatcacctaattcagtgagggcctgaatagcacaaaaaggtgagaaaggttgactttgctcttaggcattgctcttctgcccttgactcgtggctctgaggtcttcagacttggactggaatctacaccattggctttccagctctcagaccttcaaattataccatcagctttcctgggtctccagcttacagatggcagatcatgggtcttctcactccataactgttgtgagctgataccttaaaataaatttctttctaaaaatatacatatagatatatatttttatatatttacatatgcgtataaatatattaataatgtatatattatattaataaaacatataactatatttatatttatacttatatatacctacatgtatatatatatggtattggctcatgttattatgaaggctgagaagccccatgatctaccatctgcaagctggaaacccaggatgtgtatgtgtgtgtgtataacagaagtgtttcagattttaaatttttttggattgtggaatatctgcatatacataattaaatatcttagggatgggaccgcagtctaaacacagactttatttatgttttatatacaccttataaacacaccttgagggtaattttatacaatattttaaataactttgtgcataaggcaaaatttatgttaagtacttatgtgtggaattttccacttgtggtgtcatgtcagtatttaagaagtttttgactttgaataattttggatttcaggattttagattagggatattcaacgtgtgtgtgtgtgtgtgtgtgtgtgtgtgtgtgtgtgtgtgtaggatacatatatattatatatatataatctattgattctgttttcttggaaaactttaataaacttcctgacacaaaactctaagtcttgaaataaaaccacctatattttgttagtcatgcagtcaagaagcaaaaaaaataaaaataaaaatgcttagagtacatcacatataaatgattaattttcaaaatggcaacgcatttcccataagtagtccatacatccctaagaatatgacttatcttctttctggcaatttgctgcctatatctttttaaaaatcaattagccgggcccgatggctcacgcctgtaatcccagcactttgagaggccgaggcgggtggatcatgaggtcaagagatcgagactatcctggctaatgtagtgaaaccccgcctctactaaaaatacaaaaaattagccgggcgtggtggtgggcacctgtagtcccagctactcgggaggctgaggcaggagaatggcatgaacccgggaggcggaacttgcagtaagcggagatcacgccactgcactccagcctgggtgacagagctagactccatctcagaaaaaaaaaaaaaaaatcaattgatgacaccaatcagtactatcacataacctatcatcttcccakacttggtcttttcagtaacaaaagtagtttaaataattcattttagtcaaatatcttctagtcattttctttactcagctggtatcccacttaactcaaatgttatatttgtttttatttctcagtatgtgtttttctactttaaaaggaaaaataaaaaactattaatatgcctcatttaataattgttaaaacctatttagcaacctgacatggtctgaatgtttgtgtccccctaatagtcatatgttgaaatcctaaccccaaggccttgggaggtaattaggtcaggagggtggtgcccttgggaatgggattagtgcccttttaaacagaccccagagagctcacttgctccttaaaccatgtaaagacacagcaagaaggtgccatctctgagctagaaaacagctcctcacccagacactgaatctattggcaccttgatcttagacttcccagtttctagaatgatgagacataaatttctgttgtttacaagctccccagtttacggtattttgttgtagaagtccaaatggactaagacataaccgttgctggtcacataaaccaacttgaggtacttaaattcaaatttagtttaatatagctaatgagctatatcaaatggtgaatttgtaaaaattttagcattttgcaaatagaaaaacaagtcttaattagattatacacagctctgcatgaaaatttaaatgttaggggtgaacataatgcaaacacttactttatttgttaatgttgttaatctaagtaatactgctcttggacctagataaagctgatgtaaatacagcagaggatataaagagacaaactgacataatgcaaacttgcttagtggactgaagtttgaaaatgagtgaatttttgtgttataatgttatatgttatgcactaggtgatgttttatgtttgaggattatgacccaattataacgacggaatctttataagtgaaaaagagttgaagtaacatctaagtatatagtcttctatcccaaaacagaactgtactttatatagacgagatggttgtctgtcctatttttaaattcctctgaggattctatgaacttcctcaatacattttagtgtttaattacacccagctaagatgtttttccttatatttaatcaagttttttcagagtctactttttcaaaactaacagctatactgaggtataatttgcacaccatacaattcatccactaaaagtatacaaattcagtggtttggggaattatgcacagagttgtacaaccatcaccactattttatttcaaaacacttatcaattgtccccaaaaggaactctatagatattagcagtcaaccctcagcctgtggcaaccactaatctactttctgtctctatgggtttgcctattctgggcattaatatatatgaaattatacatgtgaccttttatgtctggcttctttcactaagcatgatgttcttaaggttcatcaatgttgtagcatctatcagtacttttttatggctgaatatcattcccactgtatagaataccacattccacattttatgcagaataccacatttggatacgtgggtactgatgtgatttggctgtgtccccacccaaaatctcatcttgaactgtaatccccataatccccacgtgtcaaggatggaaccagatggaggtaattgaatcatgggggcatatttccccatgctgttctcatgatagtgagtcttacgagatcagaagttttgtaagtgcctggcattccccctgcttgcactcactctgtcctgctgtgctgtgaagaatgtgcttgcttctcctttacctcccaccatgattgtaagtttcttgaggcctccctagtaatgtggaactgtgagtcaattaaacctctttcctttataaattacccagtcttgggtgtttcttcatagcagtgtgagaacagactaatacagatatatttatcaactgagaatatttgaattgtttgaactttatggatattataaataatatatgatataaacacataaacattcatgtacaaatttttctgtgggcatatattttcaactctcttgggaatagacctaagaatggaatagctggttcatataataactctatgtttaacctttggaagaaccatcagacttttccaaagtggctgaaccatcttacaattctccaagtaatatataaaattccaatttctccacatttttggcatacttgttatcttgtttgtttttttaaatctcactctgttgtccaggctggagtgcagtgacacaaacatggctcactgcagcctcaacctcttgagctcaagcaatcctcctgcctcagcctgctgtgtagctggtaccacatgtgcatgccaccgacttggctttttaatatttttttgtagagatggggtctcattttgttacctaggctggtcttgaactcctgggctcaagcaatcctcccaccttggactcccaaagtgatgagattacaggtgtgagccaccatgtccagccctgtcttttttattttagccattcctaggagtgtaaagtgatatttcatcatggtttagatttgcatttccctgaygactaacaatgctgaacaccttttatgtgcttattggacattcatacgtcttctttggagaaatgtctattcagatccttttcctgttttttaattgagttgtttctcattattgagttgtaagtgttccttgtatattctagttacaagtggcttatcaagtatataatttgcaaatatttttcccatcctttgggttgtcttttcactttctttatagtgacctttgaaacacaaagttttttaatgttgaaatctaatttaccttatttttcttttgttgcttgtgattttggtgtcagagttaaggaacccattgtcatgaagatttatgattatgttttctcctaagarttttatagtttaggctcttacatttaggtctttgattaattttgaggtttttatctatgtgaggtaagggtcaaatttattgttttgcatatgaatatccatttacsccagtattatttgttaaaaatactattctttctccattaaactgtcttgccaaccctgttgaaaatcaattgaccataaatatgagggttgatttctgagctctcaattccaatccattgatgaaccacactgtcttaattactatggctttatggtaagttttaaaattgaaagtgtgattcttccaactttgttcatgtttttcaggattgttttagttattctgagtctcttgaatttctgtatgaatttttgactcagcttatcaattttggcaaaaaaggcagctgggattttaacagcaagtatgttgaatttatagataaatttggagagttattgccattttaacaatgtttagtcttccaatccttgatcattagatatctttccatttattgaggttttatttaatttatttggataatgttttatagcttgagtgtaagttttgcaattgttttgttaaatgtatccttaattttgtattttattctttgtaatgctactataaatgaaattattttcttaattccacttcaaattgttcattactagtatatagaaatgcaaatcatttttataagtgattgtatcctgccacctcattgaagtcatttgttaattctaattttttttttggtggattatttaggatttttcaagagatagtttctcctttccaatctacatactggactttactttttaactatacgtttcatatgaaattttgatgattcttccctaaaatgrctgaaaaatagaaataataatgaagcaatatataagaagatgtatgttatatttaaattacttggatatttatgatagaaaaaaatatatctaccctatgtcaggccttgtgctaagtgactcctacattttttaaattaataaactaaattttttagagtagttttaggttcaaagaaaaactgagctgaagatagagaatttccatataccccctgccccacacaagctcaacctcccccattttcaacatccctcattacagtggaacactggttacacatgaacatactaaagtggactcatagtttacattgagattcacttttggtattgcacattctatagggttaataaatgtataacaacatatatctatcattatagtatcttacatagtagtttcagtgccctaaaaatcctccatgctctgctgacttatccttccctctcccctaaccctggcaaccactgatgtttttactgtctccatggtcttgccttttccagaatgtcatattgttggaatcatacagtatgtagccttttcagattgggttctttcatttactaatatgcatttttaagttttcttcatgtcttttcatggcatgacacctcatttctttttagtgccaagtaatattacattgtgtagaagtaccacagttaacttgtccattcacttactaaaggacatcttatttgcttgcaagttttgataattatgaataaagctgctataaatatttgtgtgtatgttttgcatagatacaagttttcagttcatttgggtaaataccaaggagcatgattgctgtatcacataaaaaaagtatgtttagttttgaaagaaagtgccaaactgcctgagtgactgtaccattttgtattcccaccaataacgaatgagacagctacaattgttctacatctttgccagcatttgtggtgtcagtgtttgggattttggccattcagtgggtatgcagtggtattttactgttttaatttgcaattccctaatgacatacaatgttgagcatctttcatatgcttacttgccatctgcttatcttctttggtgaggtgtctattcaggtcttttgcccatttatttttaaatggagttgttcattttcttattgttgagcttcaggagttctttgtatattttggataacagtcttatattagatgtccttgagagatattttcttccagtctgtggctggtcttctcaatctcatgacattgtcttatgcagaacagtttttaattttaatgaagtccagcttatcaattacttcttctccttacattatgtagtaagtttataagcatcttcaaaataagtattagtaattcattttacacatgagaaaacagagagttcaacatcagggatttagatatccatcaatcgaggagagatctgaaaccaggttgtttggctgaaaagccagatttaaggtactcaacaaaatgctttagaaagagatttttaataaatgaaaaataataccaatgaccctaaggtctgcatttggctctggagaaggcatcccatggtgcccctatggcccctgaggccatgctcacctatgctgccttgaaacatcatcatgctcctggattgcccaggtggcttccttcacttagccacyggtgaggtcagttcttcccaagtagtcccacagtcttgccagaatggccactattcctctaacttttccttttccatcacccaccgtatgcaaatcaaaatckctgcctaaataattayatggttttcaaaaataatgaaatcattaattatttctatttaaccattaataaaattgattaacagttacattttgtaggcatttatgttggcacgtattcattttgatttagcaatttcctttttcttttctttttttggaaccaaaacctatgtttttcagcacccaaacattttcacaagtctttgaaaagatcataggctctgggcaaggggttgattagagttgccactggaaaaaaattatccaaccacatttcatctcccctttggcccagcatttttaaatgattaacccaccaaaccaagtacatttgccttctcggtttaattaataatgtgttcttataacctcacagaatcgatatgcctagaaacaaatgcaaagggcttttgttttctacatcactcagccacattatagaaaaaggtgtaacattcattgggcttttagaagttctgaacttagcttaatagttctcagatctgagtacctgggatattgggaycccagtttgtggattactagctaggtaatattaaaagtctttttcagttgtaacattttgtgaaaaagaaaccacaaaatactcccatgaatattatctctgtttcactgtaattagctcttatttctctagcctgattacttgcccctctccagtgagtctctagctattttcacagcttaagcctctgtttgtttatgtctatacttaggttgcaggtgataattgcctacttatcagtttttttgttttgggtttttttttttttttctacttgctctctaagccttttctaagtttctcctagactttctttcacacctttttcttttgagtggttcaaattccatttagagtgatgtttccttaagcacttattctaggtattgatgttttcttaaaagagtcttttcattcactcaacagagaatgaaccaatgttaagtaagggtcaggcacagtaaagcatgctgagaatacaacagtaaaatatggtcactcagttacagtttagtgtgggagatcaatactagactgactataagtcacacaagtaaattaatgattgcaaagtatgataaatgttatgaaggaaaggtacaaggtgctgtgagagagaatatccagggaacctaatggagatgggtagagggggaaaggccccatcaagagaaacagcatttagaatgatcccaaggttttattttaagttttacattttacactagtacaagtattagttaaccaatgatgaaaccgtgcatttttcaatattgctggcaaggaaacagttggatatatttcaattgcctacattacgagtaaatttttgatacaggtaaagaaagtagtgggtgaaggagagatccaagtacgttaccacttatcctcttctcagaatactctttcctgatgacccagtagcagagtttcctcataaggttaccaccagtaataacagatgttatttttctccccttgccttttactattgtttattttatgactaaaacccttggaccctctgccattctgcttccttcttgttcttaaggttggtggttcttgagcctaattactcatcagaataactttggccatcttagaaactgtaggattccccaaccaattccagaactcatgaactgaaatgtcccagggaaagacctcagtaatccacgttaaaaaaaaaatgcttctcgtgtgattatgatctgaaggagagctaggaacccttgtctcactcctagttatgtgcctttgggcaaattatttattttctctgtgactcagtttcctcaattataaaataggaatcttaatggtacctatctcacagagttgttgtcagtataaaaagatgtagacaattcagagttcatgtaacatatttggatgggaaactcagccactgaaggaaatgccagttctaaaggccttaggaactcagggttttcccaaaaacaggaaggttctcatggagtcatctctggttctgatttctgaggtcattttgtgagctcctttaagagatgagcaattctaccaccacagagttaaatgtggtttcatggatatcagctacagtttttttgttgtttttgttttcatttatttatttgagatgaggtctcactctgtcacccaggctgaagtgcagtggcacaatcacggctcactgaagccttgaccttcctgggctcaagtgattctcccgcctcaggctctccagcagctgggactacaggcaccacacttggctaattttaaaatttattttattttttgttgagacagggtctcactatgttgcccaggttgctctcaaactcctgggcttaagtgatcctcttgcctcatccttcaaaagtgttgggattccaggcatgagtcaccatgcctggcatcagctactgtcataaaacctgcctacatgcctgttttggtgtaccacatgcctattttggagtactgcccctactccccctccctgttgattggcaggaggctgtcagttctcaaatcatactttcctagccacaggtgaagaaggtctataactcaggttggccaatcagaatatttatttctgtgggtatggcagctggtacataggttagcagaagacctcagtaggatgaatcagaatccaattttggtaaataatkggggaaacagggaagaaagggagtcctttttgaaactgctatcaataaagatgataaaaggcaggaacttcccagtgggtatctttgatgtcaaacgcaggaatctgctgaggattgaggatgacaccatatggaggaaagtagagtcaagagaagaagccatggatggagagagccctggtgaaaacattgttggccctctggatctagctattctgaaatcactctggactttccaggggcgatactgagaacgtctctcatcaaatgaatacatctaggtttctatgcatctatctattaatgtatttattagtttaacttacttggagatgaatttctgccacttaaaacccagagttctgtacagtacatttggatatacttgtcttttttatgataaattggtggtcaatgtggcttattctggggtgttgtgtttgaagctcgtgagaggctgaggctgaggctgtctctctctaacaacccagaggagtaaaagcaggagtatggataagagatggaggcaggatcataactgctttagcaatctttgtattataattacggaagaacaaacgcaccagtgtatttaaaatgaatgaattacagacatttctcatagaaagtttaaaaattgatttactatctgaactgctcagaaattttgctactgcccagatataattctggatttgygtgggyctgttctttccactaaatgaaacaaccttaataaaaatgctgttcttacaacttcaataagagcttttgtcttacattaaagctttataatattgcattctattgtgagtagacctctattcagagttacattgaatacaaatcggaataggrttacaagcaacattaaaagttaatgaaaaatcagccttgtacatgtagaacaacaacaaaaaaagttgaaggaaagaaagtacataattacgctagtttcagttaagacttaggtaatagttccacatttgaaatctagatcattctctccccctccatcccatgtaattatccattcaacttactaatgaacatttgtcatacagaactagcaagaactccaaaatgaagargtggagctgaaagagtgaaggagaaaaaggcaaatttgatgcatgtggaagcaaaagagtataggaaaacatcagtttttattgaacgatctgttactaaaaatgtgcaggagtgccaaggtttattttggttatcatatgaagaaacacatatgaacctaatacatctccagtttgactactcaaaagaaaaaaaatagggtaaaaggaaagcattttaagtgagtgaaaggaccagcactgcagagctggaaggaaacttgaacaactcctattataacttcctcatggtttaggtgaggagacgcatctgtgtggactgagggccttggctaagacaatgcagctactaaatgggtgttcttgtggtgccaattaatgacttatttccctctctgaaatatatatcaatgaggaaataacatacagatcaagcacagttcttatattagacacatttctcagaactcccaatgtggggattctatcagtgctgagtatgtctattccaatgatgcatgcagaaacagggaaaatgaccacagcatggatatggggaccattggatccactatgagatggagctaagctgaaactccattgatcacctgacctccatacacccatactctgacagttatgttttggctctcccaaaagtagtgccaattcagagctggtgccctgtaataccccccaaatctgattatcttctttttcccaacacaccatcaccctggtaaaaggccattgtgttcaataatatcctagagagacttttgaaattatgtagggtttttaaaaatagagacttgcatttatagataaaaaatagtttataataccataaagatagaccatcatgctgtgggtttaaattctacaggagcagaaaaaaaagagaagtctggggagggctaataggcaatggggaaaaatgtcaaaaatcagagaagatttacttatttctccaagacaccttattagttcttagaattgctggtgagcagtttgctgcaaagcaggaataaatattgtggcaacagaagagagtatttcttatgtgctgacatcaagaacatggtctgctaggatctgaggaggccagagagagactggcaacaaggctactctttgcaaaccaccaccaccacagcaaacctgggacctccatcttatactgggccaagcagagaaaatactatcctgtcacattttcacagacccacctctctcaggaattctttctcctctctgcagtccttggccatcagtgactttcatgaatatttggagagtacaaatgcggacagacgtatgcccttatgaagttatatgagctgtacaaaggagctgacagaaaggaaaggcaacacaattctttgaagttaatacagtgattcatgctgtagtgctacccgctgcacacacacaaatgtaacaacccaaagggtccccaaagtcaaaactgaataaatgaatatttaagaaatccagatgctaaaaatacacctgagatctcattttcttcttaatcagaaattgcttcagggaagaaggctctttatcttctggaatccaacatgagccaagttaacttggcatcctggcagaaatcaaggataacctgattcttgccagttgtaaacagagagcatgaaatttaaatttcagagatacagagggaaaaagctgcctacctgttgctgtgaatgaacaaagacttatgctatttaaatatcaatgggtagtgccagagtaaaatttgaatacgtttggatgatttcaaatgcatacctgcttttacaagctcaatctagttgaggcaaaaacacttcaaaaggaccagaaacagaattaaaacccattacattttcccattaccactagttttccatttaagcacaccaccatttttccatcaattcttgattgctcataactcttcaaacctcttccaaaactacagcatcctrctttttggatatggagtttcaggttgcagttataacttttcccttagctttagtttattggacacacctttgattcaaagcaaaccaggagtctctacctaattttctgccactggttcagtgaatagagttctgatttctgttgattattgaattgcttctgggatgggtctaaaatgcaggcactgacccttaatgtcaatcacaaaattctgagtccaaaattctgaagcaatttcattgtttacmgtatatttctggcagagtgataataagcagcctgatcactttatggatttgtctctctcccgagcaaacttaaaagaaggcttagtaaaacctacattggtttattgagtgtatgaaagctggctgctactcggtttattcctgttactagacattctttggctttatacatctgaaaagaattttcaaattgaggattttttctttgtgctactaaatatgtctttcttagctaattattatgtgatgggtcatatagaaagcaatgagaacatattatgatgaaatcattccaatttttaagtatatttcatatgataagaaatgtaaaactgtgagagccctaatttatacaaactagctattcacattaaattagttataaaagtaatttgaaagctgttcataagaccatgaaatatgtaagtatttatgtctattgtttttcatttgcaaacaagtattaattgagactttgcccatatggtacgtaataaacattctggaattctacatttatcattctgatgtttttcttaagagtacttttaggcattttctaccagtactgggctcagaacacagccccagcacgggaagctggggagtttccttctgtattggtttctctctaaataaatttgaaccatttttcatattaacttttccccttctcaatttttttaagaattaatgagaaaaattcttcatcaagattcttgctaaagagattcatactaaatatgtagccagcagccacccacatatcagttaaatgtcaatgggaaagaagaaaatggcatctgtacaggatatattttgttctttctctgagacggagccaaacaaatgggaagcttcctgagaagatagccgtcaatgtcactaatgttatctctgcctccatattcttttttgttggcttttaaaaatcacaagtactttagacaacaactttctactgtgggtcacatagacaggctacccaagtgagtttcaatattctccaaaacaaaggaagtgtaaaagggtaacatggagaaaataagagaaataaggagtctgggtaacagaatgaaagtttgataactaatctgaatagtaaattgtatttattacagaaaaaaacaaaattatattacacaaaaatttagctaccttttcagtaaaataccgcatgataaagaagttttgcagaagcatgttgctctgacagagtacaatcatgcacttttcgctctatgaaatcagatgatggattctcacagacattctgataaaaaacatcattttcatggttacggaagtttggaggttgctacatgtgcctctgactaagagagaaggcatacacctgtatttagcttccaagatttctaacttgatattttcaaattgagttaacaaaatcctaccagttgtggccaaggaacacatatgttaggcacaggggatgcaatggtacaatgttcccccagtgccgccatcacagatctcatggtctagtgggttgagtgtgataaggatgatattaaacaacactttaaatctaccctcgtgagggcttcaactgggaagaatagagagcacaagggagaggcaacttaagcatctgagtaacaggaactgtttgagaggcacctgcagaggcctagggttgagagatctgatggtcagttgagaaactgaaaatttaggacagctggaggtttagggcaatgtgagcaatgtggccagaaatgagcctaaagagttaggcagaggccacatcatgaagggttttgatagcctgagtatggagttgaggtttgtccygagagccactggggagacatgaagagcttcaagcaggaggataatcaggcttcaagcaggacaatgaggctcagtgaggacaatgggatggtgacagggcaaggtcacgggatggggaggaaggctgctttaggggctgctgcagcaacctcagaaaaggataattgtgacatagactgaggcagtagtaatgggatagagagaagtagacacacttgggagtagctacaaagatctttctggataacatgtaggtgcaggcagagaggaaggaagaggaaactggaggcatcatacatgacaacagtcttaggtggagccattgcaccactactgaatcggagtattctggaggaagtatagactttggagagaaattatgactttagctcaattactgagtttaaggggtctggagacattcaagtatagatgcccagggaacaaatggcactacagagacttgcaagggatcaaatttctgtgtatgggatcacacagggaatccaagtagagtgagatgaaagagaataagggtagaactctgaagaacatcaatatctaagggatgagaaaaggaaataaagtagtctgaagagcaaactgagagtgcagccagacagcagtaagaaaactggaaaggcctgtcttcatggacgtcaagggaaagtggcatgaagtggacatcgccagtatctaatgctgcacagaactcaaaagaggaggactgaaaaggacttattggatttaatggtgggaaggtggttgcggagaaaaggaccagtggttgataggggcagactccagtaagaaaggtgagggtgaggatggtcatacagtggagatagttatgacacaaaattattcaaagaagttaaagaggagggaaggaataaattggggggaatagggaaaatatggttgaaagaattagatatttgagttgtgctttatttttagacagaagagattgaactgtgtataattacagaaacgacaaagcaatacagaaagagacgatgatacagaagagaatacatagacgatgggcaagaccactgaggaggcagaagcccttgggagccagatgtgagtagaagaataaggaggaggaggaggaagtagctgagaggggagccaggcatgaaggtggaaataagtgagtctatgtcttggtagcaggaagctctgggagttttctttgatactagccatctcttttctgtgacgacagaggagaggtgatctgcagtgacatggggaggagacgtgtttggagtgtcaaggagaaagtaacataaaagctgcctctctagaaaacaggagggaaaaagctcagtagagaacttaggattgccaagcaacattaaggactcatcaatttatcctggtaccaatccatcttgtgtaattttctgtcacaatctacagttgccatatatgaaaacagacaccctggctgatcttggggatgaaaccatgaaatatagtattttgtgatacattggttatgaggcttcttcatgacccgagcaaaacacacccacaaaaagattccaaaatcatttttattttatttatttattttttgagatggagtcttgctctgtcgcccaggctggactgcagtggcgcgatcttggctcactgcaacctccgcctcccaggttcaagcaatgctcctgcctcagcctcctgagtaacagggactacaggcaagtgccatgacgcccggctaatttttgtatttttagtagagacggggtttcaccatattggccaggctggtctcgaactcctgaccccatgatccacccgcctcggcctcccaaagtgctgggattataggcgtgagccaccgtgcccggccccaaatcattaagtgaatccaggaacagtaaattttttctcaaacactctgaacctagcaaaacggagaagattggccagtccatatatctacttaactagtagcaagatactactccattaatgtgataatcattggttaaatgatttttgggttatacattaaattcctatgtgactgtgtagtatgattagtgacccaaaagttgtttaattcttggaaactggcaaaatgaagtatctagaattgcaatgctcacaaatggacctagaaggtagtgactacaccaaagatctgatacattgtgaatcatggataaaccgttggctgctctgtctttttggaatcactcctccatttctttccattgaattcctttttggggtctcctatgttctaggccctgtggtcctaaccctcatggggctttcagtagggaaggaggcaggcacaatggcaaatgtttaaaacccaggcagaatcatgcagtaagaaatgaagctaaaaggttgagaaatagtagaggaaagtgaattaattttgtctgttggattagcacacacacacaaaatgtactttcaagtttctgtataaaacacgataaaacttttagcattctgtgacttagggaaaaataacagacagaacacttaatgaaaactaagtttcttctttcatttaaaaatgatccttattttattttcaagttttatacttctttggtctgtgatgaattagagaaactgtgcaacttgccaccaaacctcttaattgccttaattgcttggtttatttttattttttattttttttatttttatttttatttttagatagtgttgctctgtcacccaggctggcgtgcagtgcagtgcagtgcagtggcatgatcacagctcactgcaactgccacctcctgagttcaagcaattctcctgccccagtcacccatgtagatgggattacagatgtgcatcatcatgcccagataatgtttgtatttttagtagagatggagtttcaccatgttgcccaggctggtctcgaactcctgacctcaaatgttccatcagcctcggcctcccaaagtgctgggattacagatgtgagccactgcatgacccttggtttattcttgaaaagaatacctcagtttgaaaataaaacctcagtgaattgttccaaagacattggttctgtacttctgaactttctcttgaagtctggggctggtacagtagtaagttctcagcagacagattttcagctggagaacagaaaccatattcttgctcctcgtggtgcatctagttgctaaacttcctaattctaggttttggaaaagctatgttcaaaccagtttgggaaataagccaataattccaaaggatcttgagccctcttggatctcaagaaggcaggaaagaagaaggcaaaggtggaggaggggaagggaaaaaatcagcatggaaaaacaattagcaggaattctgttttagttccagttttgttacctactggctatgcaaatttaagcttttcgggaggaggctgggactagatggtgctttgacatttaaaggagtttatttctattaggaaaattacgtagtttggactaggtagtattacattactgaatcaatacttgctaacaggacttaacttgctgactgccatgaattatttagtgagtgaggtctttacactcatactcaaagtccacactaatgacctagtarttattttaatcgattttcaatgaactgtgaaatactctgttggcataccaataaagtaagaaacactgagagcagattctgtgtcttatatttatatctttccgctataattctgaatagcaatcagtgtatccaaaaaaatagttctgtgtatgttttattagaattatcattgaacacttctactgttttaagaaaccctaatttggattcatgtgagccgaggaatagatacgatatggaagcatagaattttgaagctgacaggattttggagaatacgcaattcagccccttatagcagctttcaaacatataaacaaagagattatacaatgatattcttagcagaattatgtgtgagagtcaaaagttagaaacaactttaatgtgcatcagttggagaatgtatatataaattacagcttattcatataatgaaatattagttagcagttaggtaaatgactgagagctatatatatcaatgcaaataaatctcaaaaacctactgttgaaagaaaaagcaagttgccaaagggtatatacagatagatacctttcacataaggctacaaatatgaaaatggaatacatgcatgtgttaaaaattatagagacatacaggaatgtggtaataaacatcaaatttaggatggggttacctcaggaaggcaagaaagaaggtacraaaatgagagaagaaaagaaaccatcatgtacagagacttccaatttgttcaaagacacaaagcaggttagaagtgagtatcctagagaatacttttcactacaaactactaactggagcattaactactaatccattttggagagcttctgagacttatttgttaatatctctgtaaacttaaaataaaatcctacgttccccaccgactaaatagacccctcctggcccagggaccccagagaaaccttcaataactgagttcctggccaagcgtggtggcgcacgcctgtaatctcagcactttgggaggatgaggcaggtggatcacctgaggtcaggagttcgagaccagcctggccaacatgrtgaaaccccatctctaataaaaatacagaaaattagctgggcgtggtggcgcacgcctgtacttccagctacttgggtggctgaggcaggagaattgcttgaacctgggaggcagagattgcagtgagccragatcgcactattgcactccagcctgggcgacacgagcaaaactccgtatcaaaaaacaaaacagaacaaaaaaacaaaaactgagttcctggctatgatgagaaacaaggtcagacatgacttgttatgccctccccaccccttttggagtttagacacaactgatcatcattaatgttaaaatcgagatcataagtctgacacaacagactttttgtggcaataggtaacaaattataaataagacctaaggccatgaaaggcaagggtgaagacacacctgcaggccattaatcttgctacacagcatccctattttaatttaaaacattcctttctgcgaatccaaattttacacagagtcttactgcttcaaccaattgtaagttaaagaatctttgaatccatttttaacctataagccctcacttcaagataccctgcattttctgggccaaccaatgtatacctttcatgtattaatttatgtctttgcctgtaatgcccacctccctaaaatgtataaaaccaaaccgtcatccaactgccttggggccacttactaaaggcatcttgggtttgtgtttaccctgggctctggtcacttatattggcttggaataaccctctttaaaatatttcacagagattagttttttcaattaacatctcctttagacacaaaatgatagtcacataaaatttaacattgtaagagactttaaaaggttatcttctataattcctcattcaggttttgacttttcttcacaacatgtcagctaaatgatgatccactgttttattcaaacaaaatactgtattgcaaaaggaaaaataaactgcagataacacatttctgacctcaacgaagacatttcaggatatccctggagaaaatctgcaccccaccccaaaccaagcaatttaacttctgaaaaatcgagttaaacaccagcttcacttgtcttccttagcttaggtgcttagttttggggtgaattcactcatacagcaaagacttactgagcatctactatgtgccaggcaccatgctcagtcgtagggcacaggagtgaacaaggcagtaccttggggtttgtggtgtaaaatgaattaaaaacagtgaagaaggattgctctgcgccatcctctgctttaccctctactctaagaggtaaatagagaaaatggggtccattatgaggcccctctgaaattcagtaagccttctctgagacagatgagtgctcaccgtgggtaggaaagaagattaagaaagagtaggaatagtgttaggtctgggagtaaatggatcaagggaccccaacatttgctggggctccctttatataactctgctcctttcttcctgtctgcttttcttctttctcttgctctaagcctagaatcttcagctgctctggtccacctggtagaaaacagctgaacaagcttctgacctttgcatcagacagtccaggtactcagcctatattccaagtctcaaaagccagaatgcccagaaagggaatcactggccaggcttggattagcctcccatcccctggacgataaatttactgtgctcatcatgtgtggtacactaggaataacaggtctagcattggccaggtacctgccaacagaactaatgaagggttacattgtaatatggcagttcctggtaccacttcgtagatagcaagtgcatcattgtttatatgtgctcaaaacatgttgggagaacaaacacattcaatatattactagatgttaaacatctatgttgatgggatcgactctgttgcaaagcttggctgctgcatgttattcaggttcagaagactttaagcaatttgacatccatgactccttcacttctggggtatcgggcaaaagcaggggacagcacgtaagaatacaagagactcaaaaagctagggcagagagttaagacagagcccacagagttgagttgtaattggctgagtgaatagggttgctggggtacatggcaaggtgaggactgaaatgtgcatctggaagcaggggcagctgtgggacactggtgaccaaaatacaagtttcctgccctcaggaagcctccattttactgggagatgcagagcatatgtaagcaaacaaaaggaattattacaaattgagatcagtgccatgaagtaaattttaaaaaacaatgaaacagctgcagagagagaaaacttccactttacataggatgtttggggaaggtgatattgaagctgtaccctgaaggattcagaaaagtcagccatggaaatggccaaggaaacgtgctccaggaagagggaacagccgtgacatgggaataatcacataatgggaagacgaggtgtggcgctgtccagaagtgggcagcaggagcatgtgctcatttgattaaaaaaattgtttgccacacttacagatataggagaaagtaattcaaatcagtgactttttaaagaaaagcaattttatttccctgagtatatgattgacagtaaacataaagtccttctatgtaaaaaatggctttgttctagttcaggtatacagagataacctgaaagaaaatacaatttcaaaacagcaacatcgcaatcaggatgaacggcctggtttttgaaggaaaagaacagactctctcatcagagaggctcaggggaaaagaattatatcagtccagtctagaaacaaaactttatatgccaaaaatatgcttcaatgtagagagagaaagtgtacttagtttgaaaaaaaagcaagatgaagtctccttagaaacaccagatgcacagaccagaatcaattatctgagaaaaagcaataaggtggctttactttgcctgaaatcagaagcttgcagctactacttttcattttcatacaaagtgggagggttgaaatacaaccaggactactgatgtttatgtgcttaaacaaaacaaaacaaaacaaaaactagtacaagtcaccatctattctggccaacttgccactgctagtagcatgtaggatttgaatagaacctcgacctaccaaaaggtcatatcactgaccaaaaaaagagtattttcaggcaaaataagttcaggaccagggtcctacagagcatggattggtgacaatgagtttttaaaaggtggggttatatttatataattctcttataggcacattgctatgtgccttagcattgctaagccttagcaatgataattcatagctaaattattgaccttagatgttaatgctgaatcctaaattcagacattgtacttatttgacataaatcagaaaaaaactggtaaaagtcaggaaaaaaaatctaactagaagtatacaagaaaaatktaaaaagtttctgagttmtggggagatagtcagaaaacaaaaaatttcagttagacagagacaattacatcaagacatctatggtacactatgctggctatagttaataacaatatattatactgtatattttcaaattgctaagagaggagattttaagtgttttttaccacaaaaaaattagtatgtgagagtatgcatatgttaagtggcttgatttgactgttctgcaaggtgtacatgtattaagacatcatgttgtgtaccataagtgtatacaatttttccttgtcaattaaaaaaatttaaaaataacacaaaacaagggacaaaaaagtgctttaaaaggaagggaagcagtagtgaaccgtttcatattgggaacaaatacttgtttgggaagagtatatttttctgtctgattccttggctgggtcagctgatccatactgcagtaatattttctgggtttagaaataatttcactttgttggtctcactttattgttcaactttttataacttgaagcctgtcttggtgaaaatggagacctcagacataatgttatttacagtctttctcctcttctgtcagcttaataagagtattacagtgaccactctttcttcttctagtgcatgccttgtagatgagtgagaggtaagaggaagtgccaataaatcagccaaagtcagtacctctgggtcagtggttcataaccttgactgaatattaaaatcacctggggagattttaaaaatccccgtatcagggccgcactcccagcctggcaaattagcatctctggggaggaggccaggaaccaaaatcaacatgtcagggtgtggaccaaggcacgtgttccttaaaacgtctggtctttctcaagcagctggtgagaaccactgatctaactgcttttctcacttcaccatgtgcagcaaccacctgagagttttattaaaatgcagattcccatgcagcagacctgtgtgggtgctgagggtctgcaattctaacaagtctcacgtgacgctgttgcttctgctgctttccacattttgggtacagagactctggatcaggggttctcaaaatataatccctggatctgcagcatcagggtccacagaaatcttgttggaaatgcaaattcttgggcctcatcccagatctagtaaatcagtaactctgggggtggaacccaacagtctgttttaaccaaaccttaaggggatgctgatgtacattgaagtttgagaacaactattggattggataatatttttgagtttacttgagtgttaggcttttgaggggcaagaaagggagataccatagtttatccagagcaatggagaaggcttacttgtggaaatgagatcaggcttcacaggaacccaggaaaggttgcacaaccaggaaacacgtgatgacctactgtggcacagcgaggcatcccaggaatgtggtgtggtctggaagcacggagtgtcattctgcacctggagtgactgcccaggctgcccactgcctggccagtgcactgtgtctttctctagtgccttctcttagcatgactctacaatgctcaccatctctgcacactgcagggtggcttagttggagtcctagaatgaggcggcttgaatcagacttctggtttcttatttgcttagcctcagttttcttgtcttgaaaaatgggaatactaatggtacctatctcagacttgttgtgggattaaatgagatagtgggtgtgatgtgtttagagcattgcctgggacccaataactgctaaactataaygcttccattcttgtctacaaaaagcttttttaatacagtttttaaagaagtttctgagttttaagtaaacatgtaaaattgttataaataaatagctaaaaaagtattggtcctagatagaaatgcttagaagttatttggacagattgttgtaatgtaggctacattgaggaaatggtttcagtttggaatggctcaaactaaacttgactctggaaaatctcaggaaaatatataatgtaaactattagatgcaatctgtattgatttttactgctttgtatgttttaaaatatgtgcatataactcttcattacttgatagaaaatgttgttacatatgagtatttctaacacaagttatgagctctctgtccatacagagttcataaaataggaaaggatacagacaattaataagtcaacaaataattaaggagtcaattgctgattgtgataatttttctgaagaaaatgaataagaaggagagattgatttatacatataatgaatatataatttattatttattaattatattgactcataattgattatattgatttatatgcataattatataatctgtatatattgatttatttatatatatakgtgtgtgtgtgtgtgtgtgtgtgtgtgtgtatagagagagagagagagaaagaggcactgattgactgtgggggtgatcaaagaaggtgacatatgagccaagccctgacaggtgagaggacagaagggatcccaggctcctgaaactgagcacatccagtcagcaaagggcttggtttagcagaggaagagaggcagctccagaagcatggtgagtgaatggagaatgaggctgaggaggcaggcagtggctacagctcacacagctgtgggctctggggagaaggttttgttaaaggaaatgaaatatgattgaaaaattttaaacatgggagtgatataatccaatttgtatttttaaaaaacgggtggattcaagaggatctttgaattcttatctaaagctgagatggygactctgtcgttagagggtctcaaagctgtcttacggcacatacgaaacagttatacaccatgacttttggtatgagttccatatagcagtaagattctaactagacaaatagtgccacttataaacttaaacagtagctgggggaaaaaataaacaacaagccattcttgtgatttatcctaaccagccctcatcactgctgcatcatacgcatagctccctgctctcctctggtcctctgggtcctctgcacgctttcacctgcccagcctccactcccctccttctagcrcttctatctggtcagcaattctatccctgacaactgactgtgctgcttctcctgcctgcaactcattagtttgtcccataatggagggyctgtctcttttctgtcacaaaggactcctccttttgtcccaatggcttggcctggactcaggaccattttctcccttacaattcatttgactgcactctccttgagaaaaaggattatatctggctcactattacatgcctgtattcaccatggtgctcagcacatccaattgttaagtcttcaagaaatactgctggatgagtgattcctctgcccatggaggcagcttgtatggacacgagatacccctggacaatgacctctctctatgcactcaatcctatccttctcctgccagcttctacattaggaaccagaatggctctgtgccaattagcttctcccaactaatttaaccaaagttggatctaagccttcattttttttttaaaccttactcagtcaaggcacaagcttgggcacaattgaattttcctgaattgtggctgagttttaattgtggcaactcagaaaaagcaagttttcagatgttctgcgtcatttccaggataataataacagctcacgttcattgtgcattactgtttgccaggcaccatgctgagtgctttgcaagcattgtctcctttaatcttcactgcaaccctctgtgaaaaatatgactatcctcattttacagataaggaaactgaggcttagagaggcaaagaaatttgcccagggttacaaagctaacaaacaggagatctgagatttttcaagatccttctgaatgaaaaacttgtacctgtaacaactatgaaaaaaaaaactaaaataaaatttgtgataacatatcaacatactgcaaattagcactaggaaatggataaattaatggatagtgatattgaaaaagtagatggtattatggaactctattgcataattggatagattttaatttctctgtcatacagcttctctttacttccaaaaaaatctgttttcataatcctttaccagtatatcagagcatatttcagattttttggattctaaagtattttattttaatacgaaaaacccaagaaaaccagggaggcttagaaaatagtccatatcttagatttgaaaagcctcaaataaaagacacgaagaaaacctaagaattctcatatataactgaaatatatgtgtgatcaaagccatttagattttaaaaccagcattacttatagaaagtctcaggaaccaaaccagctcatctttcaaagtttctttgagtgacagttctaaagtgtccaaaagacagattttccatttttttaaacttaacatcaaagcacatattcatatatttatttatttaaaaagagattgcctttaaaaatgcctaatgctcctgatgttatttgaaacacacacacacacayatatatatatataaaaaataaatgtctgcctacctagaaaactgcagaatttcaactcacagcactaacctagtataaggcagaacttcagatggaagtcttcttaaagaatattacagtttttcttcagagaaatagttatctacaggactcttgacttttacatttatgctttttgtcatgagtagtttatgaaatattacataattcatttaaaatatatcaagaatcagggaaagcacttctatcaaaattacaaataaaatttaagagaataaatggtaagtgttttaccagtcttaaccaaggaaaataattttccaacacttgggaaaattatgaactcaagttaagatttaatcttgtagaagaagttacacatctgtatgtcatttaatttaccaatttcagtgattttaaaacatctgtactgatactactgcatttataattatatgcctacataatccagtgttttggttaggagactctttcagggattccgacaattaggaaaacytaggtatgggttacacttcaaaaacctgtagctttatagctacaggttaagtcatttaaactttctgagtctcccttgcttcatctgtgctatagagaaataataatattcacctttttccttcatggaagtgatacattgagcagaggcgtggacctcgtagcagtacaacctgggttcaaatccaggctttcccctctgcaacaaggccatgcaaagccttggatacgccccttatccctctggagtctcattttcctcatctgtaaatttagaataatactcacctagtaagatatgaggattacagaaaatttatgtaaacatttggcacttattaagctctccataaatggtagctattaatgcttatggacacatttggtaaactacattttatatgtatggtattattaacctgtttccttagatatataatttcttagtgacagactaaacacatttctgcaaaaaagtagtctatacatatgaatatattttcccttaagtattaaaatcttgctgtgatagtctttttgtgaaatttgttatgagaccatgatatgagcaaaactcaaaataatgagatctttttctttcttcttcctttgctgtatttcagtctatagtcttcagtgaattttcaatccattcattcattcattcattcattcaacaaaaacttactgaaggcttactatgttacaggatctatgctaagggttatatttcaggaggaattagcctatatattttactacaggtggtttcattaaatatgatgttattatgataaattatttcagtagtatagaaaagttagcataatagtttatgtaaactgtaaagggaattaagaatatattttgacaatatgttacatattctttagaaaatcattatatgcaacctcttttcacaaaggttactatataaattaaatacatcaaaagtgttgtccaggggcagtggcttacgcctataatcccaatcccagaattttgggaggccaaggcaggtggatcacttgagctcaggagttcaagacgagcctgggcggggcacggtggctcacgcctgtaatcctagcactttgggaggcctaggcgagtggatcacgaggtcaggagatcgagaccatcctggctaatatggtgaaaccccgtctctactaaaaattcaaaaaaaaagaaattagccgggcgtggtggcgggcgcctgtagtcccagctacttgggaggctgaggcaggagaatggcgtgaacccagcaggcggagcttgcagtgagctgagatcrcgccactgcactccagcctaggcgactgagcaagactctgtctcaaaaacaaacaaacaacaacaaaatagaccagcctggtcaacatggtgaaaccccgtctctacaaaaaatacaaaaattagccgggtgcagtggtttgtgcctgtagacccagctacttgggaggctgaggcagaagaatcacttgaacctgggaggcagaggttgcagtgagccaagatcatgctatcgctctccagcctgggcgacaggagtaaaatcccgactcaaaaaaaaaaaaaaaaaaaaaaaagtaggaggataaaccaaagaaaggaatttaaaaatggaaacaattttaaaaataatcatagttgtaactcagtattaaattgtcttttggagaagattcttaagggttttatatctagaataacttaaaaaaaaaaraaaaaagaaaatgggccacaactggagacaatcaaaaaatcattcttctgcttttactttattatccttaacagtcataagccatagtctatttctaccaatggaaaccatcagaacttcacaagatctgtatgtatacatttctatgatattctaagttttttactttaataatactatatcattataaatataatcatttttaacagtaaktgagtgcctccaatgggcagcaattgcaaattgaaagacaaaagtacaagatgagcacagcagggatcagtaaactattgcctgtggaccaaatctggcccaccagctgtttttgtaaataaagttttattggaacacagcctgttccatttgtttacatgtaatctatggctgcttcttgatatattagcagaattgagtagttgtggtagagatggtatggcctgcaaagagtaaaacatttatgatctagtcctttatagaaaagatttgccaacccctcctttataataaaggtattaaatgatatttataccaattttgagtatcaatataaattaagacagaattaaaggagaggctgctgtacattcagggccttttaggcttatgcctgatgctccatggacagataagaagtaggataaatgctatacttttggagacaaattctctacaagcagttcttgctggactgtgggagcactgctattcccccactgagataacaaaaatttccattgttaagccaccaaacaaatgcctaccagagttgtataattttccttccttttaggagcygggaattttatcttatgactcattttttgttgttgaaaatattgtgattctcaatatattaataagcatcacaactaatttaatttaaaaatagctattattgttacaattaaaatagaagaaaaagcacatgtgttacctgtatgttgttcttcaatccagacttgcaaatacatgaagaggagtagcccagctactccaaatatcagcacagagaggaagacttgtttggggttcatgaccatttcagatggctgcatttctccttatttcagaatctgaagaccacatgatttgttttcccgtaaaacttcagtcttttcttrttctctaagagcccaattccataaagtaacctagaattttaaaaagaaatctacattgtacatttctgctaatattaattctcaaatacggcataaatattcactatctcaacaaggctgaagacttaatgtgcacactaatgctctgaagacagaaaagactgtagtaggtgttcctagaatggcaattttctattgcatacttttatcttatctaaggaatgtattatcctacagttaataagtaacatcctaacatttagttaggcaaagtctggccagacttaagtcctcctgtattgtaaagtgtaaagtaaggtttgggataccttaaaataattgcaagtaggaagaataacagaatgggttgttaaaggacgggttttgaaaaacatgcttgtagaatgtaaggaaaaatcacctcctgtcttaagaatatataaagttcaaaaattgaaggtgtaatatcatttttctctcatataaagtaacagatttctccaatttaaagagcacatttaaaatccttcagaggcataaaaagataaataataaaaggtcagggttcaaggacccctcccacaataacatgaaattactgaaatctacctcagattacagaaatctacctcagtaataaagagctattttatttttttaaaaatactgaacagattttcttttagaacaatctcgtttaatataaccttaaccttttattttttttaaaaaaaattgcatccttttttgagaatctgatgaaaatgtgagccctctctttagaaaagatttacaaaatcttacataaaatgccaaagtgttcatgtaccttcactgaaacccacattaagaatccctgttccccagtgagaacacgtggatgcagggaggggaacatcacacaccagggcctcttgggggatggggggcaaggggagggagagcattaggacaaatacctaatgtatgcggagcttaaatcctagatgacgggttgataggtgcagcaaaccaccatggcacatgtatacctatgtaacaaacctgcacgttctgcacgtgtatcccagaacttaaagtaaaataaaataaaaataaaaatagaaaaaacaaacaaacaaaaagaatccctgttcccaatgaactgccacacaagtatgcagtaagccgtgtggtgagctcacctagttagcagcccggctaatggggccaaggtcacggctttgtatctaacgctggccagaaaccctggctcagttccttggccacagaacacaacccctctgggtgagccgaataaatgtttcttaaatgtgaagatatcatgcacattgctgcatcaaaaagttatctcttctattccattgcctcaaaatatttgaggagagtctttgatggaaaatattgattttgcctaaraggtgttttatggggtgccagttaaaagttaaaaactgctgtgggaaattgcttgtctggttaaaggataatatttaggtattcttggcaaaaccaattttcagggctggcgaggtggctcatgcctgtaatcctaacactttggaaggctgaggctggaggactgcttgacctcaagagttcaagaccaacctgagcagcatggtgaaaccctgtctctacaaaaaataaaatagattttaaaattagcccagcgtggtgccatgggcctctagtcccagatactggaaagcctgaggtaggaggatcacttgagcccagaatggtggaggctgcastgagccatgatcaggccactgcgcttcagcctaggcaacagagcgagactctgtctcaaataaatagataaataaataaataaaaaacaaaaacaaaaaaactgtagctgatatccatgataccacatttaactttgtggtgatagaattcctcatctcttaaaggagctcaaaaaatgacctcagaaatcagaacaagagatgactcaatgggagccctcctgtcaaccctgcgtttctacagtccttaaggctggctggcatttcccttgagcctgaaaggttgtggctgcagtgagctgtgactgtgccaatgtactccaccctgggcaacacagcaagatcgtgtctcaaaaaaaaatacaaaataaaaaaccagttctcaaacaaatgagcttcaaagataatgtaagaattcagaattagaagtgaatgtattaagtaattagaatgatttcttgattagaaaaaaaaacccaccaaatagttaaaagttcttatgcaaaatgagaaaaatatcatgtcatgaatacttcttttccgtttgtttgtttgtttgttttgtttattatttttttgtggtggagtttcactctgtcgcccaggctggagtgcagtgccgcaatcttggctcgccgcaacctccacctcctaggttcaagcgattttcctgcctcagcctcccaagtagctagaattagctgagccacacccgactaatttttgtattttagtagagatggagtttcaccatgttggccaggctggtcttgaactcctgacctcaggcgatcctcccgcctcagcctcccaaagtgctgggattacaggcgtgagccactgcccctggcctgaatagttattyttctttatattttaactctgacctggaaggggccagggtaagagctgtttgtcagcgctacctaagatgctttctcaaatccagttctctgagttctctgaggaaggggcaactgtttaacatttcactagtgcttttgaggatttcagacatttccttgattcaggtagtaaagaaagtttttaaataagtagaagagccgagagtattatcatactgcttatttgatgggtgatactttgctcttatattgaatctaaactaaaatattatgggcttccaaacatatgtaacaaagaacagttcccgagggagacttgcaatttgaggtgttccaaattgaatccctcaagggaagctatgaaatgaagccagctttctcttctcttgatgctgccattaaacaatgaacagacataattcctgggtrcataagaagattcagaaaggaggaaaccagttaaacaaaatctagtactaacaaagaaatagttgtttacaagaagaaagagacttttacaatctgtctacataattaaaacttatctcagaagagaaaaggctagaagaaaactcataaatccaagcagagccacgaacctgtgggaacggtgggagtaagagccaaaaggagtactcctcgggggtttgcagaggaaaattattacctacgatgctggaaaaagattaagaatttgcccttcctttcttcaggagatgttactatcctctgacatatcctcctgggtgagaaagcagtagaaaacccataattgttattatggcagatgtgagtaggattgagtgattaaagccacaaggcagaaaggcaatctggtgtaaaatggagagatatgtttgattttctcccatctcagtccattaacccaacgttggcgttaggaaatggctctcattaaacaaaggtgaggtggtaggagcagcaggattgctttaagcaaacctgaaggtcagctgtgatgggaaaacacacctatttggagatcatatatctatctccaagcctgcggaaaaagtgcagactactggagatttaaattacttggaataatgctgctttatgtacgagcattatacatttctacagccaaaggcttcctgtattttgtacaactccttcttctcccttcccataaacagaatatcttgagcctaaaaggtacttaaaaacttgttgcattgaactgaatttggagctccaataacaaaatacaggtaattgatactttttatagttgtatttgtaaatccttagtcctaacctccaaatgaagaaacatggagaaatactaaaagatagggtcgatgtttctttgttaaaaatattttcatttgcatatctttttatttatctctaacaattatgaaaagaaatataattatttcattctgtcatctcttttccaaaagtttaaaaattatttttttaaataattgtggctacaaacggaagtattttgggacttaagtatagcaataaattacttgctgaagacaattcacataaattaaattatgagtttcccagtttagcagacatttatttttttatttttatttttttgagatggagtttcactcttgttgcccaggctggagtgcaatggtacgatctcagctcaccacaaccttcacctcctgggttcaagggattctcctgcctcaggctccccattagctgtgattacaggcatgcaccaccacacccggctgatttttttgtatttttagtagatacggggtttctccgtgtttgtcaggctagtctccaactcccgacctcaggtgatccgcctgcctcggcctcccaaagtgctgggattacaggtgtgagccaccgcacccagcagacatttatgattttaaggaaggagtggtggggttttggggaatgtcggtttggaccaaatgatgcaggcagtttagcagaaaagaaaccaggagtcgggggcttgctgttcccagatgagtgttggtagcccactctttctcccctccggtagcagctacaccatcctctatctccttcccactctctgagtaaaccgagaccagcagggatgaactccctccgtttactactaacccttacatgtttaccttcattggtccacacccacacatctttgcctctgtctctgaaaaacaggagtcctcacttttgcctctatcttttccaggttctggtgaaacgcaactccatcaacacctccccagtccgatcttatcctctacgtcttttctcagtgacaccttcctctgtaaacccctacagtgatcacctaatatgtgtgtgtttatctggacactattctgttctattgattcaatactatactatttcttttttttttttttttacttttaagttcagggatataaatccagatttgttaaataaactcacgtaacaggggtttgttgtacagattattttgtcacccaggtattaagcctggtactcattagttatttttcctgaccctctccatcctcccaaattccaccctctgataggctccagtgtctgctgttctcctctatgtgtccacatgttctcatcattgagcacctacttataactgagaacatgcagtatttggttttctgttcctgggttagtttgctagggataatggcctctagctccatccacgtttccacaaaggacatgatctcattcctttttatggctgcatagtattccatggtatagacgtaccacattttctttttttttaattwtattattattatactttaagttttagggtacatgtgcacaacatgcaggtttgttacatatgtacacatgtgccatgttggtgtgctgcacccattaactcgtcatttagcattaggtgtatctcctaaagctatccctcccccctccccccaccccacaacagtcccccgtgtgtgatgttccccttcctgtgtccatgtattctcattgttcaattcccacctatgagtgagaacatgcggtgtttggttttttgtccttgtgatagtttgctgagaatgatggtttccagcttcatccatgtccctacaaaggacatgaactcatccttttttatggctgcatagtattccatggtgtatatgtgccacattttcttaatccagtctatcaatgttggacatttggcttggttccaagtctttgctattgtgaatagtgccacaataaacatacatgtgcatgtgtctttatagcagcatgatttataatccttttggtatatacccagtaataggatggctgggtcaaatggtatttctagttctagatccctgaggaatcgccacactgacttccacaatggttgaactagtttacagttccatcaacagtgtaaaagtgttcctgtttctccacatcctctccagcatctgttgtttcctgactttttaatgatcgccattctaactggtgtgagatggtatctcattgtggttttgatttgcatttctctgatggccagtgatgatgagcattttttcatgtgttttttggctgcatgaatgtcttcctttgagaagtgtctgttcatatccttcacccactttttgatggggttgtttgtttttttcttgtaaatttgtttgagttcattgtagattctggatattagccctttgtcagatgagtaggttgcaaaaattttctcccattctgtaggtgcctgttcactctgatggtagtttcttttgctgtgcagaagctctttagtttaattagatcccatttgtcaattttagcttttgttgccattgcttttggtgttttagacaygaagtctaataatggcctctagctccatccatgtttccacaaaggacatgatctcattctttttcatggctgcatagtattccacggtatagacgtaccacattttctttatccattgtatcactgatgggcgtttaggtcaattccatgtctttgctattgtgaatagtgttgcaatgaacaaacatgtgcatgtgtctttatgatagagtgatttatattactgggtatatatcccgtaatgggattgctgaagttgtctgtacaaactattttcagctttttttttttttttctttttacattgtatttttctgaaactcttactaaatgttgaggcctttcaatatacctcacaaggttttcaactgctctgccatttattttaaaacattccttttttcttaagctgtaatctgggtaaattcttctgagccattttgcaacttagcaatttctctgtctttatctatatcttagtgtttattttgcctgttgtgttttcctaatgccgtatttttcatttctaatattctgttcctacttatttcatattcacttgttcaagtttcatttttctttgcttttcaagttatatatcctttaattgaaaatcatcctttatctctttgcatatttaaaatatatatctaagtttttgtcagactgcaatataaaagttacattttgcttgtagtattgtggcctctctttcttagcattagatttatttctttattttaaattctgatgtttacattcattttagtgaaaggctttttgattttttttttttctttctctttatcttctttttctctttgtcacttccttccttatcaaacaactttgcagttatctctaaaatgctctttgggctctttttcagagctaagttttcccatcattggcttggtgtcccctgagccagagtgacattggtactagtgcaggcaagagagttagcctggagattagctggttttccagcacttctgtgtctgtgtctgagtctggttctctaagcctagcacattctaaacattacagcttcaggtggagattgctaccattcttttacttccaccttctttctcactggggcatagattggcaccttagtccctgtccttgtcttcaatcaatgagcctgcctcccagctcttacttaggagttaatcttctagctgttccagcagcttccaaatttaaagtctaacaggcttactacagtttcagcccatttcaccatttttgttagtttacttctgttcttgattttgagtcctggttatgtcttcctgttttttcatttttaaattttatctgactttggtttgtttagtgagcagactagaatacccaaatataaatacacttgtctttcttgaccagaaaccttcatgtaacttttcaatcctagttttctttgtctgtaagaacaggtcaataaaatctaccctatgtatccaacagctttacaaaatattaagtaaaacagaatgtgatggtcttttagaaaactataaaaacagtatgaaatttattataaagcaccttagtataaattggcttaaggggtttagattttcatttgataggcttggtaggcacataaacgttttgaaaatgtattgtttctatcaaccatagtgaaattaaactgtggtatgtagtttaatgatatttagtcaattatgggccttggtttatttaaagggaaagaaactgagatggtactcatataagtctttgtaaaatgtgtaacaaccataaatagtaaatatttactaaattgtttttaattaaatgaagaatgtgacctttatcatttattatttcatttactagtttagtagttaaataaccccattttaatctattttaatactgtgtaattcctgaaattttgtaatcatttctatatgttttcactcaattctccaaaaaagtgggattgtttaaactttgattttgagataattttagacttacatagatgttgtaaaaatatcacagagtccctgcataccttttatccagtttcctcaaaggataacacctcacgtaagcacagtacagttaccaagaccaggaatttgacaatggtgtatgtggcaagcagaataatgagtctcccaaaaggtccaccccctaatcactggaagctgtgaatatgtgacattacatggcaatggagaattgagtttgcagacggaatgaagtttgctaataggccaacttaatatagggagatcattctggatcatctgggtggaccccatgtaatcacagagtcttgaagaatggaagagtgaggcagaggaggaagtcagagtgatgtgatattaagaacgactggaatcacctttgttcatttgggggataaagaaagggaaccatgagctagggaatgtaggtggcctctagcagctaaaaaagacaaggaaacagattctacccagagctacagaagggaccgcagtcctgctgacaccttaattttagcccctgtcagacttctgacctacagaactgtaagataatgcatttgcattgttttaagccaccaaatttgtgataatctgttatagcagcaaagaaaacgaacacagtacaatgccatttgcaaagtatcattttgaaggaagacagtagtaaagttgctttgaatgggtaaaatccttctgggattttttcacatatttttcaaatggtttctcagatgcagtgtttcatgggctattcctgtaataactcaactgctcactgtgttttgtcatacagaacacagaaatatatcctttttctagacactaatttataggtgcttccttatacatcttgttgctttgattttctctataatttatttaacaggtgtcttctacttttagctgttgtgattaagacttaattataattaaaatttttagcaagacaaccctttgcccttatattctttgttttagaagaaaaagttttaaactcatattttacattctagtattcagtgtagagtcttttttttttcattttaagcaacaatagtctatctttagactgcacaagctaaaaccaaaggcctttgtacacatttgcattaaagagtgaaaaaacacagaggttattgcaaaatgatttgttcatcccatccctcaagtctgcttgttccccattctaaagatttcaaagttttaaagaatttcaaagcactaaatttgagtgaaagaaaaatatcatatttgacatttgtttacacatagtcacaagaatatgcagcatgcacttacatgccagttaagcatcatcaggatcaatgttaaccaacatatgttgagaatcatcattgcattaagtaacatgtaaggtacatctggactcaaattataatttattaaagagaccaatgtagatagagatagaagattttaaagggagccttttaaaaaatttttggagtcctgggatttttctgcggtggtacaaaaaaatggtaatttgggtggtcatatctaagatgacttgaaggagttatcagtgagggatgtgtctgatgagctaagwtaactatggattgggtaagtcagttagcaactcaaatgagatgatcaagttttagttgtcgtaattaatcatgtaaactaagaagtgctgaataaagctcttgaataaagaccatgattgggatccattgtgctgtaaccaatagaaacgagcaggttataagcaggaagtggaattaaagaataccgaagtgggtgctgtgttgctgctctaatatccattctgctcctgtgtgtggaagttacacagtttagaatggattgcccccacctccagctccagccatgggcctgaaatagtgtaatcccaacagtgtcatcctatgctccttgtcaaaatagttggttcgggaatgaccacttatattagtttcctgtggcagccataaattaccacaaatatggtggcttaaaacaacagaaatgtattctgttacagttctggaggccagatgtctgaaatcaaggtgtgattagggccacactccccttggaggcaaggacagaatcctccttgcctctttaggtttctggtggctctaggtatgtggttgcgtagatctagtctctgcctcccacttcacatggccttttcctctctcttgctttctctttgtctctgtctctgtctctctctgtctttctctctctctctctctctctstgtgtgtgtgtgtgtgtgtgtatgtgtgtgtgtgtgtgtgtgtgccttctcttctgtcctgtatcttataaagatacttgtccttagatttagggcccatccagctaatctggcatgatctcattttgagatccttaacttaattacatcagcaaagactcttttaccaaataaaatcacagattctgggtgttagaatgtggacatatctttttggggtcaccattcaacccactacaccaggtgactcagggcttcccaggctgcagtgattattttgcaggtgatctgagaatgaagctcagagcctcagttggatggytatgggaagtaatattttatstcctagtgaatgtgaataagaaagcatgtagttcctgctgttgctggcagctctctggctgccttgatggaagccagtctgaaaaataagctggcacagaggaggctaagctgagaaacctgtagagaaacagaggaaaagctctgactggaccccaactagacccaccctgcctctgaatttgtaaattaggcaagccaatacatttttatttctcaattttattatgaggcaattttaaggtatagtgagggaactaaaaataagctatagttagggtacagcattttttgcatgataatcagaaataaatgataataaatatgctaatatttcttaagcagttatattctcggtgctactactctaagcattttatwttgattatttaacttaattttcacaataaccttgttttcttttcagacaagaaatatcatttaagcacatggtcaaattcagagttcagggagagatgaggtaagaggtatgggtggagacagactgcagagggccttggtgtctaaattatggtgattacatttgttctgtggacaagaagaatgaatagatttgtgctgtggacaagggagtggaatgatcagctttacttttggggaagatcacccggatgtggtgtgcaagctgactgaaaataaagaagaccacaggcattcaagtcaacagattagccattggccagggaatcaccagaaaagaactatactagattatagtccaatataaaaatctttctgtcctttggtttatatgcacatcttgccttgttcttggaggaggtttatcacagcggttcggtatgcagattctggagcctgactgcctgaattcaaatcacaacttgaccacttactagctttgtgacacagctcattatgtaacctctatgtggtcgggtgtggtggttcatgcctgtaatcccagcactttgggaggctgaggtgagtggatcacttcagatcaggagtttgagaccagcctggccaacatggtgaaaccctgtctctactaaaaatacaaaaattagctggcatggtagtgcgctcctgtaattccagctactcgggaggcagaagcatgagaatcccttgagcctgggaggtggaggttgcagtgagccaaggtcacagcattgcacttcaacctgggcaacagagtgagactgtttcaaaagttaaaaaaaaaaaaaaaaaaaaagtaacctctatgtgcttcagttacatctaaattggggataataaaagcccctaccataaaaggctgctgcaaaataagttagtacatgaaaaatatttagaagaatgctttgcccatagaaatgatctacaatattaagatgttagtatctttatattccagatgcttagcacagggacagctacattgtaggtaatgaataattctttgttgaaagattggatactgttacttcaaaagacagtctatttttactgctagagaggtttattctttccattcatgccaattcaaatcaatcaataaacacctattaggcccagatatgattaaggccctgtgctagacaatgtggcaaagccagaatgagtaagatttaatacctgatcttcatyagagaatatttgaacctatctgtttataacttgtactggttgttctagttgagctttctagaacaactcataacaaatctgttctctcctttacatgaaacactttcgaattattgaaaacaattatcctgtctacacttaatcttttttactccaggataaacaataaatatacacaattccttcagccatttagtataggacatggtttaggagaattcaatcagtttaatcatcctctccagacatattctagtttgttaatacctttttgtaaatccagggctcagaaatagatacaataatccaagcatgattaaatggacaaatagtgttatgagaatcagcaccataaaaatggtggctaaacttgaatgcatccaccggtaaaatgggagaataaagcaggttatatgttagaagcttgggggattcttttagctcacatgaaaggaaaatacaagatataaaaaataattcaaaggaaaagatcatgaagtaggaaacatattataaaaaacgtgtgattaagaaaccgagataggatattatcacacaatatgcatgaaaacaaacttttaatatacattaataaacaagtacaaggaaaggatttaaggaacagtaggaatgagggttaactatgaaatatggccaaaaaaaaaaacagtgaaaaaagatgaacctgaaaagatgattttgtcagtgtcaaaagtattgagagaaaatcaaaaaggaccaaagggttctgaagaaaggaattgaaagatgagaaatgtagtatccctcccattagtttgaaatgtcagaaaagaagaagygtatgtgagatataccctttaaccttaaataaaaataaggtattttgggtactatgtatataatcaatactaatttaaattttcattttctgtttcagtgatgacagtacatgagtttttcatgtcaattaaatagaagaaattgcctttcaggcggatgtagtataatatataaaatcaagtgaatttggtggggtgttgtgactgaaaatagtgagatattccaaaaacaggataatgcaggagaatgagaaagagacaaagattttaaaaagcttcatagtgttaagatctcaacaaacaagtaaacaaaaacgagcagcatttaagaggcaatgggcaacagagtatcctagaaagtcattatgatctccccacatacttcgtatgagtaaaaagtagttcaaattagattattagccacaatgtaaaacagaatggatcaagctggttttgaaatataaatatttacagtaaaatagaaacatctgcacttaatgtcaaatagttaaggctacatctatgcaacaaattattgtgacaaataatttatacaaaatgtttggcattgctcaatattaaacagtgtctagatatattttcaaataaatatttttatggtgagataataaaatgtaaataaatataattgttttggttattatctagataaaatgtgtttatatgttgtcaccttatttctgaattatttttgtcacattatttctgaattcccccttctgctcatcacataacaataaaatccttgtagaagtattgtatttatagagaatcctccttccttatgccagatatgtgacatagctatttctgttaatgattagcagtcaatacctatttggaagattgatttttttccttcatcatatattatctaggcatcagatgtgttgttattgtagtgtgtcttttatagaaagaataatactgctctccatacaacagtaaaattcaatggctaacataaaactctataaaacactagaagtatgtgtatattctgaaattaatatgatttgtttcttataaagtttgtgagccatgaactcattgctagcttcaagcaatcacatgcaaatatttattaagttctactatatgctccctgtcttatctctcgtttcacattctagcccatgtgtggttagcctgcaaccatttaatagagaaatagcatggactaaaacagcagaggtcctaatccagaaatcttggtttagaaaagacaactaaattaaatccgcaaaaatatctactgacaagaaacgtataggaagcgcttaaggcattttcaaaaaccacaccaaacagtgctcacattaaaattccaaagtaactgcctaaggtagttactgaaataaatatagatatatagagaagcctagaataatgccagcaaatcaaagcagaaataatatataactctgaaaattaattccagaaaaacaagcttaaaatacaaaacatgtaaaaaaaaactgcattgtaaaattttaaggataccataaaattataaataattagtgataattttagtgttatgaatatgctggttaattttagttagtttagttaactaatcaatgaagagaatttctagtaaaatgggggcatattggactcatgcattgatctctactccctcatcaaacctctctaaactgaaaggaaatgaattagaaaagaaatacagttacaaaatatagataagggaagggagaattttacaagagagacatcacaaagtttttttgtttttttgtttttttaattatactttaagttttagggtacatatgcacaacgtgcaggttagttacatatgtatacatgtgccatgttggtgtgctgcacccatcaactcatcatttaacattagttatatctcccaatgctatccctcccccttccccccaccccacaacaggccccagtgtgtgatgttccccttcctgtgtccatgtgttctcattgttcaattcccacctatgagtaagaacatgcagtgtttggttttttgtccttgtgatagtttgctgagaatgatggttttcagcttcatccatgtccctacaaaggacatgaactcatcattttttatggctgcatagtattccatggtgtatatgtaccacaatttcttaatccagtctatcattgttggacatttgggttggttccaagtctttgctattgtgaatagtgccacaataaacatatgtgtgcacgtgtctttatagcagcatgatttataatcctttgggtatatacccagtaatgggatggctgggtcaaatggtatttctagttcaagatccctgaggaatcgccacactgacttccacaatggttgaactagtttacagtcccaccaacagtgtaaaagtgttcctatttctccacatcctctccagcacctgttgtttcctgactttttaatgattgccattctaactggtgtgagatggtatctcattgtggttttgatttgcatttctctgatggccagtgatgatgagcattttttcatgtgtcttttggctgcataaatgtcttcttttgagaagtgtctgtctgttcatatccttcgcccactttttgatggggctgtttgtttttttcttgtagatttgtttgagttctttrtagattctggatattagccctttgtcagatgagcagattgcaaaaattttctcccattttgtaggttgcctgttcactctgatggtagtttcttttgctgtgcagaagctctttagtttaattagatcccatttgtcaattttggcttttgttgccattgctttggtgttttagacatcaagttcttgcccatgcctatgtcctgaatggtattgcctaggttttcttctaggggttttatggttttaggtctaacatttaagtctttaatccatcttgaattaatttttgtataaggtataaggaagggatccagtttcagctttctacatgtggctagctagttttcccagcaccatttattaaatagggaatcctttccccatttcttgtttttgtcaggtttgtcaaagatcagatggttgtagatatgtggcattatttctgagggatctgttctgttccattggtctatatctctgttttggtaccagtaccatgctgttttggttactgtagccttgtagtatagtttgaagtcaggtagcgtgatgcctccagctttgttcttttggcttaggattgacttggcaatgcaggctcgtttttggttccatatgaactttaaagcagttttttccaattctgtgaagaaagtcattggtagcttgatggggatggcattgaatctrtaaattaccttgggcagtatggccttcttcacgatattgagtcttcctacccatgagcatggaatgttcttccatttgtttgtatcctcttttatttcattgagcagtggtttgtagttctccttgaagaggtcctttacgtcccttgtaagttggattcctaggtattttattctctttgaagcaattgtgaatgtgagttcactcatgatttggctctctatttgtctgttattggtgtataagaatgcttgtgatttttgcacattgattttgtatcctgagattttgctgaagttgcttatcagcttaaggagattttgggctgagacaatggggttttctaggtatacaatcatgtcttccgcaaacagggacaatttgacttcctcttttcctaattgaataccctttatttccttctcctgcctgattgccctggccagaacttccaacactatgttgaataggagtggtgagagagggcatccctgtcttgtgccagttttcacagggaatgcttccagtttttgcccattcagtatgatattggctgtgggtttatcatggatagctcttattattttgagatacatcccatcaatacctaatttattgagagtttttagcatgaagagttgttgaattttgtcraaggccttttctgcatctgttgagataattatatggtttttgttgttggttctgtttatatgctggattacatttattgatttgcgtatgttgaaccagccttgcatcccaggggttaagcccacttgatcatggtggataagcttcttgatgttctgctggattcggtttgccagtattttattgaggatttttgcatcgatgttcatcaggggtattggtccaaaattctctttttttgttgtgtctctgccaggctttggtatcaggatgatgctggccacataaaatgagttagggaggattccctctttttctattgattggaatagtttcagaaggaatggtacgagctcctccttgtacctctagtataattcggcagtgaatccatctgatcctggactttttttgattggtaagctattaagtattgcctcaatttcagagcctgttattggtctattcagagattcaacttgttcctggtttagtcttgggaggttgtatgtgtccaggaatgtatccatttcttctagattttctagtttatttgcgtggaggtgttkgtagtattctctgatggtagtttgtatatctgtgggatcggtggtgatatcccctttatcattttttattgcgtctattggattcttctctcttttcttctttattagtcttgctagccgtctatcaattttgttgatcytttcaaaaaaccagctcctggattcattgattttttgaagggttttttgtgtctctatttccttcagttctgctctgatcttagttatttcttgccttctgctagcttttgaatgtgtttgctcttgcttctctagttcttttaattgtgatgttagggtgtcaattttagatctttcctgctttctcttgtgggcatttagtgttataaatttccctgtacacactgctttaatagtgtcccagagattctggtatgttgtgtctttgttcttgtttgtttcaaagaacatctttatttctgccttcatttcgttatgtacccagtagtcattcaggagcaggttgttcagtttccatgtagttgagcagttttgagcgagtttctggatcctgagttctagtttgattgcactgtggtctgagggacagtttgttataatttctattcttttacatttgctgagaagtgctttactttcaactaagtggtcaattttggaataagtgtggtgtggtgccgagaagaatgtatattctgttgatttggggtggagagttctgtagatgtctattaggcccacttggtgcagagctgagttcaattcctggatatccttaactttctgtctcgttgatctgtctaatgttgacagtggggtgttaaaatctcccattattattgtgtgggagtccaagtctctttctaggtctctaaggacttgctttatgaatctgggtgstcctgtattgtgtgcatatatatttaggatagttagctcttcttgttgaattgatccctttaccattatgtaatggccttctttgtctcttttgatctttgttggtttaaagtctgttttatcagagactaggattgcaacccctgcctttttttgttttccatttgcttggtagatcttcctccatccctttattttgagcctatgtgtgtctctgcacgtgagatgggtttcctgaatacagcacactgatgggtcttgactctttatccaatttgccagtctgtgtctttcagttggagcatttagcccatttacatttaagattaatattgttatgtgtgaatttgatcctgtaattatgatgttagctggttattttgctcattagttgatgcagtttcttcctagccttgatggtctttacaatttggcatgtttttgcagtggctgctactggttgttcctttccatgtttagtgcttccttcaggagctcttttagggcaagcctggtggtgaggcaagctctcagcatttgcttgtctgtaaaggattttatttctccttcacttatgaagcttagtttggctggatatgaaattctgggttgaaaattcttttctttaagaatgttgaatattggcccccactctcttctggcttgtagagtttctgccaagagatccgctgttagtctgatgggcttccctttgtgggtaacccaacctttctctctggctgctcttaacattttttccttcatttcaactttggtgaatctgayaattatgtgtcttggagttgctcttctcgaggagtatctttgtggcgttctctgtatttcctgaaactgaaagttggcctgccttgctagatcctttaaggacttctctgcattggttattctagttagccatttgtctaattttttttcgaggtttttaacttctttgccatggcttcgaacttcctcctttagctcggagtagtttgatcgtctgaagccttcttctctcaagtcgtcaaagtcattctccatccagctttgttccgttgctggtgaggagctgtgttcctttggaggaggagaggcgctctgctttttagagtttccagtttttctgctctgttttttccccatctttgtggttttatctacctttggtctttgatgatggtgacgtacagatggggttttggtgtggatgtcctttctgtttgttwgttttccttctaacagtcaggaccctcagctgcaggtctgttggagtttgctggaggtccactccagacacttgtttgcctgrgtatcagcagtggaggctgcagaacagtggatattggtgaacagcagatgttgctgcctgatcgttcctctggaagttttgtctcagaggagtacctggccatgtgaggtgtcagtctgcccctactggggggtgcctcccagttaggctactcaggggtcagggacccacttgaggaggcagtctgtccgttctcagatctccagctgcatgctaggagaaccgctactctcttcaaggctgtcagacagggacatttaagtctgcagaggattctgctgccttttgtttggctgtgccctgccccctagaggtggagtctacagaggcaggcaggcctccttgagctgcagtgggctccacccagttcaagcttcctggccgctttgtttacctactcaagcctccgcaatggcgggcgcccctctcccagcctcactgccgccttgcagtttcatctcagactgctgtgctagcaatgagcgaggctccgtgggcgtaggaccctccaagccaggtgcaggatataatctcctgctgtgacgtttgctaagaccactggaaaagcgcattattagggtgggagtgaccctaatttccaggtgccatctgtcacccctttctttgactaggaaagggaattccctgatcccttgcacttcccgggtgaggccatgcctcaccctgcttcggctcacgctcagtgcrctgcacccaatgtcctgcacccactttctgatactccccaatgagatgaaccctgtacctcagttggaaatgcagaaatcacccgtcttctgtgtygctcatgctgggagctgtagactggagctgttcctattcggccatcttggctccacccttgtttcacacaaagttttataaatatggaatgcagacaaaggagtgataactaactttaaagatcataaaagctgaaatgaaagttttttcatagataccagaaagaagcaagatgttgtttgctataaaatccaggaaaggttgaccaggttgccccgaagagggaaggcaagagagaaggcaacagattatcagaacaaaagtgaggcaaagaatgtggggacaaaacaaaacaaaacaaagtaaaaccaaaaagttaaaataactatatgtcacagcctcagaaagataagagaaaatattggttccaccaaaaaaggaaaggccctatgtttaataaaaagacaagaaatcagaaagaaaaaaaaaaaacgcttttgcaaatgaaaaatataaccaagtgaaaaacatatgagttggaagataagttaaggtgattcttagaaagtaaacaaaaagaaaaaaaaagatggaaaattgaagaggaaaaaaagccaggaaattggattaatttaagagattcaacatctaagtaataggaatttcagacagttagaagtgagaaaacaaaatgaagaagaccattaatgatataattcaagaaaatttcagggaactgaaaaacatgagtttctagatctaaagagatcactctgagtacttagcaaaatggataaaaaaataaatacactatgggacattgtcttgacatttcagaacactggtaataaagaaaaggttctatatatgttgtcagagaaaaacaaacagatcacatgaggaggatcaagaatcaaaattgtgttagacttgtcagtagcaacactggaatctagaataaggcaatggagcaagaatgccttcaaaattctcaaggaaaacaattatcacttaaaattgtattaaatgctaccaaattctatcaatgtgtcaatcaaggttgtgtgtgtaaaataaacattttcagacaagttctcaaaatatctacctctcggaaagataccagaggacataacaaggcaagggagttagatgagcggaagaaatgggatgcagaaacctgatctgaaaaaggagagagagaaaagaaaatttckattggttggcaggataacagctgtgtaacaggtgtagagagcaagcatttcaaattggagcaaaacagatgcttgggagactgtgtggaaagataaaactggcagacaagatggtttgttttaaaatctagacagaatatttagacaatgatgaagagcttgcttggataagtgatacaaacttagaactttgagcaaatgaaagagtaagatgctattaacttcagggaaaatagaaaatgcagaaaaggaaaaaattagatgaagctgcacagctaaatcgtggataacatttacattgtcataataatgaaagcactgactctaaacaaaatggcatcactataatggaagaataggagggttggaaggaccaggacatacatgcatggttgaatgaagaaggaacaatgactaaatcctctcatcccatggtgggaagtcagtagataaagcctaaaactaaaatatcaagttccaatatagatattgttgagagacaaaagtaagcaccaaatataaaagttcacatgactcataaccagcagagccagaatccaaacataggcttgtctgtctccaaattacattgcttctgtgtcccctgctaataaaacttccgtagtgatgccaaaattatgaaatgtatcaaaaatttcttttaaaggagctaattttttattagttacaaaaggggttgattaaataaatgataacctaagtaacttagtgctactatcttaagaaaacattgtattttctaacactggcaaatagtttttcatcattaacccacatctaagtgcttacaaaagtggacatccacactgaaataccacagccacatagaacttccttttttaacrgctacaagttcttgctatcacaaaatatatcttctgaattcctgacccctttgtggcattttacctgcagactattttgaaaggcttcacaatcctggcttccacagtggtaatcattgctttttcaacctttaacaaactcatccctttctctttcttctgtcttggagttctccccttctttctcttctctgcttcgtcctccaaaaaatgacctaatttctcaaacaggaaatctcaatctgtatttccagttccaataactcatctgttctggtctcatatttctcaatgcctactagacattttcatttgtatattccaccatttctcacacttcttaatttgtccaaatttcttatgatcacaaacagggctcttcctgatctagctgttgatcacctcgttaattttatcattcatacctgtccctcaaactctactctccagcaaaactaaactatttaaattcttaagaactagctgcattctttttttgtctctggacacatgaacactctctcttttctttttaagatccttcaccaaccttgggttgatctctgttctttagaactcatctttgaagtgatgctcacagaatcctccatcccaaggacagtgccttagacacagtgagtggaacagaaatatttattgaataaaaaaacaaaaagactcttgggtagatgatctatctctagacagtctcttcagttcaacagaaataatggtgcttcattaatctttcttaaacattgctttttaactatttttcatttgcctatgtaggggaggaaaaaattttccctctactgttttagggcttttttctttttcagatggacctaataattaaattggcctaagacagatcaacaggagaaaaacatacacatttatttaatataagttttaygtggcacaggagccttcatagggaaatgaagacccgaagatgcagtcagtgatgaacatatgtactgaattagacaaagagtaggaaattaggaaaatgtgacacagcaaaggagctaggggtagagtccttaattcagtggagaaatgactaggagcataaggattagtctaagtttgtttgcacagattttcctgggcctcaacttctgttcttgatgatagtaagagtgacgctttccttctggtaaagggaggacatctttctcttaggaatttcatctcctgctttggagaaacagaagaaaggtcagagtgattttttgcacctgctgcttttcagatgcttttaactcaccatagtcaatttgccagagtggcttattttaaactcttcacctaaaaagccatcaagatccttatttaaagtggaaaactcttacgtctgcctttctaggttcttcataaattggtcactatacctctgcaacctaatgtccaactgccccttctggtgtactgactcctgggccctccatgcccatctccatatccatcaatttgtttttgctctccactacatctgtcatagaactttcttcttttctgattctcagtcctaaaacaaatggctcaaggctgatgtccccagaaagtcttcttggagttactctagcatactctgatgataacagcaatactttagttgtcattcatcaaatatattttcaggacctattattacacaggcagtgtttaggtattgggatacaaaggtgagcaggagaaaagaaagaagttacaacaaattgaacatatgattataaagtgtgacaagtgctaaaatcaaggggtaaggtagagaatattgggtaaagggcacaggagacctctttggacattttggtcagaggaagtatctttaagaaggtgatatctaagctgcgatctgaagtatgggaaggatctaatcatgtgcaaagttgtagtgaaggaagagaggtttccaaatagtgaatcccctatcaaaatgctctgaaacagaaaagaacttaacacatcctaagaactgaaataagacagtatggctggagcttaatgaatgaaagcaaagtggtctagaatgagcttagaaagataggcaaaaagcctatcaaggccttgaaggcaattctaaagggaaacagataggcattgaatggttataatcagaggagtgaaaagattatacctatttttttttttttttttgagacggagtcttgctctgtcgcgcaggctggagtgcagtggcatgatctcggctcactgcaagctccgcctcccgggttcatgccattctccggcctcggcctcttgagtagctgggactacaggtgcccaccaccacgcccggctaattttttgtatttttagtagagacggggtttcactgtgttagccaggatggtctcgatcccctgacctcgtgatccgcccgcctcagcctcccaaagtgctgggattacaagcgtgagccaccgcgcccagcctatacctatgttttatgatcattcctgttgctgtaggaggaatacactgagagacaaagaagctaattaggaaggaggctgttttaatctacaaatacagataatgctgatgacctggccagggtaataccactagagataaaaagaagtgacagaatttgaaattattttttgagatgacatttatgatacagggaaatttttgaaggagyaaatcaagagttcagttttgatcttgttgagttttagatattaatgagaaaaccaagtaagaggtatcacatagggagttgaatatgtaagacaaggtctctgtggtagatagaattatgagagaaacctcaatagtcctctataatcccctcctcttgaatgcaaacaagacctataattcacttctaatgaatagcacatgaaaaaaggtaaagaaattttacagaaataattaatgttcttaataagttgactttgagtcaatgtaaagggagattaccctgggtgaggctgacctaatcagtttagcccgttcaaagagggtccaggacttccctgaagttagaaatgatctcctgctggccttgaagaagcaaaaaactacatcttgaacttcctatggagaggggtgtcctctaggagttgaagycgtcagtcctatagctgcaaaacacagaattctgcccacaagttcaagcttggaagatgactctgagtttcagatgagaataaaacccagtcaacagcttgactgtaggcttgtgatattctcagcagagagtccacttaagttgttcccatactcttaactcatagaaactgacatgatatatgtatgttgtttcaagctgctaaatttacagtaatttatcacmcagcaatagaaaactaatacaagaggtctaggctgaatacataaatttagaagtcataagcatatagatgatcactacactttgattacaaaattaaatttactagaaatataattctaaacttatatgcacctaatagcatggcatcaaaaaatataaggcaaaaattgatagaactataagaaatggctaaatccatcgtcagcattttttaaatrtacttctttcagtatttgatagaacattcagacaaaattagcaagaaaataagaatatttgaataacagacttaaaaactttatgtaatggacacacatagtacactatttccaaaatgtataaaacatatattcttctttttttttttttttttttttttttgagacagagtctcactcattgcccaggctggagtgtgcagtggcacgatcttggctcactgcaagctccgcctcccaggttcacaccattctcctgcctcagcctcccgagcagctgggactacaggcacccaccaccatgccggctaawtttttttgtacttttagtagagacgggatttcaccrtgttagccaggatggtctcgatctcctaacgtcgtgatcctcccgcctcggcctcccaaagtgctgggattacaggcgtgagccactgcgcctggccagaaaatatatattcttttaagcagcaagaagcaaaaccaagccaagcaacatatatcagcagtatgagtccatttttataaaagtcaaaaacaggcaaaactagacaagatttgcttgaggcaggtacatatgcaaaacaggagaatccttaacaccaaaatcaggaggctggttacctcttgaagagagagaatgagaggagaacacagagggtatgctgagacaatgctaaattcccttttattttccttattctatttccccttacaataggtgggatatgagcagaagtcatacacacatcttcatggcctggtcccttaaaacatcctataagattctcacattatctctctttctttcatctgcagaggaaccaggggatgacttgaggtggtgaaaggtggcagaactgccaaatggaagtaacctaggtccctgaatgacttaatggagcagaatttctccattgatcctcacggaattgtgtcatgaatgtgaaacaggcctttattgtattaaatgcctgagatatttggttggtcaaatctcccctgattaagcagttaatctcccctgacaaaagtaggacacttcaaagatactggaaaaattctttcccttcagtgtgatagtgaatacatggatatttatcttttattattctttaaattgtcaatatatgtaattttactttaaacattaaataaaatatttaatgcaaaaaagtggcaactagaactctgaaacttctgctattgatgaagtaaaggcttttttactctgcctcctttttttgaaaaaaagaaaacaaaaatacaaagtataaaaaccactaactgtcaagcatacctgctaaatygtgtaaaatctagagggagaagagaacaagaatcgacacatctaccttcaaaccttgagcttaatatagatttttgtacaaataatattagtcccaaaaggctgtccagcaaatcttactggaacagtggtacataaataggtgataaagaaggtgtatgttttcctactgaaactcagaataactggggacatcaggctggagaaaatagcacactctcctaccgtttttattagctatgtagtggtctcccagatgagggtactgtgggagaaaacagaagaaaagcgcatgactacaaaatcacaacacagtgttaggggctttgcatgtttccaacttgagggtaagtgaaataaacttggtgacagaggatattctaaacaagacccacactggagctgtargctccccgtgtacaacacctcctgccattccacatcattagtccccttcaagaatggaaaacaatcaaaaagtggcttatgaactagaggcgcaggcaagaggaaagggtgggcatggggaggacatggattaggcacaaaagaatgcaggaggtagcattacatgagtcctcctagaagaaactccttgatcatgaaatctatttattcacaaaataaactaaaataaagagagaggagtgaaaagactggttttgtgcactgactacatttaaatatgaaaatacgaaacataatataataaaaatgtaaccaaaatctaaaatgaggaaaggaaattgaaagattctacatttcatttttattttcttagtatacagtaaaactgacttggtggggagcatacagtcctatgaagtattgtaaatgtacaaggttcataaagagaacgtggttgttttacattttattttaccacgaaagtgttttttctaaactggtcagtaaataccacaaaaggcaaaacaaaaaacaaaacagttaatcattgagttctacatgcaatatcaggaatacttctcaggtaatgattaggtatttatttatttccaataattatgattttcagtgtaattttgcttacttctgaagataggttttatagttctactttgctatttcttctgtaattgcaatgttttaatacatgcacaaataaaacagcttcactctccattgttttacttgtcctttctgagactttaggtaaaatgacctattaaataccatgaatgaaaaatggttatgtacttggtctagaggtctgcattctgtttgcagggaattcaaatatacttataatatctagaattattccccaaggcacagtcttttacacggatttattatcaaaagtttccatttgtgcaaagtcttattatcatatttgtatattcaataaacttagagtacaaatagcttccagctaataattacctacacaaattgcttacatagctattttcttttaatgtcaaattctgtatggaagtccacctttcatactgctataaattcaaacaacttttaacttatgttattcatggtcttggaacttttaaaaaatatctgaaataaaaatgtattaacagtttaataagataactaaatgtgattttacccagttttcttgggtgttgaaattcttagtggtatgagtgtcctttgtcttaccactgatataaatatgagtagcatgggagtgggagggggataggggtataagagcaaagctgttatattattacctttattttaagataatcagtacttcttaagaacatgctccatctccacaacaatttgttactattttcttcttattaaaacaatatcaagtttaaactgattactaatatatttgtcttaatataagctggagatgaactgtaattttcctaataaggagattccatcatagtgaattttaacctcaagatagtgtaggctggcagtatcaagagaccagttctttctgactttttcagaaactcgaaactctccctctttgctattatttataataatttatcaacttactatatgaaatatgagtggaaataactatccatattcttatctttggtttattatattgtacattaagatacatgatatattgtatgttaagatataagaagagctacatgttttctttttatcatataccaaaaggcaccaatctacttgctctgattaagttaccatacatatctgcaggagccctaaatatcatcttagcaccatgcaaagtattcctacagggacctgattagaaatattatatcatatgcttttacagtatgaggaatattttaaacatttattttgaggttaaaattttcctgaagaaataaatttttatttacaaatttataaatatttttatttaacctcatttactttgtccctctcatagaacctgtacttgatggatatttgttgactaaatcgagagctttgtcttttgataattgtatacctgtgttattaggctgtaagtatctgcttctaatatattagcactaacagtgcttgccagtcttcctgaagttgcagagttgagaatcacacaggattctaaatgtcactgtagccctggccagatctattctacactgaaactgcattctgctaggttgtagacattttagtgaaaatcatcagtaatctcatactttgttttgtaggcgagcaccaatgtttaggaaagacatggaagaataaaacacatattgccatagatgactcatttccctttaaaatttctcatgttgaaaagttctcatatataactggaaaaatgaaaaaaattattttatctaatacatactgatattatcatattatgtattgtctcctacattgcctgaaacatattcttctaaggataattttttctttagtgcttatatataaattayggaattattatagaatgttgaattaagatatttagatactttagagaagacactctgttaattaaacaactttcaaacatttaagctcacttcaagatataaaaattattttatcctttggatagctaacttaaaatcataggatattttttctaatttttattttgaaaaatgtctagcctacagaaattagcaatataacaagtggcatataatctctttatctagatgtaaaaattattaacattttgccataattatttgcctatttctccctttcttacacttaaaacatttctttttgctgaaccatttgaaagttgcagatatgagatttcacttctaaatactttcaaatatatcctctccctaaagacacatccttctatataaccccaatatgatgatcacactcaagaaattgaacggggatgtaatactgttatatgagctatagcccaaattcacattccttccattgttccaatattatcctttatagattttttttcatccagaatctaatcaagaaggatggatgtcttgcaattagttgccaggtctcctagtctcctttaatcctgaacaatatttcaggctttttttgttaatcacactgacatttttgaagtgtccaggttagttgtagtgaagaaaatctaccagtttagatttgcctgatcgtttgtttcctcgtgattagactcaggttaaacatttttagcagaatacttcagaagagacttttgtgtcattcttcatgtatcataaaaaaaatacatgatttcaatttgtactacttctagtgatgtcaagtctgatcatttgattagctggtatctgtcagacaccaaccataaagggatgtccccccttttcaattaataagcaatctgtagggtgacatgaagagataatgtgaatatcctgtccccatcaaccattcacccaatggcagatgacttttttattattcttgttatggtggttgcaaaaatgtggctctactatttctttttcattatcagcttgtattcttcagtgaaacacagcctttccttctctccacccaatctgtgcattcacacactctgggttcayggatacttttcttagtcaatgtgctctaatccattacatacattattactctttatatacaaaagatcccaaatttggccagggagagtcttttaaatctggctatgtccttctgatgtgccctcatttgtttttgagcaattccttgctttctgggacaaaatgttcaagagtttcccctaaactagttgaagcaagaaggctttaaataaaaacagtgctaacccaactcagttttaatgcagcattttgaattcagtcacgaatgttagcatagtatctaaaacatagtaagtgcccatcagtatgatataggtcttccttaactattttataccttgtttgaatcttttgtgcaattcttaaaaatataaacctttaatttataacatagacttttatattactttttcaatttcacctatttttttcttattttaatttttgttctcctttatcttccttattttcatataggggccatatgaataggtaactttcagaggatttttgttttcttcaatatggtaaaatcttagaccacttcttaatgccggaatgtatacaaacagcagagcataaaacccccataaagtgaagccttttaaaattcctgaaattatcaagggattccacatgtcagaggaagtaatataaaggcatgcctgggcatttatttattttggggggtgtaagaaattcaacagccctgccctactttctaaataaatgtagcaacaccccaaccacatctaaattatggagaggaaagagaaatagaacgaggagtatgatatttggagaggtcacaaagaaaaaagtggggcatcatagcttacaaactttattttatttacttatttgtgtattttttattagaatgtgagggtggatacatgtgtgtgtttgcatatggcacatgtgtataactttgtacatgtggagttagagatgttcactcaacatttattcaacaaatatttattacacttcctctctgaagcaggcgttgtagtatttgttaggaatacaaggaccatcaaaaccagatggatccctatcttagcggttaattaaataattatacaaataaatgtgaatttgcaactcttctaagcacaatggatacagatacataaatgtgtatatacttatatgtattttataaagggatttaattcaatttaggggtaagagatggttcatttgaggaagtgacatttgagttgatattttcaaagtgttaactaagagttaactagagaatgcttgagtttgtgtttttaggggatggggggatgggagagagctggaatgttaaggcagcttgaagaaagccaggcagctgaagctgagggaagaatgggagcatctaaagagataaaagtggaggaggctgtccttgctgggctacaaaaatcaggtgctgagttttggtctttatcttaagcaaagcaatggtaattcatttaagtgttatccgtggttgsaaggtgatagttttcatatttgcattttgaatgcaaatataatatctggtatcccattggaggatgaatttgggggtggggaacaatgccaggagatcagtcatggagacattgttgtttttctacacaaaggatggtgaatgcttacacttgtgtgacggcagaggcagatttttgtaattaattttggaggtcaaaatcaaagccttggtaatggaattgaaggagaagtaatgtcaagattaaaaccagattggactatgggaaccctgcacccttgaggtgagatgagcagagatcaggagtttgattttgacatgtttcatttgatgtttctttaagatagacaagaagaaatgccaggtgtatgagctgtatctacaagtgggcaatgtagagggactttctgagctgcgattatgttttatagagtgttctgcattaaatatatatcaataatctcaagscattcttactggttagtacttggtatatgtatgttgagaaatcccaaggtgaatcaaaggtctgaggtattagatgaacaagctctggtacctgggatttcagtgattttcaaattcatttctattctaaatgctgttctaattccctgatctgcaaaatctgaaaaaatgactttgctagacttttagcaagtagcaagtggtatatttataggttgaagttacaaaagtgatcatgcaagaggaggattagtatttaaattatttaacaatcagcacaatttggactccagctacaaataaccagtaagactataccagtgcatctagctgaatgccagccctgctggagtaataaaatctcattctctgataataaaaattcctaattgaaaatagagtgcaaatgttagaaggtaaaagggtgttgatagttactgctttttgtccaaaaaatgtcactaacacctaagcattttttttaataacttgagaaatcgatcttttggggaaaaaaattaccctccttctaatcgactgttcaaagaatcctgtaaaaaactaaattaatttagatgataatttctttaaaactgtgcctatttaattttwaaatgtattcattaaagtatataatcaacatcactattttacctaaatccttacagactatatttgcttaaagtaagctggacctataggtcaccactttaattccatctgtgaaaagaaaaaaaaaagaaagaaaacaatagaaatgaccgcaaaactaagtggaattttgggcttcttggtactgaaattaatggaaaagtaagtatcgtttcttcatttgaattgacggtgtcatcttatttggtkttcccattttcacataaatctaacagagccttctgaaatttcttttaccacattagctgggtatatttttccttttcttaaccatattctttagtgttatagagttcagtttagggtagcattgaagtactatagcaaaaggaggcactctgaacaatgggagtggaatgtgccatatctgtttactctgacaaagaaggttttctcttgtatagcagagttaacagtacaaagaggaaggagggttttacttccacaatctttccctctattccatacaaaaataaaaagcagagtaaaaggcagatattccaataaaatttcactgcctatatagatctttgtgctgttcaaatgaaagaaacaccttattttccttatcgcctccccaatccaacaacttcaatttcatcttctctgaatccccattgcaccactatactcgcattagaaattgtaacaaaagtagaccgaataaagttaggggtcagtctgaggttgaatgttgggccattcaacagaccaagaagcttccagtaagaatgaacaatacacagaaaacaatcacagatcaaattgtgttctgtacaattgctgcatcctctttgtcggaaaagctgcctctcttgatttggtaaaacatgtccttctatgcagagaattttgtgattgtgtcaaagcaattggttattcacacacatacacaccacacacacatattattgacttcaatctcaagtgctgcgcttacattaaaaagcttctttctttaaaaagaataatatatacaatggcctaaaaatatgtaacgtrgaccctgactgggaagaaatctaagaaaaaatatctcacaatttgataaattcaagatggtgtagctaacactcaaattacatttcatattaactcttcattttcaagagcagatcttaagttacagtccagtagacagaagtaagaaagtttgaatttcactctcaatttcctccttgcttctgggatcctacaccctcctgtatgttgtatatatgagtaatcttcaaaaccctctaatctctctgcaaatactgtatattgcacaaagagatgttggtgtgcttttaggatgtcaagagtgcacaggttaaatacctctgaaacagacaaaactgaccacaccccttaccctcaacttctaatatgctgcacaggattcatctaccacaagcaatataacaaaattctaatacagcagtttatttgggttggaaatagcttttgggcttttactataagcatacttcatagcacgtagttttgtggtataaattccagtattggactagtgcagttcttttttgcataagcatgtttcaagggcattaaaaatataagccttaataatacctcctttcctgttttttcaaagcctaaaattatgtgtgtatacatatatgctttcataaatatgcacatatatacatatatgtacatgcatacatgtgtgataatgtctctctctctctctctctcwatatatatatatatgaaaactttcagtgctttatggagatatacatttaagcagttaaggcctaagaccactaaaatattacccagcatgtacttcagtttgtcaccacttattgtcacccaaaaaagatagattcctaagagaaataaggaccagaagaagtgaatttttaccaaggtgacagcgacagaaaaagattagaacatgacctgcttgagggcagtgaagtctgtggttctgatccattagagccagtgtatcagtgaacaaatgggatggtcctacttaaaagaagtaaagatagataggtaggggcatgaaaaataatccacgcctacataaaaatcttggttatctagctctatggctctcataatggcaagtgacacacctacagaatattttaggtaggactgggtatgttcagggttgtcacaaattattggtggtggtagtggtggtgtgctattggcttttagtgtatatgggggaggcarcccaatttaatgaagagtttttctaaaaatattccatataaagtttatgtgtcctatttagctaaatgttatgcatatcaaactgtataayctggtacataattacaattaagaattttatttacattcccacsaaaagccgagcaatttacaaaaatagtttagttatttcatgtactctatcttctaactctagaactgatagactataatgttgatagaaattaaacttaagaccaactcagcaccaaatcagtaatttttattttcaagtattttacttattgacaatacggtgagtaaccttcatctcttgaaatagaattaacattagttaacaacatggaaatgttccagaaagtacttttgggattttagtggaagtatatcaatggtatttactctctcatttgcaaaatatcatactttaaaattttctccactccaagagtctacatttgacttggcaaattttccctataccattaactttcttcttccggttttcatctacaaataagtctgggttgttagtatctcaacactagtttaagtctaccctcattctttcactttcgtgcacttcttgcacgggatgtcttctaatgttttatttgtcttaaattcaaatttattcatcatatattcatacaagcgctgactttactatgtgtctagtgaagttatccctgagcgttagtagtgaaatacacattacttttattttattagtttttaaaaattacaactatattctgtaattatttataaatgacttttgaggataataagggggtaacaaaatatttgtttttaaaaaagaggacagagtctgagagggtcaaggatcacagtctggtccacgatgactactcaatgcatgaaagaagacagcaaatcacaagccttctacatttacctctgtactgcttcattctgtgactatcacatattagttgataccatgatggccagaaagagttaactcccctacctaactaatctaactttctaagaggtagctggatgaggagtcaggagaccaggtttctagtttctgctctgccactaccagtgtgacctttagcagttcatcatgatcactgtaggtccccattatttctgcaactgtaaaatgaggacacaggaataaattacttttaagattctttccagctctattaaaaaatgcataatcttgatcctaagacttaggcattgataagaagaaacggattcctttaataagtgtatataaaatttatcctgtgggtctcaattatatttccaaccacaatatttcttttaaaatattcagtctagtcaagtctttaaaaaatgccatgccttacaaaaaatgaaaatgtttccttaaaaaaaaagcatccctacactttatgtagtgagcacatttatgatgagaacatagtctctattctgaagggtacatctacttttctatcaccattctccttacttccataaaagttacagtttggctgtgaatatttgaaataaaaatgatcttatctgcttttcccatcatatatttttggcagttctaaccttccacacagaggttttctaaattctaacagtccacagaactaacaattcaacaaaatctatgtccaactaaaaactgactataaacaagatatttcacgctatggtatgaatcagcttcttgctgaagtaactcatctacaaccaattttgccctagagcttttgaaaaacacaatagaaatctgttaaattggcagtcttgctgaacttcaactattttatctagcttggtccactgtaacaataattgagaggttctctttgatgaaatgtgtttttgatttggagcataggtacagagatgaaatggaccaaaccccttatttagatggcttcttgctattccttctcttggaaaggacatattaatatataaggcctaggaatgccatttaacgtcaaagacatacatatgctttaggaaaacacttaaaaatgcagtgtattaatagtaagatgcatacattaacacattcttatttgattttcaggagcaacctattatcacttcttaaaatatattaaccacctctgttacatgtaaagtgggattgaatttctcaaactttgactataagacttttatttttgctgggaacatatctaatccttaacacatattcattaaacaggcatacaatcaagtcttgcttatctttctttgaattacatatgatttcctgcaaagttttcataccaggtttgctcacttctgccacccagctcatttctgggcagtctgcccatcttccccacctccccacaaatgggttttcgtgtttgaggcatgaaagctcatttaaaaattaacctaaacacaagaaaataattagaaaggcaacttgcccacaataacaatgaaaatcttttttaaaccaaacatgcaatacattccaaagacaaacacaaatgactttttaaataaccatgattttacattatctttgcctctatttttctcattaacagaataattcatagtatttactatacatggtgaaacggtttctcctcaataattcatttttaggatacagaaaaataagatgtaacatgttcttatgtaatatccaaaggttttaattagactatatttttaaaggcaactttactttcaaaattatctgtagtttgggtttattctgtccaaagccattcttctaaggagaatcttaacgctttcagggaaaagagcagtatagaacactgtagctggtgataatggcccactttttcttggttcctgataatcttcaagtacatatcaattatttgcaaagtgtgaaaaagatcatcactatctttttcctcaaaaaatatgaaaatgctttgggacattgcacccatatttgagtgaaaagaattttcctaatgtgctggctaggctaaaggaacaaaggatgtattatgtaacttaatttggaatgataaaataccgtaatattgaagctctaattagagcaaacacccctaaatgggaaatctttcttggatagggaactgaatatctcaaatcttgctttattgatgacatcaaccaaacaaagagtgtgaatctatctgctgattacatcccaactcatccagattcccaaatacaaatataaagtatataataacaggtaaacatgttattcatatcctatctcacatcctatgctattcatatgcaatactgatgtgggaaacaatgtgtatttcttaggtttactgaatttggaatttgtaagagtaagttagtctcttattttgtaaattcttccttggaagatgttacattctcctggaaaccatactaagtttctgaagtcacagggctttttaatgcacttcttcagagcatcaaatgctacccttgtgaccaggaagaaaggaaaagaaggtcatcaggagggccctgcagctgcactaatttctagcttctctctgttaacaaaaaggtggggggtggggggaaagcaatcagatttttactggagtatacaccagccttggccaagtgctttgaaacttttagaatgtcttctttcattgaaaataaaagaagcagagcttatggtgtaataagccaaacacaacagttactgaacttgagtcaacattggataccattacagctttcaggatagtcatgggaakgtatgaaatgagtaagtacgttttgatacctgtgaaaataaaacattgtgctgtaagtgagtgggagagaacagatggttggtaatgatttaaaacatttatgtttttggactatcaccaagcctctgtattaaaaaatatggtgtttagttagtacataccaacatctatatgcaaggtgctcattttctggaggacggtactgtaatgaaggggataaaaaccaaatgaggtaagaggaacattcttctcgttttctgggggcattcagtgtgtgctatttcttattgacgatatgcaatctaaatgttttccatatgatgagaggattttaatttttcctcaattactagtcagctgtaagtgcctaggaatcatactgtttgatcgtatggtgtagaattgtaatattgttttgtaaatttgattcactttgattgaagctcttacaccctttgagcaataataaaaagtggtagttcagggtgctcttgcccatgaaaaacaatagcattcaccttatcctcacgttggttggcaggcatatggtgttatgattaggtactggaattaacaggtgccagccaactgaatcagaagacagataaatactaaatatggtcacaatgcatttggatgtgtatatgtgagttgaaaagaggcccctgtccttcaaaccgagaggaataataacaatgtaaataaaattgtacaaagatagattaatgcaattctgaggttaaagcgaagaaaaataaacattggtaatactctcaattatcagaaaaactgcgaaaagggagtcctgttaagcatccacggcgttttgatttggatctgatagcataatagggagaaaaaagtcacacacacacattgtgtattattcacttgccatcgctttcaaaacgctggggattattcaggcacagtatgtttgtgggagggagctgggggtggaccgcagagagagagaaaggaggaaggcctgcagctctagacttagcacctgtgaacttagttggaaataactcctgacagacatcaaccataacaccttctaacagaaacatgctgataggcaggatgttcaaacggggcagaagagggagcaggcaaccctgtgaaagtaacagcagcagaaacaaacacaccattccttctccccgcaacccacttggagcccctcctcagatcgcccctcccaacccctctgctctggccacgatcgcacctggcctcccggtccccctaacttccctcccacctctcccgcagcctgcgcctgagcctgagccaggtcgcggagtttgagactgacgcaaaggaggcacccccgcagcagagatgctcgtctttctgccacacaccctggaggacccgacagactggcagcagaaactaaagactgttcctgccgtcctctttccaacctctgcatgccccaagaggggtctgaccccggaatcctggagtccagggtgccccgccggggcgcaggaaggaaactcaggtagctgacaagttcaggcggccgtccttctccagcgccccctcaaagtcaggatcccctcctgctcccgccccccacctcccgccatgcgtccactgaagtgaagggaagtgggttggaatactggaggtaggggagatagaaaaaggaagaagcctcccgcatctccagcggcgaagcacctggaaaggtgagggcgcacgtccccgcccaccagagcccgctcccggcgcgggtacccagcagcgcgccatcatctctgcccctccagtgccccccagccccaaccccagccccagcgcggttacctcgcgggccgctgccgggcgcttgcaggtgctgctgttccaggagcgcagcttcggaggaaacttccccgcgctccggggcaaactcccgcgcactcctggcagccgtgaggtggctgagagcggagcgccgcgccgggagcggggacagctcggagtcgggcgctcaccctggccctgaccctcccgcgtccggcccggctggggctgcggcgccgcctccgcgcccgctcccgcccgcgcccccgcccccgcccgcccgggcagctccgcctccctctttttctctccctcgcccccgctgcccgccctgccttctccagctctgcctttgtggctctctggtcccctctttcctctgactttctggcctcgcctccgctggcgactcgccctcccagccccgcgtgccagggctcaggtgccaccccatgcccagtcgaggaagtgattaccctagcagttctttcccaattcgccctctcctctcccctgcgctggggtcttctcctagcttttctagaaacccagttctgaggaacacgtccataggttagaaggctgtcgcaaacgttaactccaaagtcaaaatgtgttttgctttacagacaggaggtgatgttcgtttgtttattttaatacatcaattataatagatcaataaagtgcttgttgtaagtacggctaagttcagcagcaggtttgtgtaaaccagggctccctcaaaatgagcatagtacccatttataatgttcaagacctaggagatttctcaggccacgcatttcaaaatcgaacaagctgaagttggcggttttaaagggctttgcaaagaccaacactagaataacatttttaaatcattaaaggaaacaccaggctttgggaggcccaggcgggaggatcacttgaagctaggagtaaaaggctgcagtgagctctgatcctgccactgccctccagcctgggcaacagagcaagaccttgtcttgaaagaaagaaagagagagaaaagaaaaaataaaaatggttcattcaggtttaaaaattagttctaaacattattctatcaacaatttgaccaaactagggcaaataaaaataaatgaatccttgattgcttattttgcattcagatgatttctataaattaacaaagaaaaactcaactatttttttaaaagcattaactagttaaacctaccttattacgacattagaattttgttgttgcttttgctgaaactgaaatattagccttatgcacttccagtaggtcttattcttattaatggtttagtaataacacatctggtagtagtgaactttggttctttgaagaattaccattataggacttgtttgcctgatgcaggtttctttttaaacagaagctgatttattattctgtcacaagtgttttattttcatgcatttttaaaaattggggtaaacaccacatttttatcatttttaatgtacagttcagtagtgttaacatacagtcacattgctttaaaatagatcttcagaatttcttcatcttgcaaacctgaaactttgtccatcaaacagctcccccttttcctctcccctctagcacttggtaattaccatcctaccttttgcttctatgaatttgacaatgttagatctctgatatgattaatatccagaatatataaagagctcctataactcagcaacaaaaagtcaaataacctgatacaaatgggcaaaggacttgaatagacataagagtttaatttttaaaatttgtatatttgctggggtttttttgttttatagatttctttttatttcagcttaattgtaaaggagttttaaagttatcaatgccatataaacacactattgaaaatttggaaaattgaaaaagagtaaacaaatcattccacaagcaaaccattgtaatacaacttgctgatttgttattaacttttaacccagagtcagtccttcatatggggaaaatcctcattctccaatagaataaatgtttcctgagttgaaagaaacaagctagtgttccctgagctgtatttaactgacacrtgcctggtaggcaattgatgagcgctccttgaatgaactaaccatttaacttactcgctcttggtttggttccctgtgtatccatccatgttctatgaattcttggagttggtactatccattatatcacagcagtgaggaaattcaggccaacctgataatacatgaactctacttctaggctgttgcaaaacatgcaaattttttagcctgtgcctttcagaagttgagcaagaatatcattagaactgtatttgaatatagttctatgcttaaaatgggcataaattgaaaagttttagtagctaacrggggaattgggcatgatcagatcaacttattgaatttgcttgattgatgagctactaggcattgctagtccattatggggtttccagtctttagaatctattttattcacttatctatcacagcaaatcaaatatttagaactgtggctgtctttcattcctagacctctgtttaaaactgattttaaaaatttgaagaattactattatagaaaattgaatattgttaatatccaaggttgatgaataaaggatcaaaaaattacctaaaatgtataccaagcaccagtataagatgcatgttctcatgccatttgattgggagttatattgttatgtgaaaatattaccttttaattttgtagttaaactaatttaattttacacagtgaattatttctaaaacattgattaacagcatgtttctaaactctccagtctattaattttgtttagttctttcaatttcttaaaatgtttaactattgactgtttctgggcaagtgtgaagcttatgtattgttgatcctttaatgaataggttggtaacaattatggtccataaacgtggtttctgcatcaaatctcaaggtacattcaatagcaaaagtgccttcatagaaggaagacttcatcattctcaggtttatttggaaaaggcatacaatgctgataccgctaggctaagcacaacaataaagttaaacttaactttgaaagtataactagtagtataaagaatgacttcagtgagctgctcatagagatgaaaaatgtgtgtaaggtgacctggggtagagaggtaggaaaagagtaagaaaggatattttcctggtttccttatgtaccaaaaacaaacaaacaaacaaaaacaaaacaaaacaaaacaaaactaatttaaggtatcagcatgacactgctaagggatacttcttgctatttttgagtttatgcttttctctaattatgccggtgttaatgatgacttggcttaattaatggccaaagtcaaaattcagcagaaatgcatttagcacaatatgccaggtcatgtgggtgttgcaaatacctctgaaccttcttatttatgcctccaactattttttgagggaaagcagggttttatttatctgggaagagatatttttacacaagtcaatagaggatagtccagtagctacagtagtttccctttatcttatcttgcttttattttgcagcatacgagtaaaactagaaaaaaatgatagaatgcgatttatgttgattcctggtcaagtgaacacaagccggcccactgaaccagaagaaaagagtaatagaactcttgaaagagaagataaaacccaccgtatccagatattgctgggaagaaaaataaaaacaactattaaaaatttaaaatcacttttagaaagcttccttgcattagtgctatgaaatagaaagagtcttggagaacaggatttgttcacgttaagttgggcaagtcttctcttcctgggctcagtttcctcatctgcagtgcatgaggtcattgaactccataagccctaaggatccttctggtttcaaaaatcccatracgtctgatatagaacacttaccttgacaaagctcttcaagtcattttcaccttcacatattgatttatctgtgtagtgacatttaaagtgaattctaatcaggaaataaaaggctgatttcttcagtagaagaaattgacaataaaaaaatgtgaatacaagagagaaacaaaggcctgattaccagaagtcgatctataggatacagaatgtggcattgtacaaagtagaaattcctttctaaaatttaagaagaaatcattgtaacatcaggaataaacaggaaaaaggagaaagcattaagattttccagtcaaggagagatctggaaacataatgatttacctcctgccatagcaagcatggtatagcaaattttatgatttggggttgatcaaaattattgtgtgacgaagacataattaaaaaaagatttgactctgtctctaaccttttttaaggaaggaattattttcttaaaaatcaagaacaaatcaaggaccaaatatctataactaaagcacaaattaagtgttcagaagaatattggggagaaaaagcagaatgcaaaaggaaaaatgccttatggaaagagcataggattaatagtaaatgaggaagaactatgactcctaaagaattataaattttaaattgtatgaaaaataatattggtaaaacagaaaaactaagagataattgtaagtaaataaaaatgaaacaagatgtgttgccattattattatatatcagctgccccagtaaagcaataattcaaggtcaaataacttagaatggtcagcacctaatagtcttggtaaatagagcaggtcaataaatatatattgattggttgattgaataagaaatgcttgcagttattttaggaaaatcaaagttgcttgggaagttatgcatgtaatttcttaaactaagcaagtataaatttccttttgaaacaatataaaacaaaacctttcctaacagttacctctaaatcctaaacaatgaaatcttttataagataatgtttatatatagcaaaacctaaattggaaatagataaaatgtggaaatataaatgtgcttctgtagaaagaaattatattttatatctttgatggtttttgataggtggttggaatagggaaaattctgtgtgaacaatttaccaaaaaaatgctatactttcctctaaaccaatatttggacatataaatattttccaactgggttcagtttttgatatggccaaagataatgatatgttatttcaagactgtaagtcaaaataaaattgatttgaaatggtctgaattaatgagatgccttccatcctgtaagtttcaacattgtcatctcaagtgataagataatgatggaccgtttcttaccaaatattttattaattaactcacgaagcttggcctgttcagtcagtatagacactatgttccggtgccttggatgtgattagcaagatgtgattcctttaaataatgagctcaaaacacatattaaatttagaagtggtaagcttacaggaaaaagaaagatctgctgggagtgaataaaaggaaaaagaaaaaatggctttgtgatttctatcaatggtgtgcatgtgcgtgtgtgtgtgtgtgtgtgtgtgtgtgtgtgtacgtgtacttgaaagagagagagaatgcaggcaacaggcaagctggtaagaaatttgatgaaatagagaatatgtcaatgatgtatcctaagaaaaaatatagaatttgagggcacagagtaattctaaatccacctccaatcccatgcaatgaaatatttcctcgtccagcactgggagtacttgtgatatacggctcacctcactaaatctaatatcatttcagcccagagggacacagagcatggtgactgacttagcctttttgagggaagggattttgttgactgttcaaaatgtgttgtccttaatgggaggattttttttcaaataaaggtaaataatgatttttgaagactaatacctgtgatgaaaaattagtgtaaaagaaaatttatactcagtagcatcataaaataagtataatattagcagtgtgctacaaatattatttctaatgttaatacttaaagtgagctgataatgaaaccaattcagcttagtattattaagcttatgcttttatttagctagttatttacatctgaatctatgtctacatatggctattctaaataacatttggatatttggtctatttaaaagtctttttcccctcttgtaataaaaatgtttttaaattatctcctaatatttagaaaagaaggaaagtatctattagatatttatatcttgtacttgtgaggggtaaaacagtggaacttagaacttgaaagactgccttgttttagagggaaaacaaagatgctatttctggctaataattgtgaatgtaacctgaaccttaattactaaggtaaaaataaacaagttcaagatacaatctcttgctaaagtctattcttcaatacatttcttaatacacatggtaacatctaagaataaaatttccaaggaggaatgtgtcctaatgcaattaccttggaaagttttcatatttcagcttatgggaaatcatagatttaggcatttatgaattaatttttgaattaattaaaatagctcaatgaaatggcatcactattacactgataagtctccgtttcttcttctctctatcttgttgcttcatgttctatgtagtagctagccattgctctgggcactttaattcttgattttcaaatatcaatcttattttgtaaaaaaatctccatgcacagaagctcttctattagttacattgcgatacagtctaattttttatgttgggtcacaaattttataagctttcacaatatcacatttgatacatctttcaagcttgctttttcatcttgattagagggactgtttaacaaatctgcacatagatatccaatctccagccgggcgcggtggctcacgcctgtaatcccagaactttgggaggccaagatgggcggatcatgaggtcaggagatcgagaccatcctggctaacacagagaaaccccatccctactaaaaatacaaaaaattagctgggcatggtggcgggcgcctgcagtcccagccccagctactcgggaggctgaggcaggagaatggcgtgaagccaggaggcggagcttgcagtgagcggagatggcgccaacgcactccagcctgggcgacagagcgagactccgtctcaaaaaaaaaaaaaaaaagatatccaatctccgttgtttagacacatgggactgcattttatggagtactaactcacttctacattatttgcccagaaactatagaattcttgtgctatcttttttcaaccacaactaaaagcaaatgaattaaatacctattacctctgaacactgtttatacttctgggttaggtgtgcaaatatttttcccagcacaggagctgacccttgtctgtggttatgctgactaaagattttaatagcagagaaaaataaaatgtgtttcaatgtgaagaagtagcaagaaggaaagcaaaggtatcgcataagaaatctagaaacaggccaggcgccgtggctcatgcctgtaatcccagcactttgggaggccaaggcgggcggatcaggaggtcaagagataaagaccatctggccaacatggtgaaaccctgtttctactaaaaatacaaaaattagctgggcatggtggcgcacccctaaagtcccagctactcgggaggctgaggtaggaaaatcacttgaacccaggaggtggagcttgcagtgagccgagatatcacaccactgctctccagcctggtgacagagtgagactctgtctcaaaaaaaaaaaaaaaaatctagaaacaaatatgccccagttgacaactttattgtaaatgtggtatcaggaattaaagcatgaaaatggaatgttcaacagccactagttagccatgaataaacttttaaatcacccttcagattaaatacaacaaaatggcattacttttaacgataatgagttatcacaggtgctgcatacacaaacgactatatcacataggatgaaacagaaagcagcaaagaagtgaccttaatgagtaacgaaaaaacatcaagttagggaggttaaagaaaagctcgtgtttgttattattatttgaatattttgaagcatgtctgttgatgaaaagaactagtaaatatttatagataccatggctaccttaggtagtctgtcactttatcaaaataaacatggcctctggtaagcatttgttttaaaatttaaattgtaagcctgatgcggtggctcacacctgtaatcccagcactctgggaggccaaggtgggtggattgcttgagctcaggagttcaagaccagcccgggcaacatggaaaaacttcatcttgacaaaaaaatacaaaaattagccaggcattgtggtgcacacatgtagtgtcagctacttgggaggttgaggttgggagaattgctgagcctgagaggccaaggctgcagtgagccgtgattgtgctgctgcactccagcctaggtgacagtgagaccttgtctcaaaaagaaaaaaagaagaaaaaaaagaatttaaaataagatccatggaaaagaccaaataatctagcatttttaagctgtcttcaagatttagaaaagaaaaatatcttaaagaaaataagctacatcaaccaacaagtggatagagaaaatgtggtccatacacaccatggaatgctacttggttattaaaaggaataatgtctttttcagcaacttggatggagctagaggccattactcttattgaagtaatttaggaatggaaaaccaaatatcgtatactcttacttataagtgggagctaagctacgaggatgcaaaggcacaagaataatataatgaactttggggactcaggaaaggggaaggttgagtgagggatgaggaataaaagactacatatcaggtacagtgtatactgcttaggtgatgggtgcactacaatctcagaaatcaccactaaataatttatctgtgtaaccaagaaccacctataacctactgaaataaaaattcaaataaaaaaagccatagttagtaattactgtaaaaaaagaaatgggctaaaatgtaaagcaccaagtactatatactatgacatatatgttatatatgtaagtgtatatatatgtacatatatatatgagaagccatttcttttgttcatttgtttaacaaatatttattgagcttctccatgtctacagtgacctttgaagattgccacataagcaagaaaatcaccttcatgttgattaattctagccggaaaagaatactaaataaacatacaaataaataaacaagagaaataaagactaaaattttaatgaaggaaataaccagggttctacaatagttaatagggggagaggatactgaggtagtagtgcaagaaagaaggtgctgtttgagcagagtccttaaagatgagaaggagtaaactaagccaacagcctagggaatggagtttcagacagaagaatcagcatgtgtgaagattctgagttgtgagagagtttggcttatttaaagaaaagaaaggaagccaagtactgtggcaaggcgagacaccttgagctgaggttaaagacatggaaggggcccagctatgagggtggttgggacaggacaggtcatccacacttcattttatgtgtaggggaagcctccagaagattttaaatagagatagtcagatttgtatttcttgatagtggatgtcagtagacaatagttgagttaatatagattttatatatacatattttttaagacaggatatcgctctgtcacccaagctggaatgcagtgatgcaatcatagctcactgcagccttgagctcctgggctcaagcgatcctcccacttcagcctcccaggtagctggaactacaagtgcatgtcatcctgcctggctaattttttattttgatatttttgtagagacatggtctccctatgttgctcaggcaggtcttgaactctggactcaagtgatcctcctacctcatcctcccaaagttctgggattaca

SEQ ID NO: 97218 - DNA, 82637 bp, Homo sapiens
  misc_feature (1)...(82637): n = A,T,C or G
caggagttcgagactagcctggccaacatggtgaaaccctgtctctatgaaaaaatacaaaaattagctgagtgtggtggcatgcacctgtaatcccagctactcgggaggctgaggttggagaatctcttcaacccaggagaaggaggttgcagcaagccgagatcatgccactgcactccagcctgggcaacagagcaagactccatctcaaaaagaagaaaacaaaatcatatactactcactaaaaatttccatttctgttaatgtggtaacagtttttgagacataaatggaggtatcagtgacaaaatgactaatctcatggatggcatttttggctaagtcttggtttgaacgctgactcttattctgttatttaatgctgtagattacttttaaagatttggtatacttttcttagaagtgaatgcacatagcagcggtgcattttcttgtcatttgcagtgtacaccatagatgaatggctgtgactaggttggtaatcactgtctgaataaacacaaggggcatattctgttatattcatgaattttttaaagttgtaagtgacatttgcaatatataaattataataaaagctagcgctctttgaagctggcttacaggtctcatatttttattggctattgtaagttagcatgttggtggccttcacaactgctgcattacttatttaattttaaaggatttaaattcctttgctgtgagaaacaactgaaacaaaattaattataatattttaaaatggacactgctattctctggaagcactgccactacattaataaatatttatttataatagtttaggtttgagactgaaaagtgagccttttctgtgagtcatttatttttccggtaacagttatggtgataataacataaacctttgcactatttattcgacaccatctgcagttcaaatacttgcaacttacatactattaattgagttcatgcatttgtaaacaaaaaaagggtaaatatctttgctatgggcagcgcttttaagtatttcattctttctcttttttttgcaatttttttccattatagctgggaagactttactttcaattatttaaacaccatattcactacaccatgctgactttaacttgttccacataggcaacctctatatacagtgtattctgctgcaatctgttagatacagtgtctaaaatagtgcttcaaaaaaggaaaagactattattggaggcctagaaccttcagttagagatgttttacatctcttatctttttacagcagatctgtgctattctttccctagtctttatgaaagatgtaataaagtgagggtcaaggttggagaaatgcaagagaaagtagtaggcaaaataatgaaaaataaaagagccccacaggtaattgtcctcaactgtaggaagatgggaactatcaatatgagggttacccaatggttttcccaatttcccatgataactgcaggtccaaaggatcgggcgggattcatgctggcaccagtataattgatctataggaaacaagaaaacaacttcagacattgctgaaacagggctactagcaagtatcattcattgcaatttgctgtcatttgtcacttagaggaacctcaagatattagcagctatatcaacattctcattgagcagttggaaaaattataacctaaaatggacagtcatggctggatactaaagagctactgctgtaaaacacaacatcttcaggccagctagagtgaggataaatgaggtgggattgattatttaaatggacttggaaacttactgcaaataaatgtccaattgcaacagaaaatccaattgctaaagctattgagccagtgacatcagtccgtttggaatcacagctggcaaagatagtaaacaccaattgaaatgtgattatcaactcaaccaggagaccatgaccagcggtaagatttccatgaacctagagaaagaaaaatattccatcagaattgaagcaagagtattttcgatgacaatgtattaatatcattgtgaaaggcacattttatctgtgtaaaaagtaaaggtaagtcttctaccccaccttcaactgagaatttccttctctcaccccccaaaaagaaggaataaatttatattcattttgggtcatcacagatgactgtgattactcttacaacgaccaaacaggagtttgtgctgaatgtccttttctacaaaggaagcaaaatgtgccactgcagcacttaactcgtaaaagaatttcttgagagccttgtgattttataaggcaatgattaaatccattaattaggtttaaattaattaatatatatttcaattaaaatttaagccatgtgtgtttttttttaatcagccctggtgctgagttaacaattgatactcctaatcagctaagaacaaaactaggatcggatgtctatttttttaagcataaccctttatgtagatcattgtacatcttatgaacatgacaagaaaatagtttttttctgctagtgaacaaataactgtaaggaaaatgcattaagctaaatataaagtcaatatagtaattggaatgggagaaggggaggaaaaaaccaacacaattttcgggccacctagattttgttatttttaaggcactcaagagcaaacaatgatttcttacagatatacctaaatactgccagaatcagttttcacactattaagaatcatcaaaaattccctaggagtaaattagctattttagggatgtgcctcatgccaccaaggcattatttagcaaagagtttgcaagaagcttggagtcctagtttgaaaatagctaaagatgctaccatggtgactcccaggcctcccaccacactgggaggtgtgaccagatagaggattcctgctccaatgatggcccccaggcactgggctgcgatgtagaagacagacttggcgatgctgatcttcctggtgcacaccatggccacagtcactgcagggttgatgtggccaccgctgatatggccaaagcactgcaccatggttgcaatgctgagtccaaagcaaagggagatgagaaccatgtcgaccggtaaaggcttttctgttccaccccagttgatggtggatcccaggctgaggagaacaaaaataagcatggccagaaattccgctgtgactgctttccagaaagcttgagtccagacccctttgaaagccaccatgatgttctctctggtacacaaaggtccacacttactgaaaagagaaacaaatcagcatcagaagccactacacccaggtttatgaatttaggtgaagggaacaaggcctgccatcttcgggtactgtgggcaggggctgccaggcgtgatttgcacaccaagaaagaatgcttctgctaaagctccttcatgaatagtcaagagactgttattctagtctcctttcatttaatattcaaagatcatccagtttcacggaaaattatccaaactgtccctagaaaggaaaaatgtctaaatcaaattccttaaaatattaagaataaaatatatttaccttgtacttaattcccttagagcaagtttttaagtttcgagtacattttatatgctacttacatttcgaacataaagcattaaaacaaggtgtgcgtggggggggggggtcgtcttttctagctttgcatttgattgctttgaaatggcattctgaaaatctccccctccccccagactctggattagggggaagccttctaggaaaccagggtgctgaaggctgtcttttgagaaagtgaactcattgaggggagaggagcttctggtgactagcaagggcgatgggaacaggcagggcctcagctgggacagcgacactccctccctctcctttgcgccaggaacgagcaggctgccagcgggaggagtccgggagctgagcctgcccaagggacacgcgcaccgcccagatctgggagcgcggcacggggacgtgtaaacctccgtccccagggagcctggagcacctctcagagggcggagcagcggccattcccggcccgtggcaggctcccgggcggcggccaggtgcacacgcagaagcggccccgcgagctcgcccgcctgcccgccggcccggtgcatcctggccgctggaggtggggagagatgggagtgggggatgcttttaggggaggaaggacagcctctcctcgtgcccgaccctctctcaccccttgaccctgaccgtacaatgcagataaacctgccaaagggagcctggaggctggggtgtgccagcaatgccccggtacctttcctgccttcatggtgcagagctcgggaagtcaggaaaagcgggtgtggttagggaaactgtgggcccctgagcagaaggctctatggaaaacggcttttctctacggtctttttgatggctttctgttacatgggcctataggacagtgtgtctcaccttgtggagcttctctggggagggtggtgggcagggagtctgggagagggaggacgccttctcctcccgtctatatccctcttgctgtcattagatctttggagcagagaaggggtggtttgacgatattgatgccaactgctcattctggcaggaaatggctaggattccccttttggggggggggggcaattaccccagttaccctatcatctaagacttttgcccttgtcctttgcctgtgatagtcatgagagccaagaagtatggagagtatttaccagagaatctaattgcagaggaccacgtaaggggttaggcaagaaagccaagtactttaagagattagtattattgtggctttccctttgacaaattgcggggccctcatttccccatgtcactgaatgttcccgggaacctgctttctgcgtgggtagtgaggaaatgcagtgccaaaaagggtgaggggaatttccagctcagcctagcccttagtttgctatggggctttgctttagaggtggagagagaaaaaccctttcttgcccaggcccgggtggcaggataaaggaagagctggctccacaggggggtggccagccacatcccacgcatcccctgccccagtgaagcgaatctcagaagtatgaaaaaccccaggtgggatgacaacgacatcatactctctagaggaaaagaatgtaaagagacaaaaacgatggttgcaatggggcagggagggcaccctggaggagacactaaaaatattcccaaagacggtaaactcagaaaagtcacatattgaagaagttaggagagtcacttctgaactcaccggcagcccagggctgtagccgggatggcaaagggggcaaaatgcgatcataggtgctgtcgtttgtggtcagggttaggggagaaggaggaggacaaaacagtaggctaaggaagctaggtgggcaggaaacgtccttttcagccccgcaggagacaccagaagaggtgggacccagaaaaggccagccccgctgctcacccccttcacctctcacttctgccatttccggagttctctccctgcttggcctgtcatgcacctgtttacctctccagaggtagttgctctttcagcttcaaatattcatcaaccagagaaatttaaaacagtgcaaaacaccaacacaaaacataaacatgctctttaagaatgtttttagcttttttttttttttaaatccacaaaaatctgatcttcttccaaggcagatggaccagcctcacttggctgtgaaccgtgaagtttgctggcagcatatacatatctctggccttatgagggctcaccctagcgtcacccatagcaccctgcttttattgtcagtgttcccttatatgttcacagtcactggaaatgatcaacacaattagatttgcttcttttgccccagaacaaagcgggtttgttgatgtactgaatcggacacattactttctagctgaacactcagcttcatccactccaggacagctgagcgtctgggtgagtaatttttccgaagaaatgtactatagctagattcacctccatagggtaattttcctgggcttttgcagatctgaaacatatggaggatttggctaaaaagcaycccttttcttctaccttctctatgcctctcttctgaaaatgcccagtactcagatctaaaagaaccacccacctgccctakagctgccttccagattctgcctaagaaggcacaaacatctataataaaagagacagtttcatcttttggccctaagcgttgttcccttaaggcaaagaaggacttacccccaccgccttgctgtgggtctgtcactcatgccttccccagccagagtgcagctctcattgcctgcccygcagctccctgtgtgctgggagtcagattacggccacttgtctgattgggtttttggagtgttaggggtggaaagattctgcaccatgtggcaatcgctaagttatatttgaacttgaagtagcttttctgtacctgatcactgtagacacaggrcatttcaggaatgcaaaaacatttacttaattttttttttttkgagacagtaatttttgaaaatgaggattyccttaaatctttatttgaattctttctaccatgaagaattgttcagaatttgtctkgttkggttatatgttgtagttgaaattgggcaattattagaaaatgaatttgtataatccagcagttaacatgaatttagatagagacttcagtgcatttagtttttagccaatgaattctgtttgaagtttttgatctgagaagaagcattataagaacaatatataactgcagctccatttatagcacaggcagcactgatttggacaataaaaataaggaaacataggaaatacaggaaaaaagactgctctagggtgctcacctgactgttacattaataatctggggataagaagtagcaaacttaaaaaatatcaaagttggatggggacgaaattatggggaactgtaggtaaatttaacctctggaaacttagggacaggactgattttataatttactggtcccagtgcaaaatgaatgcaggacaccttggtaaaacactatttaaatttcaagattgcgacagcagagcataaataaaggctgggtgctcctaaaggcaggaccttgtgcagctgcgcaggctgcatgcttatgaagacrtccctgcygaaggagtttggtgaactctagaagggtctaaccattagctacctgcatcaccatctcattattattttttctttaaacagatcttaggtgcatgggattggaataatcagaattcctgatttatgacactctgtcatcactcgtgcatgtatggccctcttattttctaatagttaattataayggcttttaaataatgtaatgaacatctatgaacccaccactcaacccaacatctagaacaatgataataactcacattacctacggatgcctcccttttcccactttatatttcagattggattatttttttccagaatgaagtatgacaagaaagaaatacatgagagaagaaagactgttatacttttaaatcccagttacagtttttttgttttgttttcatttgcgtacttgagacatgggaatgggtgaagagctctcattagaaagaggaattcaaaatttgagtgtgactttcagaggagcactttattactgtttcaagcattctcagctaaccaagattgaatttagattcttaagaatatggttgcacacttattattgtacatcagtggtttctacctttaatatgctccctgaaagtcagaataaattctgatgagaggggcagggagaatttatatgaagccacagagaacacttaaaacatttcatattgattcttaaagctgtttaccatttggattttagaatgagatttttaaaaggtgcaaaatgtttgttacaaattggaaaactgtgagtttctaggcagatgtgctaaatgtcattactctgaccctaagacatttgagtcagaagtattttgagggctgtgaagctawggcacaatgtagccatgtttaggggcttccttgtgaatgagtacggtgggcagatcctcaggaatctacagagtggggctctttagggctaccggtctggtcggtgggtggacattttctaggtccactctttacaggttgtcctaggcttattagcattctctgcacagcctcggcagttgcagttaccattttacaaagtgccagcaaaacttggttaccacggtttctcagcctctttccctgttttctggctggctgatgctttccagggcagttcctaagggatgactgttcccatcaaggaaggggtcaccctcattggctccaacccctacacttattagtactctcagcagagtagcttaaaattgaccagggattaactcttcacctrccagaggtagtttttcttattaagtattgctaattaacctttttgtacttgagctgctactactgatcttcctgtgatactgtcagctctatgcaataatcagctacttatctggcttttctttggactaggggcagaaatttcccacasgattgtctgtggctttgtatgcagaatgcgataatgaaggaaagcagctataatgtgcttgtagtggtggtggaccaccaggaggtgggaagctctggtgaacatgagtaataccttctacattgaaatgttttgatgtggacctggatccaagtgagagttggaatctaactgccccccaccccccacaccactggtatgtttaaaagggcgcaattcattaaaaaattgaataacaatttattatattttcttgactttctcattgtatagtgttacgawcttttgggggaggatagttacatggcatattgatttaaaattggtctttatgccagaccaccttgtgaatctttagttcaatagccttgcgaagttgtgggtcagtaacayatgaggaaccagagagaagcgtaagtgaaaatgacaagtacttagcaaacactagctaattgacacgctttttttgttgttgtttctgaatttttaatctactatgccatactattttccttgggtgctgttgtatatctttgggatttgtggactccttctcccatccttgccctcagaacttttaatatttcttcatgtgttcagagattgaaaactgaaacaaaagcactaaacatgccagcaatgcctcagtaccagacgggaagtgtctccaggctggtaggggcagattcaatcgcaactcataaatcttactttgcttttcatgaatctcagcatcatgaattcccccagagcacttatatatcagtatgttcattaaaaacaaacaaataaacagaacaacaacagcagcagcagccgcaaccacaaccatcacgacgaagggcttaatggggctttgttcctttttcaaggaagctttaccttatggttataattcaggatggcttccagaaatagagttcaccaccgaaagagtgaaataaaaataatgatcaaatacagcaaggaatcagagtgtttaacttagcttcctgctccttagtgaggtaaattggagaaaacctatctttccaatggttgttgaacctttcacaaacaccataaatctctctctgtgccccaygccccacagatccaggtttttatgtttgktgtagcaggcacatttttcttgattcagatccaggcggactgctttggtggggkagttgtactctgctgacatttaaggcaggaattccctgggaaaataatcaagagattattttggagctgctggaaaagctccaaagggtttagggttcccctcactaggcaaataaggagagagaacgagagggagggaaagagaaaacagaaggactttattgagtgactgtatttcatctgaagctggtacaaaaaaccagaaatgtggttggatgactggatacttttcttacaccttatctcttacccagctaatatgacagctcagagtctggttgggcatttaaaaaaacagctcagacgtccatagtagacaatcagttctccgggaagcaaaggacttcgggatttaatgggttggacaaaatgtttgaaatggttaacagtctaagtgtagcctgtactagtaattgttttaraatttaaattaaatttgaatatattaaaagctaagccaacattttggtgaccactctcactcagcaacctctgtcatctacacagtgatcattacagaagggctcagagtacccatatttttagcagactgacaaagatgtttccagcttyaaggacagaaaaggtgtttaaaattctgtacacatggggtatgactggcagagtaggccaaaaaactaggtggttaaaaaaaatgctttcrgaataatgctagaaacagaacactttttaaagaagcagaagtggccataatctgtgaccacaaaaagaaatgactgatctcaacagtcaagttatttaggaatggccttcgatgacctttctaataattcagatgctttctttttttccttcctaagtgatcatacatccttctctttaacctctgtgctttttttttttttttttcacattcatacaatcaggaaagcacatctgaaattcacagggacttaraagtgtcaagtcttggcattactggttttacctttcctgggtgttcttatctcttgcctcactttggcctgtatttttgctgcagggagtatgctgcgaccacaccttgtcaggccccaccttggagccaacttaggtgattcttttatcctcaatccctttcccttctctcactgccacaggattttctgattcttcttcaaacactcctcagtatttatctccttcatgaaatctgctcttcgcaaacttgcttggttctagtcacttaaaaaacccataacaaccggaagcctatgtgatactctacagttataactaggtaatatattgactcattcactggtgttttgatgctaccttatctctcttttaaaatataagctgtagttatgggaatatatgtcctgtgaaatttcttactgtgttggtgttgatgatgatgatgataaagtgatggtaatgattttgttgataataccattgtgtagtggaaggagaagggtaagatttggcagtcttggctcgatcatttaccttctgttggctgtagacccttgacctctttgagctctgttttcatcatctgaaatggaatagatgattatctgttctgtgtttttgcaaatttatgggaaatctatgatgccctctgtgatggtttggcctgtttgacccttctaaatctcatgttgaaatttgatccccagtgttggagatggggcctggtgggaggtgtttgtgtcattggggtggatccctaatgaatggcttggtgccattcttgcaggagtaactgaattctcacttagttcccatgagaactggttgttgaaaaaaacctggcatctcttcctccctctcttgcttcctmctctcacatgccagctctgcttccccctccgccatgagtggaatcttcctgaagccctcaccagaagcagatgctggtgccatrctccttatacagcctgcagagctgtgagccaaatagacctcttttctttttgaattgcccagactcagttacttctttataataatacaaaaattgaccaaggtgtccttctcacctcattctggtttgagtccaacttttatatgcttccataatagtttgrgctcccraattccattgtagagttgtgtctagcatgctggaatcacttgtttacttttatctccatcactggcctgtgatggcaaygggagtagggaacactctcttagtcatcttactaattagtcacattgtaaagattaaaaagaattgtggagtaaacaagtgaatatggctcaaataaggcagtatcagcaggaatgctttgcaaacagtgttaataaatgtgagtaaggatgatgctgaggctcatgattttaaaaaaggcattcaagccgggtgtggcagctcatacttcgaatgmcagtgctttgggaggttgaggcaggagtatcacttcaggccaagagttcaagacagcctgggcaacatagagagacccgtctttacagacaattttttaaaaattaggcatgatagtatgcacctgtggtcccagccactggggggctgaggtgggaggatcgcttgagcccaagagtttggagctgcagtgagctatgattrcaccactgcattccaatctgggtgacagagtgagacactgctgctaaaaaataaataagtaaataaaaaaggcatttgcttatgagttaagaaacttatccatgtcaaaccttgaaaaaaatcatgcattcttaatcttattatccaaattacagaatgaaataataaatcttttctagcataggtaaggatccatgttaatggatgcatattgcttttaaaataagaarttaggtaactgtagagtataaacattaacgataaaatttcataaacttcaaatgtatatagataattccatggctacattttagagtttaaggcagaagtaatacattttgaaactttactttgttttatggattaataaaaaatatcttgcaaattttattaaaaaataagaagctgattagtatatcatctcctcattggcttattaactctttgtggttgataataaatgacattactgagtactgctgcgaataacaccgtggagaatcagtaacttggtgaaattatggtttctaaagtaaaggtgctcctcagtgtcaccctgcaatcctatatgggttcagagtcatctgtctttctcattctccagtcagaaccctagctgagacagaaaatgactctggcttccctaagcaaaggaaagtttattgaaagtatattgaggctcaaagaattgtggggaggatggagaaccagtttgcaagtggcaacaccccaggtagctctggaagctggaggcaggacctgcacatcagctgctgggatggatggmcttccagccttcctccttttctggcattgctgccttcagaagcaaaattgcagaagtgagcatttgatactgggtcagggagagagatgacttccatagagggagagagtcatcaggcattatcctcctcccaaggccacactcagtgggtgaggggtaataatgatggcagctcttttgtacgatctcatttaatccttaacacaaccctttgaaggagacactattgctgtccctgtttacagataaggagactgaggcagagagagatgacagactctgcttgaaggtcacactgccagtgtacagtgaagctggattcgaactgtggcaatcagactccagagttctagttttttatcactttagcatgctgcctcttcaagaggactctgggaggcaactcagcaggaggcttgatacaggcagctgaaaaatagcaaatgcccctttgcaccattcttccacctgtctccctttaccccagttctgcatagaacacatgcctcattcttcactgggaaagtagaggccttccacccaagcactctgtccactgctctctttcacctacacacatggcctctaacatttctgtagccaaaagaaaattwtgtattttttctcttcaaatcaaatgccatctccgttcatccagctaccccacgtcagaaagtggagagtcattcctgacttcttctctcaacccacactcccaatcaatcacaggattctgtcactctcacctcgtaaatatctcttgcattcttctcctctttttaccccattgtcaccttcttaggtcaaaccttaatgatttacatttggattattagcctcctagagagtctccctcccatagccctgtacccctctaacccatcattgcctcaggaataaacctcatttatttatttatttattttaatatttttattttgacacagagtctcactctgtcacccaggctggagtgcagtggcgcgacctcggctcaatgcaacctccacttcctggtttcaagcgactctcctgcctcagcctcctgagtagctgggattacaggcatgcaccacaatgcccagctattttktgtgtgtgtgtgtgtatttttagtagagatagagtttcgccatgttggccaggctgatcttaaactcctggcctcaagcgatccgcctgccccagcctcccaaactgctggagagtaagctttctaacacacaacctgaaactgattttgcaaccctctggcttaaaatccttcaaaggtgctgcttgtgttccaggtagatctcaaactgctgacccttgccatttaatcattggctgcaggttctccccacacttggctcccaccatcctgacacccacttttctttctagttacacaggactgtgttggtcagctcaggctgccgtaacaatgtaccatagactggggggcttgaacaacagacatttattttctcacaggagactggatatcaagggtaatttggtgactttggtttttcctggggcctcccttgcttgcaggggatgccttcttgccatgccctcacatgtccttttctctgtgtgtgcacatccctggtatctctctgtatgtcctgatgagttctttttgacatctgaacttggaggaggacataatgcagtgcatagcagggacctgtccaacagaagtcctagggcttcttacacattctttcttcccttccctgactaggtaacttatatctcatcctttaaaattcaatttaagtttcactttttctgtaaaacctttcctgttcctctaattttatttagatgycatttctctttatttctcccacaacacccttccaaaatagcttcatacctccctatttccaagcatataaatatcagatccccttcatgttgctccccaaaagacatgagttgccccagtaagcaggtataagaatcaaaggcctttttcaccagtaatggatgactcactaggaattgtacacagggctgctttagttataattaagggttgtgttataattacactgctccataatttatggttgtactttggtcttccttgaaaatagagtaagtttgtagaaaaattggctaatttcagaatcatttgataaaatcttttaccaaacacagaatcctatactgtttaactggttagagtaaaaaaataaatttttatttcaaatgggagagacttcttgagaaacaatttaataaaccagtaaagtactgacataatgaactatgatttgtattgatatctgagagtgattggtacaatagaacattgtaacaaagtctgaatggtttcatagacatactcagtatatacttaatatttttgttgtaatcatttttttttgtgcacagtctttgtaactgaccaaaggggcatatgaaaatcacctgataagctttcaagagcaatgtgattcttatttctttttattgctaataattccattttaaagatgaagaattgttgtgtggaataaatgaaagaactctatagtgccttcgtagtttcaacactttaccctttgaaagcatattacactggagatctcacagaataagtataaaacctcatattacccttttcatactgcacaacattttgagtagagaaagtgctgccccaagtgccttgtggctcgtgagatgttagggaggccaaaagaaattgctagaaccagaactcatgagtgcctcaaggcctcagcctcagttgagatcattaggtttaactacagctgaatatgggaatatagttcctcagacactcctaagtattatgtcatcccagaaacctttaattttggtgaaagaagaacaagtgcttccatagttgataagattaaagttctaatggttagttgtctgtcaaaattacatagtagtagaacacatgaactattccccgagttagggttctgaagatttagctctaaccattgtaatttgttcactccaacaaggaagctgaactttgatcttcttggttgcatcacatcctcactacataatacatggagtcaacagtccatattgtatcttttaaaagagaaagtgaaaacagatccatttaaccattttcccagtaaaattgtttgctctctgaagctaaagatggcaaggtggtcactttcagtgagcacctcaatcttgaaatcttgatcgaggtgtgtgtactgtgtacaattcctagtgtgttgtccatctagtagagttagatttcaaaatcaacagcagaagtagaactgaataactgaacatttataaaattagaagataaagagtggactaagcaactaagaaagtattttaggacactttaaaacacctagaaataaattagtttaaacattcagtttgttacctatggcaaaacantaaaattcttgaaatgttgggagtggacaggcaggtgtttgagatatcattctttctatttctgtatggttgaaatattaaataaataagaaattaaatacatatcgtaaatgctggttgatattattatgctcagtgttcctgcccagctgcttccgcagggtaatgctctctgaagatttatccatgattcaggaatactccccccaacctgggggctctgatgctgctccgtcttccctttgcttggctctgataggtacccyagagccactcccctggctgctcaaactcctggtatcccctgcactttcttcttatgtttagccagtgatttcaactcctacatcacaatgaaaagaaaccttcaaagggaaatccttcaaattcctgccaccaaatctaaaaatgtctccacatctgtgtcatcccctccttctgtttcttactggagaaatatccctcccttatctcagatgaatttctccacttctgttatgggttccgccctctcctacctcctctagtaccattctctaatccagcagtcctcaaattgaactatatatgttgacaycatactaggaactgaagcagaaaaattttaaaaatatgttataattttcttaaaatatcaagaataaacccaatatatgttaactaaattgaatttttatttatttatttgtttatgtttttgagacagggtcttgctccatccaggctggagtaccggggtgctgtcacagctcactgtagtctcgaacgcctggactcgagtgatcctcctacctcagccttctaagtagctgggactacaggcatgcaccaccatgctaagctaatttgcaaacactttttgttgagacggggggtcttgctrtgttgccaggctggtgttgaatttctggtgttgttcaggctggtttcaagtgatgttcttgccccagcctcccaaagtgctgggactataggtgtgagtcaccttattttataagtcacatttatttcataaataaaaataaatttaattttcaaaacaaaaacaattagtgaaaagagagcattgttttatattttttcaaatccctttaagtctgatttagtagaaatcacctggatttctgtatacaatctattgtgaaatagttatttagttgaagtatgagaagagagtcctaccccatacacatatgtagttggaaaagggaggacttttttttaacaatctgttcagataattgtggatatttttctttaatactataccaaaacttaacaagtggtactttcttaaatctagttgcaatgtggaatctgaaagtatattaatgattttttaatatcttgttactttaaaatccattaatctatttacactttgaactaattttttactaaggcatgatttttaacattattcatggtgttttgaaaaatattggttcactgaggtgtgcagaccatccaaatgttggcatattttattttataacataaaaataccacattcattaatatgaccaatgacatcagagcatttaagcattgagagctgtcaaactcatgaggctgatacaaattttccaaaattataatttttgcttaaaagctcaaatattaatattggaaacaaattccatcagtttttcttgaggtgacaggctcattttgcttactttaagaaaatatcttccaaacattcaatttgaatagccatggtttgttagccattctttgaagtaaaaatagtatttcatgaaaaaaggggttagttcagctcacaactatatagacccmaaaaaaaagccatcacacttggtctacaggagaagtgctttatatgcactttccattttgccacattgaatgctaaaaagatatggactgtgaatcaagatataataagattaaaatttgtgtgtgtcaccaagaactttcttaagtgaaactggtgttgatcttactgtgtgtggtggtgaagaggataatgaccgccatgatggtgtgatggctctaccttgattcatgccatggggccagcagttttatccattgctatggtttgaatgtgtccccccaaattcatgtgctggaaacttaatccccagtgcaacagtgtggagaagtggagcctttaaggggtgattaggtcataagggcagaaaatgaattaatgccaatatcgagggagtrggtgagttattgtgggagtggattcctgataaaaggatgagtttgactccgttcctcttgctctgtcttgtgtttttttactcttcagtcttcctccatgggatgatataacaaaagggcccttggcagatgcaagccccttgatcttggacttcccagmctccagaactgcaagaaaaaaaatctctcttctttataaattacccagtctcagatgttctattatagcagcacaaaatggactaatacacccaccattgcttttgcactgataatacaaaagtcacatggtgaaaaaggcaaatgctatcttattattattattatgaatacagttttgatctctcagcctccctgaaaaggtttttgggacccctagrggtatgtaggccaccctttgagacccactgatctaattgattgtctcctttttttgtatcttaattctctaattcatattgtgtctgtatcttttaagcatgctgatatgtctcccaacttagaaaaaaactttaaaggtaactccaagttactcaccaaagaccattaaatctattttccctttacagccaaatgtctttaaagaatcatctccacttattgtctctgcttttcccgtcttccatgctttcacacccattccaatctcatttattcccttatctgtttctgtaaactgctctttttaggttccaagggcctttcctgtcatgtgactccaggagacatgctccagtccttaccttccttgacccttctgcagcatctgacccctctgaccactttgttcatcacaatctgtgccatgaattctgctaagtgctttaaatgaaatagctcatttaatcctcacggtaacctggtgatatagctaggattgttattccatcttataatttagaaaactgagaaaactgcccgaggtcatacaggtcacaagtagaagtatagagtctcaaggtcagctctccatgaccccagatccagaggccttaaccacaatatacccctttttggaaacactcacttccctttcccacagtaccactctccaggtttattttccttcctctctaggtctttgtatgtgaaaaaaaatacacttgttccacgttcttgctttgcttatagcaaaagtcctgggaaaggttacttaactggccatggctaagtartgggcacacccagcccctgcctttgccatactgaggaatgggttgtttgtatcctttagctctggaaggtacccctaagcctgtacccaagggacttgctcaagccaaagaataattggatgttacttcattcagaattgataaatggtcactaggatttattcttctctttcttcttttttttttcactgactcctactcatattttaagactcaacttagatactgctytttcccagaagcctttcctgacttccaaatctggattagctgtgccccttggtgccctgagcttcctcccttgtggtattgtcttatggtgcattgaagttgctggcttacatttcttctctgagttctagctttcagatggcgagattgtgtmtgagtttcaccttacacccccagaatctggtacagggcctggaatccatgtcccttaatatttgatgaataataaatatactgggtgtgaggaacgaatgggaccttcctgagatatgtatctggaagtcattaatggggaaaagtgctctcaagagtggtctaaagattttagaattrttttcacagaaatagtgtttgaagtcattggaacgaattagacactatgggagaaagaagaaaaaaatgtctccgggaatgggaaaataagagcctatgaaggaccctgaaaaacacatgggttagagttgaaattcatgtggctgcaatgctrtggaaacaaaaagagggaagttcataaaatagggataccctggggtccaacagttgcaaacacattaaagggaataaaaattttttaaatgccatgtgattttgaaataattctgtggttttaaaaagaactgttgcagttgaataaagataaaaatcasggagtgaggagaaagtgcatagtgaagaaatcgaggttgaaggtgaagcataatatatacagctcagtggttctcaaccaggtatgcacatcagttcacctgcacagatgtacaaatcactaaccctggcaccatttgcagttttctcattcagtagatctggaatggggcctgggattctgtaattttgaaaagcgttatagatwactgaacctctggttgaaaatctttagtgtatgtccatcactttattagtttggctggtgcaccaatgaaggaagtaaggttaggggaagtgttatgggctgaattgcattccccccaaatttatatgttgaagccttaacccccaatatgactgtatttaccttaaataaataatgaggattaaatgacatcatacaggtggggccctaatccaaaagggctggtgtccttattagaagaggaagagacactggagtatgtgcgctctctctctctctctctctctctctctctctccacactgagaaagcagccatccacaagctaggaggagaggtctcaccagaaataaatcctgctggtaccttagtcctgaacttccagcctccagagctgtgagaaataaatagctgttgtttaaaccaccctgttttagtgagcttcactaaaaataagggagaggcctttatttctaggatactggaatctagtatcctagttatttctaggatactagaatcaagttagagggagagaatgagccaatagcagtggataggaaaaaaacaaaatgattgaatagaaaggtacagctgagaaagccagaatctagaaaatgtgagaactgggattacagagaagtcagccttggagaaccacattatagcatttctgtatatttttcatttgatcctactaatggctttgagatacgcagatgaggaarattgatttcataggggccagatttgtacagttgtgaactggaagacctaggacgaggaacgtgtctgaattagcttttcctaatgagctctccttccacagcattttccaaactgctttcatttctgtgccaccttcaccatttctgccatattgaagtcagctccttactattatttttttgtgtgtatgtatatgtacacgtgtgtgtgtgtgtatcaacacacatattcaactctgatttttacttagcatcaacctatgcaacaataccacaggtttgacacgctagttatatttttaaaatgcatattaaattcaatatatatactttcaggaaaatccattccatgtatcacctaagggcatcttgcataccatcagtggcccatatgctgcctccatgatgaggaakgacactgtttttgagaaaggaggaaagaaaacgaggattcaggaggaaatgccttatattaagatggagatgaagatttgtgtgcatctcatttgaaggtggttaaaggtggttagcccctcaggcagtacagatcaaggaatgttggataggacatcacagaaatcattagagaattaattactccagaatagaggttttacatttttcaagtggtgacttgggctctgctgtctgttagtacgtcccctgcagagcagcgaaggatgaaggcagcagtagtcctggccttagacctaggcactcgggacccctgccctgggttcctgtttgaggatgctctgttccttcccaggatacaccaccttccttcttgggcacacccacactctccataactaggactctggaattctctgctcttagagactggacctgtctcttcttttgcttccctctccccacctgaactacattgcctctgtctgcaaccttaggttccagtgacggccaatagacagctggtggccaatagttagcaggtgtgtgtgtgtgtggacctaggactgaggtgtccacacacacatatgctaggctccttgtgctgcagagtaaagccatgggtggaaagaaaagggagggacccagtcatgtaaatattaggaaagaacttgattactgcagactcagagaactgagcaaaagagagagaagcaattctcagggaacaggagagacagttcaaagagaacatgccctgcaagttccatcctctgcacattcttaccactttgtagtaggaattagaattatccacagctgtgcaaatattgtgaggaagactttatttaaaatgggggctggatgtggtgggtaacacctgcaatcccagcactttggaagcccaaggcaggatccctcgagctcaggagtttgatacctcgtctctactgaaaaaaaaaaaaaaattaactgggcgtggtagtgcacgcctgtagtcatagctactctgaggtggaagaatcccttgagcccaggagtttgaggctacaatgagctatgatggtaccactgcactccagcctgggtgacagagcaagatcctgtctcataaaagaaaaataaataaataaataagaaactttaacaagcagaccaagagatagagtgctgtgtgcrgttagtaccaaagactagattcatagaatcctcactgtggccattttgatacagactgaattggaacaggacaatgtagaacacagaggaagaacagcaacaggagtggaaacaagacaacaaaaaggccctgcatgagctgtgcacagaaatgttcccttacttgcactgggctaagattttcaccaattcttcaggaaaaaagaaaatggaagttagcattgaaatgacaccaagtattgttggttttggtttcaatcagatacatatgtattgaacaaactctatctttcatatattaaggaaggctctggtgttaataaaatagcatgaaaataaattcctgcaggaatcaggtgggagagagactacaggtggagaagatttaacatagagatttggagtaatttgtttggaaaatgtgctatggaaggcacgtaatataaataataaggttttggtcagctagcagcacatttgaagctagcatggatgtgtagggaggtcatcaagattctatagttttccttagtaaggctctgcagttgggaggaggagcaggatgaacgggtggagggaactgggtcaagcttggcacagtacccacttaaatattgaagtggctgaccttgctgcctgggctaattatcatcatcataatcactaaaaaatttttttgagctcttactatatgccagtttctgttcttaagtctttaaatggatcatmtttgggctgggcaggaggcatgtgatcataagagaatcagcaagctgtgtaagatggaaaggcaggcagagtcattccaaagcttagtaaaggttctagaaatttgtattcmactgcttcagtgtatactgaacatggatgaagttcagtatgagaaattcagctttaaagatttgacagttccmaaattaatattgttataatgtccatactacccmaaatgatctattgatttaatgaaatccctatcaaaatttcaatgacatttttcctagaaataaaaaaaaattctaaaattttcacggaactacagaaaactctgaatagccmaagtaatcttatgcaaaaaagaacaaagctggaggcatctcattacctgacttcataatatactacaaagctatagtaatcaaagcagcatagtactggcgtaaaaattgatgtacagactaatggaacagacaggagggcacagaaataaatctgcacattacaatccattgttttttgacaaagaagccaagatgtatacaytgaagcagttgaatacaaatttctagaacctttaccaagctttggaatcactttgcctgccttcccatatcttggggggtgtccaccccactgcgatgtcgatcgtaatacccagccaggggaggggggtgatattactccccatatggcggggggtgtccaccaccctgctatgtggatcataatacccagtggggtggaggggggtgatattactccccatatggcggagggtgtccagcctcctgcgatgtggattgtaataaccaggaggagagacgggggcgatattgctccccatatmgcagggggtgtccacccttctgcgatgtggaccgtaatacccagtgggagagacggggtgatattacttcacatatgtcggggggtgtccaccccactgcgatrtagaccctaatacccagagagggagaaggggtaatattactccccatgtcatggggggtgttcaccctccttctatatggggagtaatatcatcctctcccatcctggatattaggaacaatttcacagggtgtgtgtacacagcctgcaatgttgaaagtaatgtcatcctctccccctccggatattaggaacaatatcacaaaaggactgtacactttttgcgatatttcgagtaatatcatcctgtgattccctgaatattgggagacatattttccacaaggtgggtgtacactcattgctatactgggagtaacatcctactgtaccccccggaaattatgagcaatatcacaggggtgcacagccattgccatagcagaagtaatatcatgcgctccctcactagtttttaggaacaatatcacagggggawgtacaccttctggggtattgggaataatatcatcatctcttcttgtagatattaggtacaatatcacgggggggggtgtacaccccttgctctattagaagtaatatcgttctcgcctcttctagattttaccaataatatcacaagcggggtgtacatcccttgttatattgggagtaatagcatcttctttcaacctggatattgagaacaatattacatgggggtgtacatcccttcaatattcggagtaacagtatcttctccactcctggatataagaaacaatatcacaggcagggtgtacaccccttgttgtattgggagtaatagcatcttctttcaacctggatattgaaaactgtatcacatggtgagtgtccatgccttcaatattggtagtaatactaatttcttccctcctggatataagaaacaatatcacgggtgtggtgtacaccccttgcaatattgggagtaacgtcacctctccctatgtggttattacggagaaaatcacagggtggctgtacacttcctacgttattgggagtaatatcatccacaacccccctggatggcaggaaccgtatcacagaaggggtgtacagcccctgcgatattgggagtaatattattctcttgtccctgtacgttaggaactatatcacaggggggctgtacaccttctgtgatattagaattaatgttatcatcttcyccactgaatattaggaacaatatcacagaagggtgtacaccccctgcgatcaggccagtaatatcatcggctccttccctggatattaggaacaatttcacaaggtgtgtacaccccctgcgctattgggagtaacattattctctcttcccctcgatattagaaagaatatcacaggtggagggtacaccccaccccctgcgatattgggagtaatatcatcctcttttaacctggatattaggagcggtgtcacagggggcgtgtacacttccttcgatactgggagtaatatcctctctccccgtaaatagtaggaaaaatatcaaaggtgtgtacagcacttgcgatattgagagtaacataatcctcccctcacctggatatcagaaataatatcacggtgggggggtgtacacaacctgcgatattgggagtaacattattttctgcccccatggatgttgagaacagtatcacaagggcggtgtacaccgtctgcgataatgggtgtaatagcgtcctcactccccctagatattaggaacaataccacaggcagattacacacccgctgcaacgttgggagtaatatcatcctttcccccctggatactaggaacaatatctcatgggaggtgtacagcccattccattttgggagtaatattaatttcttcattgctggaaataagaaacaatataacagkggtggtgtacacaccctgtgatattgccagtaatagagacttcgccccccccaccggatattaggaacaacatcaaaaaggggtgtatacagcgatattgggattaatatcacgctctcccccttgaatttaggaacaatatcaaagaaagggtgtccaccccttgcgatattgacagtaattacatcctctccctccgtggattttaagaacaataccacatagttggtgtacacgcactgcgatactggaagtaatgtcatcctcttccccctggatattaaaaacagtatcacagaggtggtctacaccccccgcgatgtggccagcaatatcatcctytcccccactggatattgggaacaacatcacaggggtgtgtacacctcctgcgctattgggagtagtatcattctctcttcttctggatattaggaataatatcataggtggggtgtacaacccctgcgatactggcagtaatattatcctcacgcaacctggatattcaaaaccgaataacaggggggtgtacaccccctgcgatattggtagtaacatcattctctcccccacttgatattacaaaacaatatcccaagaaagggtgtacaccctctgagatattgagagyattatcatcctctccccaactaaatatgaggaacaatgttggtgggggggatgtacaccccttgcgatattgggagtaatatcctctccctccctggatattagaaacaatatcaaaggggtcgtgtacaccccctgtgatattgggagtaatatcattctaatctccccgggatatttggaacaatattatggagggggtgtacaacctctgccatattgtgagtcatatcatttctcttcccctggatattaggaacaatatctagagtaataatatcccttcccttctggacattaagaacaatatcactgggtgggtgtacagcccctgcaatattgggagtaatatcatcctctccctctctcgatattaggaacaatatcccaaggtgggtgtacatcccctgcgatattgggcgtaatatcatcgtctgccaacatggatattgggaacaatttcacggggtggggagggggtgtacaccttcttccatgttgggagtaatatcatcctctccccccgaattgtaggaaaaacttcgaaagggttttaccacttgtgcaatattggcagtaatatcatcctctccccacctagatattaggaactatatcacaggatgctgtacacttcttgcgatattgggaggaatatcatcctctcccatcatggatattaagaacaatatcacagggaaggtggacaacccctgcgatattgagggtaatattatgctctccccttctggacatcaggaataatatcacaggaggtgtgtacaacccctgcgatattaggagtaatgccatcttttccccccgaatataagaaacaatatcacaggaagatgtacaccccctgagatattgggagtaatatcattctctcctactctggatattcagaacaatataacgggggtggagtggcgtgtatacccctgcggtattgggagtaatatcttcctctccaccgctggctattaggaacaatgtcacagaaggggtgtacaccccctggtgtattgggagtaatatcatcctctccgtccctggatattaggaacaatatcactaaggagtgtacacctcctgtgatactgagactagtatcatcctcttgccccctggatattaggaacaatatcacaggggtggtgtacacctcctgcgaatttggggcaaatgtcatcctctccacctttggatattagagacaatatcacaggaggggtctacgccccctgcaatattgggagtgatatcatcctctcccccccggatatcaggaacaatatcacagaagggatgtgcacccactgtgatattttgagtaatgtcatcctctacccgctggctattaagaacaatacaggtggtgtaagctttccgcgacattgggagttatagcatcgtctcccccagatatcaggaacaataatattaatattaataattaatatcaattattaatattaataaaatgatgctaattaatatcaatcattactattagtaattaaagtgcttacaatgaaattaatgttaataacatcaataagagccatagtaaataaaacattagcaatttatattgattaataactagtattagnattaataattaataataccattatgttagaaatcagtattagttgctatcaataattaataataataattagtgattactaatgacattatcactattatcatttctaataccgcacggggtctacacccaactgtgattttgttcctaatagtcagggcaggagagcatgatattagtttcaatatcgcagtaggtgtacacccgccctgtgatactgattctaatatccacgggtcagagtatgaaattactccaaatagagcagggggtgtccagccacccggtgatattgctcctaatattcacaaaagaagagaatgatatcactgccaatatcgcagggagtgtacacctcttctgtgatactgttcctagcatccggagggggagaggatgataatacttaaagtatcgcaggatgtgtacacccaccctgtgatattgttcctaatatccaggaagggagaggatgatattactcccctcatagcacagatgtacacccaccctgggatgttgttcctaatgtccatggaggagagaggctgatattactcccaatatcgcagggggtgtacatccaccctgtgatactgctcttaatattcaaaggccgggaggttgatattattcccaacatcgcagaaagtgtacacccccgtgtgatattgttcctaatatccagaaggggagaagatgatattactccccatatcgcaggaggtgtacagccactctgtgattttttttaataagcgggggggtggggggagaagataatattattctcaatttctcagggaatgtacaaccccctgtgagattgtccttaatattcaaagacagaggggatgatattactcccaatatcgcagaaagtgtacaccccctagtgatattgytcccatgatccacgatagaagaggatgatattactttcaatatcacagaatgtgtacacgcacccagtgatattgttcctaatttcaaggtgggagaggatgatatgacacctaatatcgcagagagtaaaaacactcctgtgatattgttcttaatatcaagggtggggagaggacgatattactgccaatactgcagagggtgtacacttgtctggaaatagttcataatttcaagaagggaagatgrtattactcacaatatcataaacaagctgtcggtccaccgtggatcgtaatatccaagggaagagaggggggtgatattactccccatatcgtggggggtgcccacccccctgcgatgtggattgcaatatccagggggcaagatggggatgatattactccccatatcgcggggaatgtccaccccactgcgatgtggatcataatatccacgatatgggggtgatattactccacatattgcaggggggtgcccacccccctgcaatatggattgtaatatccaggggaggagaggggggtgataatactccccatattctcttatgatctcatgcctcctgcccagcccagagatgagactttccttacctaatgagaaaaggacagtctcttcaacaaacagtgctggaaaaactggatatccacatgtggaagaataaaaatggaccctcatctcacaacatacacaaaaatcaactcaaaatggattaaagacttaaatgtatgacccgaaaatgtaaaactatggaagaaaatataagggaaaaccctatgatgttgatctggacagtgatttttttggatatgacccgaaaggcacagacaacaaaagcaaaaataaagaaatgggattatgtcaaactaaaaagcttctgcccaagcaaggaaataatcaatagaatgaagagacaacctatggaatgagagaaaatatttgcaaaccatacatctgataagtggtcaatatccaaaatatataaggaaatcaaatgactcaataacaggaaatcaaataacctgatttacaaatgggcaaaggatctgagtagatatttctccaaagaagacatggaaatggccaattgctaagaaagtagattttaagtgttctttttacaaaaaaagataagtatttgagatagggctttgttaaatagctgaattttgccaatctacaatacataaatatatcaaaacatcatgttgtatgctataaatatatacaatttttatttgtcatttaaggtaaacaaatttttaaaaatgaaacaaacaaaaagatttgacaattccagaatgaatgactgagataaaatgtagtgatctgatcatcttgaaaggtcattacaattgattgaattattttggctgttgtggaatattttccacgtggccttgtttggaagcagggttataaataaggtcatcccttcctgattttagggatgtgaaatcaaacttagtattttaaaattttgttttgagttgggcttccactggtagaaaaataaatgagaacttaattccattatttagaattgaaaaaatagatttttaaacaaaatgatttgtctacctgtgctgtggtggaaaagtatgggtgtctgtgacagggtttcctttatcaagtgaaaaaacttcaacccagactgggctaatttttcatttggtaatatggccatatctgggaagcaatcatttccagatcttaactggcatttcaattactaacttttacatttcacatgtttaatggaacctggaaaaggagacacagattttagtcttcttggctagtttgtgggtatagaacaatcttaactcggacatcgtggaagtcagtgagctgtgtagacaggaccttctggggagctgattgttcatgcactgcaaaactctctttcaattattgaaatcaacttttttccaatgcctcaaagcaaggacgattctgaggcctttgaaagcaatttttcattttgtttctttgcatactgacacatctcgatgtttactacgtaacagaagagctaatttaaagcagtgtgttgctaagcctagctctctccctatgtctccctgcctctgccaccctggatcctgtggtcctcagtacttttctgtgccatacattagaatcccagaatggcattctaaataggagacaggcggcagagtagtaaaaattgagtgaatttatgattcaactgagaagattctctttccagtattcttttccccagtaaagtgattgtactgattcctttgtaaatttggtcrcttggaaagttctaaggattgagcaaattgcttttaaagaatctccattttstgcatatgtatgtcacctactcaaaatcttattttccagtttaaattattttctaactaatatgttatacttccctcagcaatccctcaactgtaagaaaaatgcatttttttcttctagtgataaatagtaagttcattgcatttcttagaatataaacattcataattgataacgtccacacatctccccagtcctcatgtttgtattattagcttaatatggaaagactgtgtgtgtgtgtgtatgtgtgtgtgtgcatttgtgtccataataaaagagaaatcttatgtgtccataataaaagagaaatctattktgctaatgagagtttccaatcaacaaattttgccttgtgaattacagttttaaagtactttcaattrttaaatttattgctatttaaaatcctatttaggaaccttgctattaatactagaactttagttacagcctcaagtttgagcccctcccaaaaaatctcatctcctggagcctgcaaaagtgtataaaatatgttcagaaaaatacatcttggacagccatggagtggaatggagagctggtgggatatatggctgagaggagaggtccaagacagtgcctttcctggtcacaaggtcaaggtcaatatggctcacatgggtgatgccattttcttcttgttctcataacatccagaagatgtgctggctgatcagcagttttgcagaactgctactttggttctcagggagtgctctagaatatatttacataacttgagaaaaatgtcttgagcatatactgcatggccagtactgtgcctgagccctcttagtgtctagatgtgaattgtagttatagtctcatggctaaaagttgttttgtatttcagtctcttctgccacctggtttttaaaatgttttcctttttgagaaaatcacaattacctgtatatgtaaattttattgttaaagatgagtactgatattttgactttattttgggtcataggcttgcaaagctttacttaagacttcagtaagtaaaggcccatgactgatttgtagaatcactgaaataatagtaagactctacttctcagaagatgaaacagagtcttagagaagtttattactaaattagacagtttttttttktkttgtttttttttttgagatggtgtctcaccctgttgcccaggctggaatacagtggcacgatcctggctcactgcaatctccatctcccgggttcaagcgattctcctgcctcagcctctcaagtagctgggattacaggtatgtgccaccacgccgactaattttcatatttttagtagagatgggggtttcaccatgttggccaggctggtctcgaactcctgacctcaggtgctctgcccgccttgtcctcccaaagttctaggattacaggcatgagccattgtgcccagctgacagttgtgtttttaacttgaattttatacttaatttttgataagaatttttatttggggtgtattatgatatttgaatatatgatattttgtgggtatggagattgcagatgatttaccagatttgcagagcaagtaatagaggacagtttattccttcttagttttcacttgctcttcttccacatgtgttagccactgttagctccactccagatgagatagagcttcttttctgtctgagcatgaatttgctgggagccatgagataagttttttcttaggtcacatagttattaaataaatattcactgagtttaatttatgaacaacgaaagtaaaaccagacacgattcctccccaaaagatgagctcatgtgaaacagtggggaatgcatcatctttcaggttaccagtgtatggtggcactacagtatcaaggttatgtattatagacaataagtaaggaagacatatctgagctgattctaagatcagaatctggtgatgtgttaattgaacacttggcaattgctttcttagtttacccattcagattacttatcctattgaggaaatgaagatagaaaagattggtggctttattatatgttacactgatgctttsggttagagagcatgggttgcataaaatattttaaaatgcggatggataatttttagaccagttaggatggctacattagagaatccaagacaatgtctgccattatctttacaatacacactgatttttgtgtgtaccttgtcattatgtaagcttcctacagggctgtggtaagtcatggacagggttaaggagaagggtacatgtcgagaaactaaatcacatttggagaggagatgtaacaaaggtagggttcagaggtttacyggtaacaattccaaatttggaatgaaaaagttactctttgtttagcgttcgagttgggagtttgccctgcaagagacagtcaaccactgacttcagtcgaacgtacttggaaagggaagaacttaaaccagccatgaacagaagaaagccaggttttctggaaacatcgccaaaayccagcaatttctcagaattttcagaggcgccaggggggtgtttgcatttcaatggaaaaagttctgaaagctctggaaactwttctcagttttactttctcattgaaaggcaaaaaccatggctgtaagtaagagacagaagcatttgctatggctttgttaagaattaagaaaagggacctctggaaaatttgaattgtccaatcctttgccacagagccaagacaaagtggtccaagtcataatggcaaatagaaaataaaagtactgttagctttaagacaaaagtactcaatgtctggagccactttccaccagcctgggttttaaaagaaagacagaactttctagatttaaagagacatagttgcagctgtattgcaataacataatggtagctctcataagtacatacttgtcataagtatttaatcttttcacacactacaaataccttgttaggttgctaaggggttacagtacttatgagaaacgatctttgagaagaagaagaatactatttccagttaagatttagaagaattttaagtagatctatagtaacagtcaaaagtagaaaatatgcagtatagcaaacaaaattatttttggtctaattctaccacataaaacttgaaggcaacattgtccaacagaaatacactgtgaatcacatatgtaattaaaattttctacttgctacatttaagaagttaagacaaacaggtaaaattaattttaatgctgtattttgtttaatcaatgtctcaaatattatcattttaatatataatcaatataaaaaattagaagtgaaatactttacttttaatcttactgtatgaaatttataatttatgtttacaacatctctccatttggatgctaagttttcattggaaatacttgatttgtattcagatgtcataaaatttatggttgaaaaagtagatatataaacatacttaaaaattttctaataattgaaatgagtagcaatttttagttttaaactcattaaaattaataaaattaaacattcaatttctcagttgcactagccccgtttcaggtactcaactcagcagccacacgtggctaagtggaactgtattaaacagtgcagctcaaaaaggttgctaaattcatcttttattattctgtaattttgctctttcaaatattagctaaccagataagcttgtgaaagtgactaatgccccctttattatgcgaagatattttggggggaatacaaattgttctgtgagcttcgacctaccctttgctatagaggtcatttctccatttactgttaagtgtgcatatcttgctggaactcttcaaaaaccctgagcgagctttccatatgggaagcagtgagtcacttggtggggggatttcgggagaggaagatgaggaggtgaagtagagtcagcaggaagaggagcatttttcaaccagggtcagaaatgtgaacagtaattttcaggaaataaccacatattttcttattattaaaataattattactacaaaaaaattaataacattcagataagcctgaaaatatagaaaccatgcataattccattacccagagataaccactggtaacactgaacacatgtctttttagtcttataaatttattcacattaatgactactttctatagtggtttctattgcttcacagattcctgggagtctctgagacattttcagggggtccatgagatcaaaactattttcaaaaaaggactgagaagttatttcccctttttactgtgtggcacttgcgctgatgatgcgaaagtggtgtagacaaaactgctggctccttagcactaatcaaggtggtaacactgaattctactagaagtcattgcattcttaaacaccacacgcttagagtaaacacacacacatacacacagacaccctaaaccccaaaagacaaaaaaagtcaagacacgaataacctcctagtttcacttaagaacatccttggtaaagcaatacaattattaattatattaaatcttaacttttttttttttttttttttttttttgagacggagtctcgttctgtcgcccaggctggagtgcagtggcttgatctcggctcactgcaagctccgcctcccgggttcacgccattctcctgcctcagcctcccsagtagctgggactacaggcgcccaccaccacgccyggcttatttttgtatttttagtagagacggggtttcaccgtggtctcgatctcctgacctcgtgatccacccgcctcggcctcccaaagtgaaatattaacttttgattactcatctttttttatagtctgtgtggcaagtgaagtacaaatgaagtactcccgattcatattgaagcatgatggttgttttaggaaagacacctatgccattatttgagttgtgagctgaactagcagctttttttcccccaaggaatatcattcttacttaaaaraacaatactaataaacaaacatactgattattcagacttgcatatttggtggacattttatcaatgatgtgaccctgtcatttccaggataacaactgaaagtatttgttgctaatagtaaaatttgagctttcaaccaaaatttagaagtgtgaaaaactccatgaacttgatggcttcccaataattaaagacttttttttaaaaatgagatttatgatgatggtaaccgatgtgactttttgatgttatataaaatctgccaacatttggaaaatctacrtaactcagaaaaactaatattctcccaaacgataaatgcactgtgttcaaaatcacgcacgaataaaagatcctttcagagtgtgagatagatggacttcaatgtaatagtataaacattcagttatatggtttcaaattgcatattgtaactagcatttaagaaacattgctttttgagttttggtgtagcatcaaagaaaaatattcacaattagctgaaaaggctattaaaatacttctttttccagctccaagctgtgtgagagtagatttgttcccccatactttaatcaaaacaacatatcacaatggattctataaacagatatgatgagaatccagttgtcttccattgatatgatgagaatacagttgtcttccattaagtcaaacattagatttgcaaaaatataaacaataactcttttcttactcatttttttgtgggttaaaatattatatcacmaaatatgtaatttatgttaatttagttgatttattattattttaggtatgttgataaatattttaaatttttttcagttttaatttctaatgtggtaagttttaatagatataatacacataagcaaatatctctcagtagttaaaatactagaaattattgaggccctcaacaattttcaagagttgtgaagaggttytgagattaaaaaaaaaaaagttagagaaccactgctacaataggtccaatcttaggtgcctacccccatccccaactcaggctaactacagacatgacaaataaacagaaacgcaagaatcctactgtgtttcaaaaacattctctcagtacatacacatattttaaaacgtacttacaacatttaaaattgaaatcctactgtacatactcacttgtaatctgacttgtcccattcatcataaacactttttttttyctcaattttaagttcaggggtacgtgtgcaggatgtgcaggtttgttacataggtaaatgtgtactatggtggtttgctgcacaggccatcccatcgcctgggtattaagcccagcatccattagctattcttcctgatgctcgccctctccccacccgaaccctctgacaggccccattgtgtgttgttccctgccacgtgtccatgtgttctcatcactcagctcccacttataagtgagaatatgtggtatttgattttctgttcctgcattcgtttgctgaggataatggcttccagctccattcacatcccttcaaaggacataatctcattcctttttatggctatgtagtttttcatggtgtatatatgccatattttctttatccagtctatcatgggtgggcatttaggttgattccatgtctttgcaattgtgctgcaatgaacatacacgtgtatgtatctttataatagaatgatttatattcttttgggtatatgcccagtaatgggattgctgggtcaaatggtatttctgcctctaggtctttgaggaattgccacattgcattgtcttccataatggttaaactaatttacactcccaccagcagtgtaaaagagatgaacactttccaatgtcatgaaatattcctctcaagttggatttgtggaggttgtattgtattctactggtcagatgccactcagttcatttattgtgtctccttccatcagcaaggtttaggcaggaaaatgatgtttatgttttaagaaagtactctaataacaaaagagagagaatcaggggaagctgttagaaatctcttgaggaggaccaattaggtagacacagtgatggcctgagaaaaagcagtgaccttgggattgtgggggtgagagtacattaaggtgggcaagtgagtgggaagagagagatgtgtgctctattatgcatttttctagcatagagatcaaaggcctttggtaaatccaagtggcaatgttcagtgcattttccattctttcaaagcagtgcatgtttcactctttttaattttgaaatactcagtattttaataactgtgtaccatataatgtagagtttacatgtaaatgtcttcatttgcatttacacatggcttctttccacaaagttgtcatttctttagttttctgcagcataatttaattgcttatctaccagtcctgagtaaactcactcacttagggttttctcagcatttcatagatcatagatcacctctkccaattataggggtcattctttcccactttcctttccaaggtgacctgtaacttctgggcagcttacattgcctcatgacctctggatgaaagtgcctacttcagggtcttcctctggcttgtgttggcacctctgagctgtctgtaggtccactgtgatttctggttgctgatgcctgtcattgttctggcatctttgcaatgactgtgaacacatcttagtgtctctggtcactggtctatatgtttcgagtcatctttacccctgagggctccttaggtccattgtctgctctctgcagctcaggggaacagacagcacagagtctctgtggtggcttgtctaccattccctggagactgagagctgtcttgggctctatttgccaggtttgcrtgcctacctaccattgtggctcctttgtaactcccacaaatacttaataattgttcaagaatgtatatagataaagggaggcattattgctattaaaactgcttgataacatcatggagatagcatgagactaagtcatttggactacttgttcataaaagacttcccatgggattagagaacaccataaaggaatgttttcttttagtcacattttaaatttctctatagtaaagcaaaccacagatagaagagtcacctgttttaaggtttcattattgcaaaatctcttgccatttgcctttctttactttctagagctgaaaaggaattgaggcataactaaatcctcctttgtgatttttcatagaagaaaactgaggtccagtgggggaagygaattgtacaaaattacacacaagttagatgggaccaggtctctcaactcccagtctggagttcarttttttttttttgagacggagtcttgctctgttacctaggctggagtgcagtggcacaatctcagttcactgcaagctctgcctcccgggttcaagcaattctcgtgcctcagccacacaagaagctcggattacaggcatgtgccaccatgcccagctaatttttgtatttttagtacagatgggtttttgccatcttggctaggctggtcttgaactcccggcctccagcaatctacccaacttgggcctccaaatgtgctgggattataggcatgagccaccacgcctggccttctggagctcttttgaattcattcatttcttttctttataaattacccartctgtagtattatgttatagcaatacaaaatgaactaagacagtgaccatcatacccaagattcaaggagccctcccaaccagctattaagatttgctccagaagctcttgccagaacttgagtctcaagcatgataagtatcaacatgtcaataaattgtgccctatcatacattaatattttgcctcgtctccatttatacaacaccttcacatttttctttcacatgcattgccctaatttctactgatttatattgttgatgtcctacaatagtttttagcaagcaaactattttatttcagcactcctcctcttgggcttatcctagttatcaatctggaggtaatgagggaagatattgaggaaagcaaacattgttttatgaagtgcctgcctcagatatgtttttgtgtgatcttcatggaaggtgaaattgcttttctctggcaaggggaatagcactgctttccccaggctgggtattcaaagttctcagactctgttatctaaaggacccccatcccaggtttcagtgtcccattttcttctgatcactgccttgaccttgacacagaggatctatggaggctgtgcactcagctctgtcatgctacaatttgatcctgggcctgattttccagcacaatccaccctgctgcttcaggagttgagagtctacttgacaactgtaaaaaaggctctggctttaacaatgtaccttgtgtcatcagtaggccactctgagcctatcattttcttccttcaatgtttcaaatacagttaaagaaagccaacccactccacaatccttacagttatcaaagtccagattctgcatattccaatgactcaccttccacttgaacctcatcctgactaaccacaggtagtaaccrcagcctttgtagctgggatgccattccttgctaggggttcccataatttcactcttgtctccaaatgttgtagcccagtctactgatttgaagagtgtcctcttccccctggcaaattcatgactacctggaacctcagaagtcacccttatttgcgagcagggtctttgcagatgtaattagttaagattaggtcatactagatgacgatcggctctaaatccaacaactggtgtccttataagaaggccacatacagaggcacagagctaaacagggaagaacaccatgtgataacagaggcagagcttggagggatgcagctacaatccaaggaacaccaaggattgccagcaactaccataaactagaaaataagcatgaaacagactcttcctcagagctcctggaaagaatcaacctgaagacagctttgtttcagattcctggcctcctgaattgtgagagaataaatttctattgttttaagccacttagtttgtggtactttgttacgccagccctaggaaacaaacacacccaggttcccaagaaagcagcatttgaggcagagatcttatatgtggttactcctatgtgctattacaccttacatgctaatacttctgtattaggaatcagtagagagggtcagggcagtgatcagggaagagacaatggccaatgtgaggatgcaatatctagttggttgccttaaactacagaaccattagaagaaagaacgttaacaatgtttttatactgtctatttaagagagaamggaggaataatatatccacatggtcacatttccctttgattaaaagtttacccatgggacattaagtcacctccacttaaaaggtgtacattcattggcactgttttcatcagggatgtctgaactatggtaatctgtgtgggagcatcattcagagaagagagaggagaaaaatgcactagtagctccctttcttgagctccaatctcctgccattgtctttcattgtctaaacccaactagaagccagctgcatcaggggacttggaaatagagtctacaagtgtcctttactgcagagaaaggagaggaaatggctctcagagccagccggccaggaacagacacatcaggcatggtggtatgaggaaaagtgcagggtggcgacttctgagaatctgtcctggcggcctccaattcagcctcctgctctgtatgctgtgctgtctctgcctttgtggctgactgggcagagggaccaactgcctggcagtctgtattagtccgttctcacgctgctaataaagacatacttgagactgggtaatttataaaagaaagagatttaattgactcacagtccagcatggctggggaggcctcaggaaacgtacaattatggcagaaggggaagcaaatatgtccatyttcacatggcggcaacaaggagaagtgcagagtgaagggtggcagcaaagcctcttacaaaaccatcagatttcgtgataactcacttactatcaagagaatagcatggagataactgcctccaagattcagttacctctcatcaggttcctcccacaacatgtgaggattatgggaactacaattcaagatgagatttgggtggggacagagccaaaccgtgtcattccacctctgaccgctccaaaatctcatgtcctcacatttcaaaaacacaatcatgcccttccaacagtcccccaaagtcttaacacattccagctttaactcaaaagtccaagtccaaagtctcatctgtaacaaggcaagttccttccacctacaagcctgttaaatcaaaatcaaattagttatttcctatatacaatgagggtacagggattgggtaaatacatccagtccgaatgggagaaattggccaaaacaaaaggacacagaccccatgcaagtccgaaatccaatagggcagtcattaaaccttaaagttccaaaatggtctcctttgactccttgtctcacatccatgtcatgctgatgcaagaggtaggctccaatggccttgggcagctccaccattgtggctttgcagggtacagctcctctcttagctgctttcatgggctgatgttgagtgtctgtggcttttccaggtgcatggtgcaagctgtcagtggatctaccattctggggtctgcatgatggtggccatcttctcacagctccgccaggcagtgccccagtggggattctgtgtaagggatccaaccccacattttcctttcacactgccctggcagacattctccctgaggggtctgccactgccgcaaacttctgcctggatatctgggcatttccatacatcctctgaaatctaggcggaggttcccaaacctcaattcttgatttctgtgcacccacaggctcaacaccatgtggaagctgccaaggctttgggcttgcaccctctgaagtgacagcctgagctctatgttggctccttttagccacagctggagctgaagcagctgggacacagggcatcatgtcctgaggctgcatagagcagggggtygctggggccaacccaggaaaccatttttccctcctaggcctccaggcctgtaatgggaggggctgccatgaaggtctctgacaggctctggatacatttttcccatttcttggtgattaacttttggctccttgttacttaagcaaatttctgcagctggcttgaatttctccctagaaaatggggttttcttttctgtcacattgtcaggctgcaaattttccaaacttttatgctttgctttctcttgtacactttgctgcttagaaatttcttccactagataccctaaattgtctctcaagttcaaagttccacagatctccaggtccagaccaaaatgccaccagtctttttgcatagcaagagtgacctttactccagttcccaacgaattcctcatctccatctgagactacctcagcctggactttgttgtccaaattgttaycagcattttggtcaaatccattcaacaagtctctaggaagttccaaactttcccacatcttcctgtcttctgagccctccaagtctccaggaagttccaaactttctcacattttcctgtcttcttggaacagttggaataaactgttccaacctctgactgttacccagttccaaagttgcttccacatttttgggtatccttacagcaacacctcactctaccagtaccagtttayrgtattaggccattttcatgctgctaayaaagacatacttgagactggataatttataaaggaaagaggtttaattgactcacagttcagcatggctggggaggcctcaggaaacttacaattatggcagaaagggaagcaaacacatccttcttcatatggtggcagcaaggagaagtgcatggtgaaggtggggaaaacccccttatgaagccatcaaatcttgttagaactcacgcactatcacaagaacagcatggagataaccacccccatgattcaattacctcccattgggtccctcccaagatatgtggggactataggaactacaattcaacatgagatttgggtggggagacacccaaaccataacacagtccttatggctgaggaccattgggccagtggtctacctcttctcccaaagtggccttatgcaaggtacctggagaaggtccacttatgagactctattaaactattaaatactattttcattcaccactgagtgaatagaaaatcagaaattaaggtcctattttatagacttcataaaatcacttgaattagtggagggttgattggggttttgtctttgtcatgagtacaaagtatcagtcatgatgagcctcattgagttttgtggggaggggtgtaccaaagttcggtagattacatgagtgaggaaggatggcaaagcctctacaggcaagcaatgcctagaaggagtggcacccgttctacagactccacaccagaaataaacactgctcatcaggggttcagcaagacagagctctggatccagatggactgctgaccaactgtgtgaacagaatagttgttctcaagtcttcccctgctcatttaaattactgaacaagttccactaccatgttaatgccaagctaaattacactagtcaatgcttttggtcaacatagaggtcaccttttaattttccccaatcttttctgctatagagcaaagcactaatactgtcytggcttctgttgctgcaatgcagtctttaggaatttagtcttaagtaaattctggtggagtaactcccgtgtaatccgtttcagtctagcatttgccaatgtcttagaaaagaggaagactgaaactcagagctttatttatttagtcagtcarcagagtttactgaatgttgactacacgcttggggctgagaaaaacagaagaaacctaagagacactctccctgacccagaggaccatctcatcttgcagtgggaatgtaactatgaatgaataagcctgatctgtggaccaggaaaggctttctgaaaacagtgatgtattaggttgtttgacagtattccaggctcagagagcagcccatagaaaggccctgaggcagagaaaagcatagcttatttgaggagacaaaagttcatcatggtcagggtgtagcactaatggaaagaaaagggttaaagatgattgaacaaagtgatttttagtttacttatttgtttctatgtttggctaggaagcctgctattctaaaccattaattcgagaatccacatttgaaagcctcaaatttaatttgatgtatgtacatttattgggtaagatgtgattcctgacctcagataacttagagtctgacaggaaagataagacacatttttgtagtattataatacaagtcagaatgtaccttaagggaaagacagagtgccatatgaatgcaggaacacctgtgctggatttgttcctgcattcatttcttcaacaaatacttaaatagtatcttctctggggttacaaggatgaacaagacacaaactttaacttcaaggaattgattctactaagcaaggcacatacataaatcattagaattctttaagcacagagatagaaatatgcacaggctatgatgagataaatcaatggttttattttattgagcacttattaaatactttacatgcatttcccataccccccttactaggtaggtattctatcctcagttttcagatgagaaaactggcactgagagaagttaaagcaayttcagaggtcccaacatttgaaagttgaggatacggaaytcaaacccagttcttactcatgacaagccccaggctcctaaccatcctacatagaatcctgcttcccaatctctcatagtactcagggcagagcatctcatctgagccaggcagagatgacaaatgcctccctgagcttagtttagggattagraagtgttggggaggtgaaggggggtaggtgggtgccctaatagagggacaagctgagtagacccaggaggaagaaaactatccaatgttagggtattatgtccattctaggctgttggagattaagccaggaggcagaaaatggccagaaatatgcctggagaagaattgggatcatgcaggatatagaatgtatagtgggaaacagaactggaattggatttgcattttaaagtgattacaagggcagctgtatggaggatggcattgagggaaatgagagtgggagagaagttcaagattatcgtagagttgtagacaggagaaggtgagagtctgaacttagatattagcagaatggatgggaggagaggagaagcttgagaaaaagtcaggcagtgaagttaatgggctttctgaattctgtggctgtgaggagtcagcttagggagaaatcggggttgacttctaggttcctaactcagaagatggagtagatggatggtgttgccaccaaataaggagaaagcaggtttgggggttakgtgatgagttcasctttggtcatgttgagttggaagctccastgagacatctakatgaagcagtcccacaagaaactgkgaatctgaatcaaagttcgtgatakaaacatagsctagaaaaagatttcggaaccatcagcctaatggtggagctaaagcaaggagagtggaagagagtccccaagcagagagggtagagcgagctgaatgtgggatggtcatgcggggcaggcaactcttggagggggcacccatgtggaggtccttaaagaggaataaaggacacttcaggtcgtgtaatagtgtgagcaaaataggggaaaaagcaagaggtgttttcagagaatgtaatggttccatgtggctggataatagtgggtttgatgcagctatcaggtgattaagctgggaatgggttatagtcttgagagattgaggccaggcaatgagaatggaatacaattcagccttgaaaagaaaaaaattctggtacgtccttcaatatggatgaaccttgaggacattatgctaagagaaatacgccagtcacaaaaagacacatgctgtatgattccatttatatgaggtattttaagttatcaaattcatagagacmaaaggtagaatgatggttgccagaactgggggagggcaaaaagtgaagttgtttaataggtgcagagtatccatttttcacaaggaaggaaggtatgtgatgggatagtggtgatgcttgcacaactacactaaatgctgctgaactgtacacttaaaaaatggtggcaaggcatggtggctcatgcctgtaatcccagcactttgggaggctgtggcrgatgggtcacgaggtcaagagatcgagaccatcctggccaatgtggtgaaacccaatctctactaaaaatacaaaaattagctgggcgtggtgctgtgcacctgtagtcccagctactcgggaggctgagacaggagaatagcttgaacccaggacgtggaggttgcagtgagcagagatggtgccactgcactgcagcctgggcgacaagagtgaaactctgtctcaaaaaaaaaaataggtaagatggggagggataggaaaatattcattaaaaggataccaaaaaatgataaggtgataaaattttatgttatgtggattttgccacaattraaaatatcaaaagaagaaaaatgcaaagagaaaagaagtaatttttaaataaataaataaaaaaggcaggacttctattcagaggctatttccaatagttctgaggagagccartgtggttagaattgggtaggtagcagcagaactgttagtggacccacatgaaagggctgtgtttatatgtcagagtcagtcaaatgttggcaatgtcatatggttcaacmtaatagaaaggcaaaaagagacaaatcctttaatgaagttcaagaaaatatacattataaccatttaagttaaattgcaaaatatttcctggggcacttgctctcaaactaataaccaaatagcaaatattttccattttcaatcatcttaggtcaatttgaaaacagctttttagtttttattggagaaactcatattgtcttcacttgttcaatgtgaagttgagttgccaaaattgccttcagtacacatttgtcttttatatttcaaacagaggaaagtttccatttccccatttcattctgaaagctttcaaaaagtttgggcagtgcccagtgctgtccccntccctcacttcatcatttcagctctagttcttgcacttggcagacttcggacgccaagtttctgcttcagtgctggtcaaaatcccacagaggactttggtaccaatacccactgacaattctctgagctgagagttgttaacttttcaacacagtgacagaatgaaaagagcaggttgtattatcatttataatcaaccaggacttaaaaaattcacacacacacgagaagtaccccaagagattattaaaaaggaaattttcaggtggttttcatagagattccaattctgtgtatcttggatggggtctgggaatatgtttttaacaaaaattaggttaattctgayacaggtcgtccatacactatttttttcagaaattgataagttaaatcagggcttattttttcctaaggataatcacagtcaaacaaataatattgttcttttaagttggtagacactctagcattctgagtgcatttttatttattatatagtacatccaaaaatcatttttctaaactttggaaatattttcagcaaatgaatgcataaaatgagatactgtgtgttttactagttttcctggtatttgaggacaaaagtcgtagttatcccttctcctgttttctccacctctctaagtatagaagtggggggaggagtaggaggagtaggaggaggaggaggaagaggagggaagaggaggaggaggaggttgtcagagcattaagaagcaagagagtagaatgttacagggggtgctacaatcacccagataatagcaggaagtagggtggagaggcatgttataaatcagaaagaagaatcttcrgagaaggctgggaagcaggtgattttyagagttgaggaagcgggcacacctgcaaaacagaagagatttttggatgaaggttatagaacagcagtctagaggcagcagtgggagccagtttctgtccctagatactagagctccaagagcctgggagaatgactcatctctgcagaaagaggtgggaaggaatgtcgttgccaggggacccagtggctacgacagaaagatgccaaaaaaaggtactggatttctcccaacatctttgtcattggtcaaaagagacttccccaaacaatgaaatactgtttggagatcccactggatataggaccaaagggcaagcagcactgtgagcaaggatatggaaacccggaatgggataaccsgcacaacacaaatagggtcaaggataatgttcaggagttgatttcctttggaagcttggcgggggaaggaatacactcttcagagcaggacttgaaaagtgagatgcttakgggccaggcaagtaaggtgaatgagtgatggtggattaktgaagagtgtgaacaactakagatctccaacctcatctaaagggactgaccttgcctctgtccaactattttcaggtgggcatatakaakgtagggtaacaaatcccctgtcattaatgaggcccaatgttggcagctaattcagatgttaaataaaatgcactgtcagccaaaccaaacatatctgtagccagatctaccccgtgggctgccaatgtatggtctcagctttggagccasagagactgttattaaacctctttgatactcagttttctcattcatgaaatgataggtggaaaaatactckactttgatttttttgaaagctacttttggaaacggttagacttactcttcatgtcattaaatgaatgtatgcaaagtatttttcccgtgtctgctactgagtagatcctcagtaaatggctcttatrttgaccagaatcatgcatttttctcaaaattttcttccccaaacaatcaagcaactgctwtttcttagaaatgtaaaagatttctgtgtctgcaactatccttcaggtcaagggatgactattagtgtagaaaaggtgtgtggctcagctcccttccctcagctgccctgctctagcaccttcctttcagatcytctggtcctatagatgcctgaaggtcacaggcagaaatatacraattctacactaaaagaagttgtacaggaacctttaaacaacagcatcaaaagcatctgttaaagtaacgctttccactgagtgccttgctagacatggtacaaagtgcattcaacagacacagttcctttcctcttggaagacctaagacattccaatgacaacaacagatattttatattcatawaaagtgagataaatagcacatgaacaaataaattaacgaacctccctgacaaaaaaaatcgaggaaaggaatgcctgcatttattggtaagagaataatctgatgcatgttacaccaggggaaaactctgctgtctttttctgcctatcagggagctcataaagagatgagattttgaaattgaataatctcaagagattccttggtgagttaacaagaaatgaatgtccagatatatagagaggggagcattccaaatatagtgtgagacttgaggagaggtttagggatggaaaaagatgactgcttaaatggatttaaatacttttgcctggaagcatatgatcctggtgaaaaactaagatgtgactgactaggaaattctgagaatgaaatgatatgaggcaatgttctgttgaactccccagacctggccttcctcaggtaatgatcacaggcctgggaaatgtctgccatcttctagcaagagcttatttattttcacctggtttcatggtgtttttcagtcggtttaagtcagcttgctcctmtattcttttctgcagtcttcccgtgtaggctcagggtaatctgactacaaactagtactagggaaggagactcaggaagaaggggataatgcacagttgctctgtttctagcaggagtggttctcactgtgtgtgactagcttgctgaaccgtgaccatctgcagtggctgtcaggggcctatgtgtggaaagttcgcctgaactttcttcctcttagattctgcttatccttgacyggtcttgtagctgtctggaatttcttgtcaaagaaatgatattttgttttcacaaggctaaatttgttccagggactattttttyttyttaaaaacattgtttccatgattaactaaggattacamaaaagttgtggggaggaaacctaatttcttccaaagtctttgaacctgtcagtttaactcagcaggaataaagaaataagctgatttgaaatgtgataactaactagctaaaycacacacacacacacacacacacacacacacacacacasacacccatatttgtatggaaaaaatttcaggattccaatatattgtttttgcctctacctatcctgaatagaggtaacggaaagcaaaagtaaatattggtttktaatattctaagcaaagagtttggtagtggtatttgctgcttggcttcatcctggcttctgacctacttatcatctctgtctccttaggcaagttactcagctatagtctgctttacttycctttatgatagatggaaagggagagggctacataataktacctatgttagactggctatggagattaaattaatgcatgtaaactacttgaagagtgcctgacacccagtaagtattgaataaatgttagctaggatcatgcatacgattactgtataatgatcatgattgagattgagaaggtatgagcctaaatgtaggactaaattgaattakccttggcctaaggttctcaggtagttgagctataattaaacgcctttggccaatcctttttcaagtatcagagcatcttgggagggttagccctgggcaaaacatctgcttyaccacgccccatgaaggcctagaggctgggatgccctgagaggccacatgagaatgcacaggagggagacgtttactgtagtcctagcctaatcccaagttctattaattcagcaagtgatyttttcaaagggcactctaatattcaaaattctctgcatcttcttatatataccttctgctaaayactatacattttaggagataagaataataatacatcaataaaatgtaaaagtatttttcctctttctaattaaaaatgacatacaagtagttcttgaattagaactactaattccctaatgataataatattattattttctgttacagaatgttttatagacatctagcaagtggcatcacatttccattgaattaatggatatttccaaaygtttgagaaaatccgaaaactggatgtcctgtacatacatttccattgaagtttatggcagtttctgggcacaatcacatcaatattgcacatmtatagatagtttacaggttacataactgtggttttggatttaattgccaacttgttaccctgatagtaattccagacaggggaataacagagcgaaggggtctgcccattgtgttactgctgcctataaaaacaaataggatccttagggtttaattggaggacttataattgcacctaatgttaaaatgggaactttggacatctggaagatgagtctggatttggtcacttgcctttaggaattaaattcatgaaattgtgatggtcctaaagaacagtggtgttcccacctggatttatgcacaggcagaaatgacaaaggtgaatgtgagctggtctgcaaggccaaataagtcaggagagaaaaatggagtttggctttaaactcacaagtaatccaggatgatgactggcttctttggtcctaacatgaaaataagccatctaaaatgaagagcaggtacataaaaagtttgttcttacttggcaaagacatgcatggcttttggaacttgcaactacacagggtgtcacttggcatcatagagcccatttaggaaaagaatgacccatggtgacacgggctcgttggaaagggtcaggaaaggaacatatacagcaaaaggtacaatacagctttccgtagagaacactgggtatcattttcttccactcatccctcctctccaccatcaaagccaaacatttatataggtatgcattccaccctgcccaatgcattacaaatgccaataagagaggtaggactgttgtttccatttttttccttctaaagctattgaaagttctttgtctgttccttatatagttttaggaatacttttgaggaaattgcctttattctttatagtggatttcatataaagcaagttttgtgtttcttaggaataaaatttyaggcttctggaatattttttattttctctctccataaaaagataatttcaatttccctaaattactaggaatctactctacatggtgcascaaaattttaaattatgtaatttagattactccagagtaaaacgtcttaaaaactgagagcacascttaagtgtatggtctagaggcaagagttaatggcatggaaaagtagtaaaaggttggattagaaggtttaatacttttgatctctcagcccattgcagtttacttactccttaggagacacasatgggacacggcaggtgtgtgtaaggagcgaagcaattcatgaatactcagccatgaaatagaaaatcaaaatgaaataagtatgactgcaactatcttggtctattaacattcaactattaatacctactgttctttgaaagccattactgaatatttactgataagaaaaaaatgatagcttaggaagaggaagatgttcaggaaaagcatttaagcagggtttgaaagacttgtgattttcttaactcrgggtaaaagtcgaccaattaaagtaggtttcccatccaaatgtttcccatccaaaatgatccctttttttttccccaagggatctaatttaggatcccttggaaaaaaattccaaaatgcattacaactattcataagggtgacacatggacctatttttctaaggactttgatttaatatttgaatgcaatggtatctgactttgttagtatagaatatttaaacttaaaaagaaaataccttaatttacttatgcataagcctattamacacatttctaggggctctttttatgtttattctmtagaacataacctatctttgaagtggtatattagtttttaaaaagtcattcctaagctgaataattaaactgaaaacaaaagctattcttagggtgtattccacatataaagctatgcacatgatgctttgattcaaataatatacttataaaactttgttattgtttgagttccatattcagaatggcaacttttgtttttgatgattattccatcctgaaacaatttcccccctgctcaattaaaccagaattaggagcacatttatatctgatgagacttaagcttctcaactgcctgcttcagaaatgtagacctttagtgcttgtgttcattttgtctctttgtggaaggctcaaaagaaaacagaatcaattcccttaagtttttctggaagaagaaggttgsttttgttgctttgatcttagcatgttgtgcattttttattggctgttgaatataaaaagccacagcctcatctggtttttctgctatattctcatattgtaaatcacataatgccttccaatctaaagtaaaatgcctaagtccaaaatatcacttcaaaatggatttatcattatagttgatagaaagatttccagggtgtaagaaaacaattcaacagtttgattaatatgccacagactgctaaaaatatattcatgcattttagacaataaatttcaggatatagacatacactcatgctatttgagatccttttttcctaccattgcaagaggctgctttagctaatgcaacagctggctaggttattgcttcaacaatataattcataatgcaaaagcagctcttttccaaacattttagagcaactcaagttgtttacatctcctgtaggtgattttcctataactttgtgccaattggtgtcatactatttggtaaaaatctacattaaatcaagacaactgcacttggttaaatttctgtcatacagagaattatagaaaaattacagctgatttgaacttatcatcattaagtatatacagggttttagaaaatgaatgcaaactacaaaaatggagttgtataattaaacattaaatagtccaagtaataaaagtcatagattaattgtctctcagttctagtcagatcctttaaatactgtctcacgacttgagcattggttctttcatcggaagagtgcctatccttaaagttgggaaatttcagctcctttggagcaccgatcatctgtaaaaagtaattggcatcttcttccaaagtctcaaatttccctacaaaatcatagttgatcaaacacggatagcagagtttgctgaccttttcccagtgaatgtccattcctactggacggtgggaatccagcaagtagtggataaactctttgaacttgactccagatccattaattaatgcttcttcacaggcatttggtcgatatttcttgataattgcctttccgaatactggatggtaataactattggggtgttcaaatttgtccctaaaggctgatactaatctttccatgggatcacgaacaaacacagctttggtgtaagtatttaagcgggtatatatcccttttaggtcaaagctatctagcttcttcaaatgcttcccgtagtggacagcattgtgggagatgttgtatgcagaggaagccaatccatttagtaccatcagaattcttttccaattggaacagccagccttaggtacctcacaatataagattktgtgtttatcttctacatagattctggatactgtatgaaaaagatgtgactgatgatgactcaccccaccgtatttcttgcaaaactcctgaaggaaagaccttcgtttctcttgggtctcctcagttttcttccatttattatctttgactaaacttttgtttaaagggtgaatgtccactggccaattcatgttgctgaacttgttaaaaacagtcttagctccttgacgtttttcaatcaacttctctgttggtgaccctgtggacttayttaaagcttgatcccctccttgtgaatgactggkctttgttaagagcctagtagatctctcagaattgagtagaagattttcctttttttctcgtacatcctcaggcatgtgaaacttggggttctgttaaaataaagaargagaaatgttgaaagcacastcacgagtgtgggtatactggataaggaacttcacatatttgttttaaaatagtatcaaggagagcatatttcatataagctgccasaacamtttagcaaggcatgctgaacatacattttgtagtgagcttcttcacasaaaatgtagcaatgagaaayggcatctacaggatagggaggaaagagccctggatttttgtcctggctttgcctgtaatgcaataggatgtaactcaaccattctgagcatctatgacttttgggatattaataagtatgtcatcttcaagtactgttttagtttgtgcacctgaatgtagatacaaaatggagatgttttgagattgaaacttttattgtttttagggagcactctgtaatgcacagaatagttcaaaatcataaattacaacttaaaattttggcaaggctaattataaatctcgatgaccacttcagttttctaagtgcttgcaaaaatcatgtattttttttttcctgggaaaatgttttatttttctaaagcatttatcacaataatttaagaatttattatgatcatagtatacaatctcattcacatatgagaccttccctctttcccaagtgaagaatgactaaggaatccagaaaagtctacttgacgtcctgctctataaaactgtatcaaggtagagcaaaaatgtagttatcttttcagtaggatgaatgagtccatttaccacatactgttcatcttgccacatccttcctacaactctcacagtaaaagaagacatggaagacgggatttacaaggtggcatcctctggtagggatgaaaattttaagsaccttggcttttactctgggtaaactagggaacttttgtagggctctgggtagaaaagtaacatgatctcacttagacttgaaaaggatggtgtggagaggaatggactggatatatacatatagggttgtcagcatgttattggaaaagtaaatgaataaattctgtgctgtggacataatgcatggtgtcatcagcctagaggtggagggagtggtggggaaagtttcctagggaatatamacatgattgcaaatatatatatacatgatacacatgattgcwtatatatatatatagtacatatatatgtgtgtgtgtgtatacacaatttttaaccattgtatccccaatagtgtmtagaatggtctacagcctataataatttctctcaaatatttgtggaatgaacaagtgaatgaatgaatggaattaggtcttcaaggataattagtaattttctagcaaattaagcaatagaacagaggaatgaagcaccgttcatggagccacctccagacatcatggtcattccaccagctgaggttgaagggcactgcttttttttmtagtgcaagaggactgtgtgaataaccccctgaataccatatgccaacgtgtayagccccgtgtatagccccgtgtattagtctgttctcatgctgmtaataaagacacacccgagactgggtaatttataaagaaaaagatgtttaatgaactcacagttccacatggctggggaggcctcacaatcatggcagaaggtaaaggaagagcaaaggcctgtcttatatggtggcaggcaagagggagagtgtgcaggggaackgccctttataaaaccatcaaatcttgtgagacttattcactatcacgaggacagcatgggaaaaacccacccccatgattcaattacctcccacctggtccctcccatgacacgtggggattataggagctacaattcaagatgagatttgggttgggacacagccaaaccatatcaccccctgaaacggccactccaaatcttccataccattggaccgtctatttggagttttaactctaaaaccatttgtctgctgtcttctccagagactgccaggattacttcaaagccctttgtrcttctttactctgatcagtgatttgtagtacataaagttgtcactgaaaatataaaatttgactgtggtttgacagaccatagggttatgggtgcacatgcatggaaagtacttagcacaggccaaatataaaactgccatgatatttatactattacactgctataaataataactactattattgttgttttagcagcagcagcagtagtagtagttatagtactttaatcccagggacctggtgaatttaaagcctccccatttgtccattattattcagactataatttgtgtgtccctacatatgccctcaccaggtctcttctctgcttgacaatcagaaataaaaacaaaatccaccttcccctgtggcctctggactttctgctttgtggccatcaaattcccctttaatctccaggggtttctggaatgtttgtttccaagactctctgtaaatgaaacttggctgactcccaacactctgtgtctcttgcactttctcaagtaggtgaaacttgacttccttgaactacttgtctctccagccagaagatagggagtgatttccctgcagcccacggctgcttccaggacatcacccagcaaagccctctgcttctgtgaaatcaatgtgttctccttaagtctccctttccccctcctcttgttgtcatctacctttatcactgatstgtccactttacacactccagcttctaactcagctcctgtcattacatttagtgactctgacatccaatcaactctcagttccttgaccactttgtttttaacagaggagctctccacttcacatcaaacttggtyatcaccagagcctttactattcccaccatctttctgaccactcttgtctcaccttccagttcagtgttatttcctggtttgcaattctttgaccacttttcactgttacccaggtcttaacagccagcatgactggctcttcattcttcagctctcagttggaaagtcacctctgtagaaaggctttccctattcaccctgtmtaggttatttccctccctttcaaaatatttcctgcagaaccctgmttatttttctcatagcactaatcacactgagaaatgattttatttatytccttctstgttgtctttttcaccccactctacctccattgcactakaatataactgcagagaggtcttatctttcttgctctstgtggtactaagcacactgcctggcgcatagaagatgttaaggaaataattcttgaataagtaaatgtgcttctaatttaatagyggtcttctaaacaactgttttatgaccttgttgaagaaaaacaacattgaccaaaaggtsaagttaaacttgaataaacaattgaccaattcttgttaaggtgatgagaatctgtgtttaaataaacctttggcaaaagagaaaacamataaaataagcacatgggaatctgcttgcagtaaagtagatgtggaggcttcgtgtttaacctgcctgccaaatcagatcagttcaaagtcactcaacgctgtctccaaacctgtcgagggcmtgccagcaatcmggatttccaggccttactgcagacatcctgaatcagaatgtctgagtgtaaggcccctgactttaatttcaacaagatccccaggtactccagtggcagtcatakcatttggggactactgaactagaatataagaaaggaaagtataaaaaaaggcacaagccttgaaaagttcctttcatcctatctgggggagaaagacatcaaatgtagtggacttgaatatttcagtaagaagagaaataacttggatgtagagtaggaatgtcacatgagccctcatgcagactagatgcaatgtctttcttgtttatccatttctcgttgctggaagtcttggatctccaagcaactttctaaagactagtttagctggggagataacctcatgagggaaaggttcaccactcaatataaattagtgtcctcctgttttattgagtgctagtaagtttcctctagtctaaccaaattgagatatgggaaaagggttaattctctaaagtaatggcaccagcaacccacaagggtggccaccagaccttctcctggaactcctcatctcaatgtcatccaccttataaaagctgttattcgggtttgatgacatccctcccagcccccatctaactccattttcttccaatcacagcaaagactccatgactaaggggtttgcattactaaaatcatagctaatgacatttcaaatttaaagctcataccaacaaagtcccatcatcatcatcatcatcatcatcttcacaacaataataaaagagtaaaatcttacatctccattttccttgggacactttattctgattgtccctgaggcaaacatgtatataaagccaaaattatcctgttgccttcaagagtggctccccctgtgttattttccgtttttgaaaaggtcctattactttcctgtcacccactcacaaaatctgagagatgctttaacaatgggaaagtaaattggctattttacatctcataatacttctttttttgtatctttctaaattaattacccccaattggatattcattatcctcctaattagtgtccctgcaattattactaaattattcttccccaaacattttgttttttatttcttaacattttgaactggatcctctagtatcagtgaacgtccccattcctttgctggcatttgcagcctggtgctgctgagcctcttctccttttgctttttttgcttctctcttaacacatgccctgtcctccacttgcttttatctgggctcttggcagccccaactcatggtctcctcctttcttgggacgttcaaaatcttctagtttgatgtaaaaatcctactttctccatgacaaccacccaggtctccagtgagtgattctactccctttgaaatgactatagcacttagtctgtacttcctgtgaggaaagtaattttattccagcttccacagttatttgattgttttgttggaaaaactcttttaactgcagctaaattgtaagctatggaggaaagctatagttttccataaatatccttaaagagtagatattgcagagttagctgaaagacatgtaactacagatttaaaaaaatgagtatctaaaaaaaatatggaaaaatgtgtggaatgttcattaagtctgcaataaacttgaaagcctaattcttgttatttttttatttatttatttatttattttgagatggaatcttgttctgttgcccaggctggagtgcaatggcatgatcttggcttactgcagcctctgcctcctgggttccagcaattcttctgcctcagcctcctgggtagctgggattacaggcgcatgccaccacacccggctaatttttgtatttttagtagagacggggtctcaccatgttggccaggctggtctcaagctcctgacctcaggtgatccagccgcctcggcctcccaaactgctgggattacaggcatgagcccctgcgcctggccaattcttgttatttttaagggtttstgtatcaagcatatctcctctgtgaattcttatcgatcctcaacactgatatgaattatactttctttctccccgtcaaagttgttgagcacctcctatacatcaggttctgtgctggatgccagagatggtggggtttataagacaagtgcggactttattcatayacagttggtattctcatagggaaaagtatattaagcaaataactgcacaattaattaatctattaccatagtggcaaaggctccagcaagatactattggaagctgggagagcagaaatgggggtccaggatacaaagaaaagactggcccagtttgagtgttaagtcctctgtttaytgtgttttattttattmtaggtagttgttagggttaattgtttaggtaatgatctctctattttaatttcattaaatgtcagtgtgcactcttttaaatctatataacccccactagcatcaagaacactatcttgcattaataacatatgtttgaatttgattgaagcaaagaatatcattcctgcactgctccttattcaggcaacaaattcacattggttttatactgttgataagtgttgtacatttgtaggaccttatatactattgtggatcctatggaaactataaaacttgagactttgatcattctttcatcaatgcacatatatggaattactactgtatgttgttttaagcattatataaataaggatgagatagataaaatttgtggcccttcaaggaaaccaaagtttaattgatctgatgaaaataagcagtttatgaaaaaatgtgacaattgctataataaaaggataggtcaggtatttggaaaacaaagaaaaaagtgyttaatttttstggagagatttttgggggcaaatttcacaagggaggtgatgcctgagatgagcctgggaagatgactgaggagctaccaggtggacaagccagagatggcaagggctgtacatcctgacatmgagtctgcttgggggccagactcagatgacagggagaggcaggaggggttgggtgtcattccaggagggcctgggctgatataaacagtcagactttaccatatatatgatggggattttcaataaggtcgtgacaagattcacgatttaaaacattctggggcagtggggaggtgtgcctgggggcagagggatcttctggaagatgattatgattgtccatcaggaatccttaggagaggaactaagacaatggggtaagaatgaagaaaaagggagttgagacaaacttaggaaactgctcagattcgaagcataagggtgacagaagtgtaaagaatggctccccatttcctctctgagagaagaaatagaagtagcagtttttatgggggccctggggtgggtgtgggcattcactatcttcgatttcagacctcttgagtttaaggtgccttagagagctggaggtagatagcaggactgaaaagctgggtatagattcaggagttgttggctggtggaggtgcagctggattcatgggccttgawggcactgcccagggagtaatttataatattactcttaataaygtatcttttgtgattyaccttgaatctagakagamgtgcagttatatttcttcacaccatcaaggagacctaattgtctccagtcattgataagataaatgatgggagagggtggggtgctcaaaagtcagtcttttctggggacacagrtcagtgtgtctctcctgggtccctctgtgccacagctactcctcttaaatcttgattcmagggcttcagaagctratggcatagttatgagaggggtgaagactgygactrcatttccaacagaccctgaggacaattgggaagaatgtgagtacggagtcctamtatccagtgccatctgccccatctcgctctccatcctcaccctttgcccttccaccttcagttattcattaaacacktgttttctgagcacaawctgygctccaggyactgggctgtgygttggtggtatagctagcaagacagacttggtccctgatcttacggagcatccttgtggtcagggtggggtagggagatacaaataagaaaaccaaagttatacttatgggaggtaatgagatggagaaaaaacttggtgcattaaaggacaaaaaaaaawttggcacaggaaaacatgaaagaggaatcctggctcgcaggtgagggaggrtatctgggagaaactatgagccaggcagaatcatttccatttcctgtctctgtgacttatttcctctctcttgaatattcttctccattttgttygcctagttaattaatagactagggcatggagcaagctggtttaatcactgcrtcaaacagaagagtagatrcagataagctcattttacagattaagaacctgagctcagagaatttaaataatgtgccaagttaacacagctattgctggagctrgtgtctcaaatctctgtcttagtcatgyctggcttttttcagctgcatcatatatcaagcaatctatttcttgtttaatgtccattaaatgaactgatgtcaggaaagcaccaggcatatgcctgttacaagagagtatggtcgttaagaacatggatttttgagtcagacagaactggttatgtgtcttcttctrtcgttttctctctggrtgacctcggttatcttattttgtttttctgagcttcagtttccttatctggaaaatgaagataataacaacatctaccttgttggattataggaaatgcctgtagagattccttaatgtaaatatgttctccataaatattagatwtttttattgatttaggcgctgaatatttttgagcaatttctatatgataagcagtttttaggtaagtatttgttttttattctgcttttttcwtctctttctcctcttccttctctctcacaacatgtagcaaagttaaatgttcaatggcaataaaaatgagtgagaaaaaaagagaaggataagacamttgagagacagaaatgggaaagagaaaagataaaattaagtggaggcaaaggcaaagaaagaaaacagaagaaaagaaatcacaattatgggtaacagggaggaacagtgaacacttgaagagagtgggtaaagagagaaactactgaattacagtcttctccaagctatgagctttaaaatatttaaactgcttcaacacaaamcagctgtttctgttgtgaggctattcaagttgatccaaaaagctaatttctatggtcctcttggattcaaggattgaaactatggttttatttgccagttctttccatttttggatttaattcctattttttttctgcttgaagccaaacaagcttaaaatatgaggactgaggacrtaacataatgtgaatgtcaaggagaagtttctattggaaacagtgctctggtttgacaagaccatcagaagckgaaaactgacataaccttaatgtatataagtagataaggctactccccaaggggttcaatatgcttttatagatttatcattctatcttccttccaagttttgtaggaaaaatgagatgactcttttgtttgcaartttacagataaataaatcaagacagacttgtgtaataacttgcacaaggtcactctakaaaatgaatggagaagtcaggaatgtagtccagttctctaattctaacccagtamacattagttagcagaatawcttgtttttttaaagaaactcaaagccttaatgaggagctgcaacttgataaatgaaatacattcaaaatgtktggccctattttatttcttaggtktgtgtctgtacatattaaatgtggatgggaacagcaaaacccaataaattatatttggcaggaaagaagtagaataagttggtgttttcactattaggatttaaacatttcattggattttagatatctaatggatttgggatatggctctttaatatttccgtgtatttagttgtctgaaattagtattggtcagccagcctcccctccccttgcatttcaggttaatgccaacaacaatgtgtgtgtccaasagggtttggaggagcaatggaggggtgcaccctgactctgacaccttgttmtaaagtayacagttgctagacagagttcttcttcttgttctctggaatgtggtgaagagraaggaaccagctgtcttgtgttgcaatttcaaaatgtcaagttttctttttatgtgtgtgtgttatggccatggattggcaagaaaaagattttcacaggtgaaggggaggtcttcccctccacacctgtgggcgtttctcgtcggggggcgggggtacgagagactgagaaaagaaagagatacasagacaaagtatagagaaagaaaagtgggcccaggggatccgcgctcagcatatggtctctgagttccctcagtatttattgattattatctctaccatctctgagagggggatgtggcaggacaatagggtaacagtggggagagggtcagcaggaaaacatgtgaacaaatgtctctgtatcataaacaaggtaaagaaaaaggtgctgtgctttgatgtgcatatacataaacatctcaatgcattaaagagcagtattgccaccagcatgtctcaactccagtcctaaggtggttttctcctgtctcagtagatggaatataccatagggttttacaccgagacattccattgycgatgacagggatgagcaggagacagatgccttcctcttatctcaactgcaaagaggccttcctcttttactaatcctcctcagcacagaccatttatgggtgtcaggctgggggacgrtcaggtctttcccttcccacaaggccacatttcagactatcacatggggagaaacctcrgacaatacctggctttcctaggcagaggtccctgcsgccttccgtggtgttttatttccctgggtacttgasattagggagtggtgatgacttttaacaagcacrctgccttcaagcatttgtttaacaaagcacatcctgcatagccctaaatccattaaacgttgagtcgacacagcacttgtttcggggagcacagggttgggggtagggttacagataaacagcatctcaaggcagaagaatttttcttagtacagarcaaaatggagtctcttatgtctacttctttctacatagacacagtaacagtctgacttctctttcttttccccacacacaggcaagggggatgagtccataagatgacactggaaaaggggattggcttgagtgcaccagggggccagagacatgggtcatccctggtgacgggagttggaatgctcccctgagatggagactggaagtacaagaragaagaaagttgttgtgaggtcaggagcatggtggctggatagatcttcaaagtatgaagcttttgcgtcagatygcctaggtcttccacctattaattgggtgattttaggacaatgtcatcatttgtggctcctagaatcagaccttaagtcaagggttgagarcaagttattaatttagwgttgattccaggaaacactggcaggagagtagggaactgagaaaggaaaggcacagaatatagggtggattattgagcaagttagcacagtgggaataggagctgaattctactgaggagccctcagaacaaatgtagagcatatctccccagagttattccacacaatcctatcagctgtggttaaaggtttctgcagggcgagttctggcaattccagtctgctctacaggcgggcagggtggactcactcaggcagagtcacaggtgtgggtagttggttgraagtctggctggagtgcaaaagaatgttaagagatgaataaatatgggaaggcacagctagcactcttacagagagtccattaacattcctgagtctgtttcctcatttttaaagtgggaattccaagaactattttggaaacgttgaaatgtaagtgaaggcrttggctgggatccagsaccccamacactstgtcttaccatagtaagaggtctcaattctgtcttcctatacwcactcttcctttggaagtgtccatggtgtatgtttgtgtctatgcacacaaacaaggctgagaaaaggaacaccctacaactagatggaaccctaatcctgttcagctaagrctatatagatctgtgggaattctgttgctcagagaaggcaatcctaactttgggcaggaggtctctttggaccctttaaccaagagccatgccaaaatatcagccctctgattctcaaactctgatactgggaaaaggtaagtcttttagagaattaactagataaatgcagttataaagtacctagtacagtacctgacatatagtgtctgccatatagtaggtttctccaaaatgtgaatgcatcstgtctmtaygcctttyttctctgattttctttaaataccgggcatatcatmtataacgctgctttcccaacttcagattaagatgaccatgggaacagtccctgtgtgcataagcagttgacagaggtggatgctaattcaattaatagtatccataggccagtgagcaaccaatgaggggacctggagcaaaagacactgtccaagtgggtagagagtaactagctaaatcaatgtgtccatctcycttttgggctgtagactggaaaatatggagagtggccagttattacggggtaggaggagagagagagagagatgaagagagaagaggaggcacaaaagtagcagaataggagtctgagagggcatctgagtcaagataaggtgaagctgggggctatgacgtaagtgacactccttttccaggaagcagcatatacctgcccccaaccctgcccaacatgccaatgcctactagtccaaagccacctgagtcctgggagcagcattgccatgtgcgagagtagtaggggcactggcaggaatgcactccattcgtctcactggattaagyatctactggtcccagatcagattggcctgtgtcagcacctttgagtgaaacacacgcccctctgrcttatgtcacttgcatatttgacaactcagctatacttaagacagctccccaaagcctgstctaaccctcactggagagcaggcagctcacactctggtgctaccatgtgttacctgggccctragttaggaagagagattgcctgtggtatcagatcatgccatggggattctgagtccatgctgagtggggtttcttttcaggatttcattctgagaaagaatgcaaaggaagaatatagaattacactagcagcaaagcagaaggacagaagggaagacaggagtcaagtgggttgtcatatgatgaggtcagagtgaatagagcactaacaaaactaagcgagcatcaaatggatatttgcaaggtmtatgtatgcatgcattcagayacattttatcatctttattttttagaatattatttcattaactctaagttttgcagctttttggggtttccaaaatgggtyacctctcctaaamacagttgtacttgattcaagatatcaattaaatgggtactggaggcagccatggccacagcctctccttttgttccctttctttgtgagggcaagtataggttgcactgatcctgaccttttggcctgaggatggaagtcttcagtatstgtacaactttactcccaagagctggtgtagaatgagttcctctggccatgggaggatcrcagaggggcrcctgccaccagcagcccagcctcagtaagtgcaatgtgcagttggcagaggggagggagctgggggcacrccaaccctttstgttacttcctgtaggcatagcccaagtctcaggaagcagaatatacatggggtggggtggggtggggtgggggaggwgaggggagctgtttctgcccccacccattacctastagtccaaagccacttgagccatgggaacagcaatgctaaccacaatagctgcagggacctggaaggggattgttgatgcatccaactgcaatgctcttttacattgagatgttgatggacaggcttctacctagtcttctctagagatacacatatcataaagcaggcaagtataactctctacacattccttagatgctgtatcattacccccttccctcactacaattctgtaatctgcaccttgggaggaacaaacacgtcttattgcaccttgcccagaaatagtatcacagcttattaactccatctactccccacacaagggataacgactgtccactgaaggggtaaggaagtctcaagtgccacacaaggaattttcctagggccttccatcattttaggccaatagtaactcacctatagccagtactgtagcaagttgaaagtgtatggatttgggtaccattcatctgtaaaaaccaaagaaaagacttgcccttctggattaattcacagacctgtgggaagaccctcttgtctcacctgtgactcatgaccatattttgagatccccaagtccctggagcctgcttcctcctgagcaaagagggttgtctttatttcaacgggcaaggaaagtccatttgtttgtctccactcctgccagggctccactctccttcagttacaggagacctcctgaagcaaggctggagggagaggctgtgtggtaagagtgagctttgaatgagtatggactgagggcttcacatgcaccagatgctgcacaaaataattgaatttaatcctcactctggctctgacaggtggttgagatcatatttttattaaacttactcagcattttataatgggcaattaattgctggaggtgggattaaaatccagtcttgtccagctccaaaatggtatgtctctcactacctaacccatgctttcctctcggtgacatcacatctgtaactataggagtgtttccttgctatcagatccaaatgaatacaatcctttgtaccgagttaccttgaggtagccaaatgtgccggagtcaactctagttagaatgaatgaggacatcatcccacctttggttgcttcagctctccagtttaaaataatatatgttgggtaccaagaagctctactgaacatcattgttggaatgaccaaagtactaggctcttgctcctggacaacaatgatataagtcagcactgcctggactttgggtctctcctcaggtagcataaaccacacagagattgtgatcatctgctcagcttttatgtcagccttgcaacaaatctccttatcttcatgggatctttatcttcacttctgcctccacactactgttagaaacacatatactgagacttggtggktatggagtaataatatcttcactccatcaatgttgttttttttcaagaaaatttattttaaatcttggcacttccacagctgcaaaaaatctgggagaacaagccagcacttgtggagctgtgtgtgttakctggatcaggggtgaaggggggcaagctgaagtacctttcaacccctgataaactcccagggaccaaggaacctggtccccatggctttttatcactgagatgctagctctataatgccatctccatggkgatttctacattgaagaagaacatttatttcctgccaccagtaagagaccacctgagtgttcagttgcagtatcttcaactccccagatccatcagtagcattgtcttctctgggcttctcttatagaactcttttttagcaaagtcaagtttccatattctaggtagtaacttatcagatggatgttcaaaacgatggaagcaaagcattcatgtattgcatttcagttattttctctggggttttatcacccttcaggtggttgtctccaaaataacaggtgtcattctgctctattaatctggttcccctacctttatccaggcacttttctcttcagcgtcttcttcaaggtatttccagttgcccgccctgaactgtttcagaatgaggaggacacctggaggaatctacacgtgcatagaccaatttgcaaaagaacctgtgagccaacgtaggttgtgagatgcatatcccacatccagttcagcccagtaacttgggaaatgggggagaggtagctctgaagaccagacttagtacatttttacccccatccatgcttgcaactgtaagttgatcttaaattagtacttttaaccaagtcaacctcaatcacttgaataggatacccagctgaaaaacttggggtcactgaatcaatctcttatctgtaagagataatgatgcccacccaatggggttctgaaaaatatgtaatgcctgacatgtagtgtatactcactgaatgtggcttttaaccacaacctttatatttttgccgagtatcacctttctgcagcaaccgtgagaacctcgcgctaagcttgtcttagattgctcattcctttcctatatttagacaccaaactccattcattttccccttgaaatgttcattcccatgatcaagattttgcttaaacacattttgttttcatgtccasattattacctcagctggaagaattaataagcaacacgttcacccaagaagtatttactgagcacctactatgtgcattattttctggtgttggggctagggggcaaacgactctgacaagtctctgttctcaaggtactcacatttatatggatgaagatagataacaaacaaggaaaaaattggacagacaaaaaatttaggtggtgccaagtatgatgcaaacactaaaacagtaatgcaatagaagatgtcagagggagagtgggaaggttacgttaaatagatgtccaaggaagatctctctgaggagaagctactakggctgagatcttaatgacaacaaggaacccaagggctggaagcagagcgttttgaacatggccagtgggtgcaaaggccatcacacgtgaatgggcctggccaggtggaaggacagagggcaaggctgttgtggttgccctgtgagtgcgaacggcccaagatgggatgaaagaggaggtcgggaccacaccgtatakgaatatcagatcatggtcagggctttggattttacaggggtgcagtataagccatggggagttttagacaggtacasaagtaatttacattttctttctttctttttttttttttttgaaacggagtcttgctctgtcccccaggctggagtgcagcggcgcgatctcggctcactgcaagctccgcctcccgggttcacgccattctcctgcctcagcctcccgagtagctgggactacaggcgcccgcaaccacgcccggctaattttttgtatttttagtagagatggggtttcaccatgttagtcaggatggtctcgatttcctgaccttgtgatccgcccgcccccgcctcccaaagtgctgggattacaggcgtgagccaccgcgcccggccgtagtttacattttctaaagcgtactctgccagccaagtggcaaacagacttgggcctcttaagagtggaagcaggaggaaacccgaagakcctggagagagactggtggctggtaccagtggagagggagcaaaaaggaaaatacaggatacaatttcaggaaaaatttcataccaatttcctgaggtaatttctgaactcgaacattttcagtgycaccacattgtgtttcctgctgaatcaagtctacatcacttcggtttttaaagccttccacgatccttccctgaacactgtagttttcactgatggttggctgtttcaaactcccatatgatccatactgtatcattaataagcaagcaaggaataacacaccctctgctattctgtgcagtgtttcaggtttttagttttctctttcaagatagaaaatccctttagagtaggaactcggctggcactttctttcacatcctgcatagcacttagcaaagttctgtacacagggcacatgtggaaattgcttattgattgattaaaagcatatatcactggcatttgtatcttcagtatttctcttgtatgaagaagggtgattatctgtcaatattcattgcatcattgaaccaatgtacaatgcattaatcatcactgaagataaccagatgaggctttattgtaatctccttctattttgctgagataatttcacttgctttagagtttatgaggccataagtggctcccatctgttgatgaacatatttctaagagtcatttagtctcaagtatggaatacttgaggggaagttaaattgtaacttttatattaagtgtcatcttagtaacagaaccaaaattggaagcatgtgttcaattttggtttttcattttcaaagctttaggtcaggcaaagaattaatttcatttgtttacaaagtagattatgcctaataaaatctattttgtttatggtcacattttaatcaatccactgctttagaaaatgagagaattctgattggctaatcattcaacatagtaaattacattattccacatccacagaacactggcctaattgcattatccagtaatgataaaaatattccttttaatacattttgagcaaggcatataccagtgatgaaacagggaagaatcttgtttattccatccttgtttgatgatcgaccacagaatataacataacacttstgtgtataagaattttttcaacattaaggataataaggacaaggtagttttcactggatccttactggtactctgaattttcactatttgtccgcatttyttctccttcccggaaatttgttttctgsgaaaaacaagtgctactttgtcaaataaagcttaaataaaattggtttcaatttatgcataataaaaggaatgcctagtgactttctatctctagtgggaggtagaaaactctccagggtgactttattcactccagaggttctggtgagcaccaaggaacattacctctgcaaaatgcagacatacgcaaaaggatgcatcaaatttaagagaagtccgtagatagatatctgagggatctgccttaggggatgtagaccatatatacaacacgaattccacagaattagcctggtattcacgatcactgtttcttaaaacataactcttttatgttaccaagcaacttttatctgagatgatgactactcgaatacttcttttgcatatcgccagaaaatatcaagttttcatttgagtccttaattcaagttctttatcacaagaagaaagaatagcatggataaaatggtttaaaggtagccaaaaaaaaaacaaaacattgtattttagaatgcatattcaaacatattccaaaaaatactgtattttagaatgcatattcaaacatgatgacaagtgggctctgtggctcatattgacaatagctttaacctatgaagtgagtgtctttctatacggaggtgatgagttactcaatactgaacggctctactaaattgtgcttttggctattagaacttggctactgcctttcgttgctatgtgttgagagaaaaatctcaaatgatgatgctaaccattttgctaataaaatatgctaagctgaaacatttcagttactcagttcatcttctggtacagatgctagcaagcagagaaggttatgatttgaaaaactcaacagaaaggaggaaaaagatgagaaaaagattgactagaaaattattcatggaatatatttcaccagcctattgggtgttagcatcttaggtggtgtggttaatgctaatttacattaaatggtaaattaactatttttatttttcataaatggtacattttcagtacggagtttcagtattccatattttctcacatgggtacatacacaatgacactgttattactaacaataaagaacttgtaagagagtttttagaagtaacatgcttttctaagaaacacaaagaaaacattttatagtgagtgaaaatgaaggtttttacttcaaattctctttttatttccatgatatttctgcctgggctctgccaaggaaaactggcagtgggcaacggattatgccaatgtatacttttttcccctctgagtttttaatctcttttcaggtgacaaatagttttctcttagaccagattcactttatttttcacttacttaattaaaaaagtaatttaccgctcaacagggaccctggagtatatgtatgctcatcttcatggttaaaacactttgaaaaaagacataccacatcataaaaatctgtattccagggtctcagaacagactgcttcagtattggtgtcagaattgggggattaattagggtggtcataagtgagatcatttaattaatagaacagcttccagaagaggtgggagtgtagtataattgtggagagaaaggaattcagaatgagatacacctggattcacatttgagggctgccactcatcagcggagtgccattaaggaaagatatttaaagcatcccagaatagtggctgttgctcacactgtagatagcattggattgccttatttaatcctggcatgaccacttatgcatgcatgattttagacgaactaattcgcctcactaagatgaatcttttgatttgttcctacttcgcagggtcactgttgtgaggtttaagagagataatttaatgtaaaatttagcataatgcctacacacaaaaagcttgtcaagcatttaataataataccgaccattattattactaatgtcgtgctaaatgtggcaggacctgaaaaattactaaatctgatttcaagcctgagtttccacctgtataaagtggagattaaaatcctggtcctcacagggttgttgtaacaaaacatgagatatggagcactgagtgattagcacaattattgatggcaattattcagaagcattgagtgcttgaatgagagctgtctgtatatttgattgtgaatagttctcacagtgtttattccaaccactattttcttcttggtggtcatgcttttaaaacatctgaaggccatattctcagctttgctttgtcttgtcaatctagatacctttccacaggtacccttcacattttaactttcttggcttccaattaaagaggcaaagcccagcacttcgacatttacacttaagtattttctaggtagaagccatctgacctttaaaaaagacatcttttataaattcttctttgttaaccaccattagtgtcaccacttttcgatcctttcagtccttctttcaggattttgaaaaagactcgtaaattggatagcttttctaaaagtgcaactctctcaattctgaaggtaatcttaaaagggaattagggacatgtgggatctttactagctccattagtgccaaacttgcaaagagaaactatctttaagtcaaaattgtctccttgagtgcgtggccattttgataagaatagtgcaaggtaatgcaatcccactttaaatttagaagttctaaagttcacactacactgaaaagtcatcagtgagtggcactgccatgcttacattagaggaaagaatcaggtactcaagtcttgaaccaggcaaaccatttaatgttctgcaggcaatatggatatggacatacaggtaaaaagaagatctggatctccctgcccttcaattctttcatttcctgactgtgtgaccattattcataatgaccatgtgcagtcttggcttgttccttctgtttttggtttagaatccttacctgggaggggaaggaaggataccttgttcctgccttataagaatcaatgacacagcaggtttgaacattccggtgtatagggagtagactctaaatttagcagcccctctagctactagaataagaatttagtgatctgaagaatttacattctgccagcagttgatcgagttcttatgatatgcaaggcccaacgttggacatggaaatgaaccaaacacaatctcttccctttagggcaatactaggtagtttcaaaaatcatgttgggatataaatgattagaatatagggtagaaaatatctatagcaaaagggcagagaaaataaaatggggtcatggaagagagtgagattattcttggctatgtgataaaggaaagcttcatggagaaggtagtatttgagttaggtcttatatgagtaaattttgtacatgaagagaaggggattagtacgttgatgaaatagttttataaagaaccaacagttttatataaaggagtagaatgggaaataagtctaggaaggtggggagaatcctctccaaaggagtacaagatcccaaggctttgtatttcatactccaaggttagaaacgtattgtatggctttccatcagaatcacatattgagtttttgaaattgcaaatgtctgagcaggatcattcccaacatttgtggggcctagagcaagagcatgaatggaggtccacatactatatgtcgaactatttcaaagtgttaaaggaagctgcacccaagacctggtccttgttcccatccaagggactgctttgggactaggaggcttaagaagccctgctgtccctcaaggccatcctgcactagaggcctgattcattgcttggaacttcacgggggaaacaggacggaccctggacttagcctggggactcgtgggcagggcctgcatctgcccccatcaaggatggaaatgactcagtccaggtcttctggttactgaaggaaaaggttctcctacctcatgttttacttttctgattccagattaccaggaggttctaagcaccaggtgaaactatactcacccactccataccccctccccaagcagaggggaaggtagaagtacagttacctggggaacacagtctgcctatatatcctcccacttcaggggctactgggtggctatccagaaactaaagcatcccttctttctttgatttcacagggcccacacagcctgacctctctcaataaggggatttcactctttttttggtctatcccatttgcccagatgacccagttcagctgctatgttcctttccatgttttgtgtgctctcaattggtcatgaaactttaaaacatgagactcagaaaaaaaaacctgtctttgcatgactgtgtttgtgatgcttggagactcctaaagcctgtgacctttcttggtctcgtctgagggttgtgctgtgtcttaacccaagtctagagctactgacccagaatgtcttggggttaggattggagatggggtctcaggatctgtgttaacaagtttcaggggtgactataatgcccagtcagggttaaaatcactgttaacaataggggaggtttttctacttagtttttatttctcagcaagatgatattttaaaaagcaaactgcaggagaatggaagatgaatagaaaggtggtgaggctaacaggagagcctcaggaaatcaccgagcaaatgagacaagggcctggatgaagcaggggttatgggtggaggtgagaagctggttgggagaggtcaacaggagatcccatcagaagtgcccagtgctcagagggagtgatggagtcgaggatgactctgaggtttccggcttgttatgggtcatattatgtcccccaaacagatatgttgaagtcctaactcctagtacctaagaatacaaccttgtttgataatagggtctttgcaactgcaattaagttaagagaaggtcattgagggaaagccctaagccaagatggctgggatccttataagaaggggagggacacaaagggagggcagccatgtgtccacaggggcagagagtggagtgatgtggctgtaagccaaggaatgtcaaggattgctggcaagcactagaagctaaaaagagcaaggaaggatccttccctacaggtttcagagagactatggccctgctgaccccgtattttgtatgtgagacaatacatttctgttgttttaaggcacctgttcatggtactttgttttggcagccctagggaccgaatacagagctgtaatggcctgcactggtgttgcctctctctgcactgggtcatcagtgagggcaagcgtttctcgtagacagcacctgtctatgaatgttctccacagcatagacatcctctgcaccagaaacagagcctcatattcggtgttcctctttgttatctagctgcacaaacacaaggtattaattcactaagggtttcaattatctgctatataaaaaggcataaacataaaaggttttaattgtcttttatataataaggcagtttccaaaaattaaattaggatttttacatttagttttcccattctcatgctgaccatattttaatttgatttcgaaagcatttttggtaatattttaaagtattatctttcatctagtatcataaaaattatttagaaaacctatagaagatttcatctctacaagtaacatttttcagataggaaatgattgcagcattgaactgccaaagagacagctgaaaaaaaaaatgggtcatgcattcatcccattctagaacagaggctgccaagcagttcactgctcatttttgtcctgttctcgtaaacaagctgcgttaacaagttacttttaaaaagcatactaatttccccagtgaattgcacaggaaagaatccagcgttccctccagaggactcaaatagttgtttgttctcagagctcaggtgtggtaaaatagccgtgggctaaaagcacaggctggatattggccagcaggctagagcttcccctccactcctgatttctcacgttggtgagaaactcatagc

SEQ ID NO: 97219 - DNA, 12585 bp, Homo sapiens
ttttgaggaaaaaaaagcttcctgttgaaggcagggtttgcatttggttaaaatatgtttgatttagcagttcctatttctgcttttaactatacttcctagttctcaattgactaacataggattaattggctgcagttatcaatcaactattaaagtattcttatgcctgaggtaggagtgcttctctgtgactctcaaggttatgtagttaatctgctcctgggctgtattgacatttgtttaaacagaaaaagcaactgaagaagaaatatcaggggcgtgcatagcctgcaattgttttcaagatccctggcccacagaaatgttacacctaccaagagaagcttaggtcagcctctgtctatcaacaactcttcccagtcttccaagcccacctcaccactttctatatcaaagccagaaaacacaagcatccattttcccaagatggtttcataaaaacaaagccgtaacacaagagaaaactgagtcaagagtgccaagtatgaactctcattcggacccagtgttgggtttctttgccagctgccttctggtgcggggatccttggagagatcctggccagtggcgctggtcatgctgttgatctaagacatcaaaggaacgtcttgaaaattgctgttctcatatgcaattggtagccacaagctcaactctgtcgtgggagacgtctgatttggggcaaaccttaggaggcttttgtgtttgaggtaacctcactgttaaatgtccccatctcctaacagcaatctggtgggcagtgtcctaaaatgtacaagtacacacaatcatccccatcacaacatccccatgggatctacctgggactctgttcagctccaagaaaacccaaaggctcttggctcagcggggccacattttccccatggcccccacagtgttaagggaaggctctaacggtttgagtgccatagagatgcttaaaacaagggcagcgttttcagcagtaattacctctgcctctcctgttctcactcatcgtcaagctgcccagcagaactttcctttagagatgctactgtccgtggggtctgttcctcttaaaaacagcaaacttttcctttctgaaagccagcccaggacccaaaggtaatttattttagtgaacaaactaaggccctaataagcagcattgattttttgccctggcaatctaaaaccgtttgaagccaaattaaatttttgtgctcatgatggcaaggtaatatacagtgagtccataaccattagagcagcggcaaacaggattagagtccccagaggcagaagtttgcctgtgataatgatggtttgtattcaacctcagaacctgcctagggggtcccaacatccttcgtgaaatgcatcagatagcttcacagtattgcattctatgaagagaaacttgaagagatgtgagctgacatttcatggagctaccaggaagaactgagggtcatgccccattaaaagatcaggaaatgaattaagtaggctgtgtgtgacctgctttttaaaaaataaaatagaaaattagagtgcctagtaagttaagtattgtgtgatacttacatatggacatgtgtgtgtttgggtgagttgaccgtgtaatttatcatcctaactgggacacttttgagagtacaagggggctctaataatcatcctgccagagcaacagcataaaccaggacttctctaagccaacaaggacatgcagttacccagtgactaggacctggcataaaatgtatttgttactgagggtcatgttaaaagacagtttccaaaagacggattcagtgaccattgcctaccctgcactccccctcatcttcccacatcacccttcctagtggcaattgctacccctagtaagcatgtgctttttgctgatgccatgctgacggctctgccctcatttggaattcattcagtcctcaccgtgcccctttgaggcaggtacttgcttcaggaaggattctttgactacaaggaacaaaaaatcaactctggctaacttaagaggtcattgattggaagagctcacaacctcaaaggttagtgggagagaagggggccaggtggctccaggaagcctgggcagtgggacccacttgccacggctctttccttgggctggttcctttctcctggcatcattgtagccaagaaccagtcctgggagggcagccagatctggggacacgtggtgggtgggggaattcctccaaggaatggggccctgcaaggaagggaaatgcatctgagtgatggaaacttgagctggactctcagttccagcttacagtgaggaaacagcgagctggtgttcagcctgggctttcccaaccacacagccaccgtcagccaacctactacaggcaattggtttttcccctaccctaaacccaccacccttcacctttgccacaccactccccctcagaggaggaccctcgcacctctccttgtgcataggggtcccaagtatgccccttcttccaggcagccctccctggatgagtcagctctactgtgggtggctctctgaactcccccaaggcctcactttccttttcttatggagatgttctgcctcccagccgggctgcaagtcttaggcgagaaccctccaatttaatttcctccgatttaatcatcagtgtactgtggtgtagacagtggtcaaagaggtgtggaccactgcccttctcattctcttactcactgtggatctcagtgaagtgacttaacttctctgagccttagtttcctcatttgggcaacagagataatacgcggccccaggctaggatggacattaaagatcacacataccaagcattaaactaaccactctccttaggttttgtatctttacataagtaataactctccattttggaaaatcagagaatgcagataagcacaaagaagaaaatcaaaatcatctgtaaatttcaccacccagagaaaattgctgttgacattttggcccaatggctccagttttggtcctgcgcccatgtttatttagtacctctagcctcaggctgggagaattcattgagataatgtatgtcaagcgctttgcccagcaccagggtctatttttgtacaacatccattcccagagtcactatcacctcctcacgggtaacccccagatctctgccaggagtcctcacctctctctgttcacctccaggctctgactctgccccctgtgggccactaggccctgcatttccatccaaaattttaaatggaacaagtccaaatctggagttatcacctacccaaggcacagcttggggttcgctgttcccatctctctgtctctctttattttatccttgcttctctttacagtttggagcccagttagctgcatctcttggctcctgcttgcccttccatttcactcaagctcagcatctctccccgcctctgccagtcggccacatcctccgtcatccaaggattctttctaatgccctgctctccagggttaggggtgccatgagtgtggcctcgggagagatgggtagcctaggaagccagagagagcagatacacaggtcaggctttcaaaaacatcacagatcaagttgctaggcagagaagacggggagctgttaaggcattccttagcaaagaccacctgtgtccttccaccgctgcatttccagggggaaagtgtgctcccctgtgacaaaggcatttgtggccagttagagtcgggtgggtcgtggtgctttgtgtaaccaagtggcagcagaatttcgaaggcgtgtcaggctggagtcagggaccatctaccaggggcccagatggtctgtcccccaagagtatcactcccaggacaagggtctgtgctcttgacttgaaagatgtacgaggactgagagggactctcagtccacagccccacttgggaattccagatgcctgagatgggcagtggtacaaacttccaagaagagagaaagcaggctgggcggggctggggtggggaggaaacggctcacggtacctggattcggccaagcctgttacatggcctggaagtaccagggaaaagtctgctaggggttcctcccaagacagagggatatatttcaaggtcctctagcatgcggaccaggtgtcatttttacattatgtgtgggtgcaaatgtgctagcacaatacaggagagagtcagtctgaaccttgatgcagagatgggttaccccagccaatcccttgtccaaaccaactcacacatctaaaaggaaaacaccactgaggatgctggcgatgaatttatgccttcattcttgccagttttaattcttattcttcaaattaaatttcgttgcttgatggcatttgtaactccagtgtgttgttcacttttcataacaccttcctctctctcctctttctctctccctaccaacaccccaccaccgctaccttctatcccctctcttcccgtctattttgctgctctgccttgccaccctggctccccaccacgccccaggtgtctctcctgttgtacgactccaccaggatgaggcggctgctgtccaaggccgtggtgattgatgacgatgacgatgacgaatacccctggaggcagaatgcgcacagatactacatccacctcctgctgagcctcttcctcttcctctggttcatcctgggaaactactgggtcttttctgtgtacctgcctgattttcttccccctttccagcagcctcaggactactgtgacaaaaccctgtacctctttgcagtcggagtcctggcgctcagtcacactgtgctggtcttgctcctgctgtgcagcggctgtgtctacctgtgctccaggtggagacttgctgccgatgaagactgacagctgccttgtccagcataccatgtatgcatatgcgtgtgcatgcacgcgcgtgcacacagacacacagacgcacacacacacacacacacacacaggttcagagaagggcataaaggtaataaaaccttccctgaaggcatttaaaaagccacccaaaggcactgaatataatagcagactaaagaaactcttgccttcctagacatggggaaatcacttctgctcttttcagagtgggaattttgttctcacaagagttttcaaagggataattgtttttgagggtatgaagtgtgggaggcaaagaatgggagaccttttcaaatcatagtgcaatttcaatgactggtgcaagagcaaggttggttgttgctactgctgctgtcattcagccatggtcaccttgaagttatagaaagtgcacagactttcacacaagatatatcttaacttcactcgctatgatggcttttgttattaaaaggaaaaagatattcttttagtgactctagctgccttttgggaaagtgaaggagcagtctcttccagccctatatcagataggtttgacgtgatgggtggaacatcccaaggtcagctataaaatctaacaacgtcaaagcagtagcttccacatagggggcgggctggcctgctacaggcattgcggagtgcagcgccgtgtgcaccgtgtgccgctgctgcaggttctttgcttggccttgagtctgtctctgcctctggctattcaagtacctctctatgatctgcggctggctgggtggcataaaccagttttgtatgtttctggacaggttgcatgagttggggtgccgtcagtgtagctgtttttggtttctgagcttaaatatcgaataatagctcctcaacctaatgaccagttaggctttggaagccttttgtaaattgagatgtctggaagtccaggatgacaccgaacagtgaccactaaccttccctctggctgccgctgttgagagatgaagtccaggtctgttgtcagtgctcgctggggagcctctttatgagcaaaaagtcccatgttttagaattttgtatgaagatactgtcatgagtgtttctagggcagtgcccaggggtgcgtggcacctgcttaacygtgcttctctcagccacgtgcatagcatttctgtatatttacacactgctgagctgtgtttattttttaactttgttatgttttcgtgctttctcatcaaaccaatccctgagtggccatgaatggaggcacctcccttcatcagaagtgtcagctcaaaccaagaggctcattcttctccgtagctttaagagaaaggccccgtgagtcccatggggtcttcccatttcagtttagaagcactccccgggcagtcaccgttagtccccctttcctcccaggtgagaagaaagtgcttggtgtgccatctgctggacaaaggaagaacagccctttttttgcccctgtccctaagggcagtttctgttttcattttcacttgagccatggcagaaraccagcgggtgtgcagtttgcagatcctacctcacctatgatgcccaattccatcctcactgtgtcccacgttgccctctctgtgttggggactggggagagtctgtgggctatgatactggggtggacaggagttccatgggctcctctcccaccctcctttccccagtccatgactcgtcagccattcccagtcacttagccaatgcttggacatctgtgagcagcaaagacctgggcccagggacacctgcatgactcccacatgaaagcctctgaggcttctgttgcgagggccttggcaaaggcggaaagagctgtgaacaaccatgggcatgaagatttctgttagcagatggcaggtactggttagtgctttggatacatcagtagctaggtctcaaacgttggacattcccagtttctggtaggcatgagtatcaccagagtgttgcagaaatctttcccagagggagtggtggatgaagtgtgctcattctcatatgcaccccaccagcccacccccagttgcaatggagaatactggtcataggtcctaaataattgctaaaatctggactgtatttttagctttgagttttcttgtcaccaaagcagtaaggaagaggtgatgatctctttgtataggtcatacatcttccctggtttgaggttacagtgagctatgattgcgccactgcactctactctgggtgacagaatgagaccccatctctaaaaaacaaaattacccccttctggggaaacaggttagatcctaaagaaaatgttcatgtgcatccattcatagaggggacactgaatggttcagtgggtgacatcttcaagcgcagcaggctttgaatgataactgattaaggcctccctcaggagatggtgagatggttatgataaggcacatttcaagaaagaggctctggggctaagtaaggcaaatggtctataactgtggttctttgaagtctggcttaatccagggatgacacccagactgtctaggaagggctgagctgcgtgccctttaagtgatcacctcttagtataatttcactgagctggaggtgagtgtaagaagttcctggttatagaagaagttataatccttggcatggcctgaagtaggcagtccacactgatatgaaatgtgctgtgtatacctggagaatgaaaatgcccatctaagactggcccaagagctgggcagccttcctccatgggaacctggcaaggcaatgggaagtggacatgggaacacctgaactttctggatgctatgaaacctcaagggaacaaattatgtggcagagagggataatctgttcttcccatctgagaaaagactgcagcaaagataaactatatgttgagatcattttatttgctacatcgggcatcattctaaaaaccattctttgcctgaatctatataaatgacagttgaaagcagtaaaagtgggactgtttcactggagtcagccacactagtggttctcaaatcttggtgaaccctgagagctacccaaggacttgtttgcaatgcagaatcacagcccccagagactgacttgtggggcccagctggttctgattcggtggccagagaaaccgcatgtgtgcactcgggccacacatacagcctggactggcttatgtcaggcccatcctggttgtcaccatgaggacaatataatgtcacttccagtacttcgtgttatttccttctcttttagtatgagaagtggccaagtggtcaatagctttcatctttgtgtaactgaatcttgtgcttcatttccttctgggcatttttcattgttgatgaaataaactttgttcaatttgttccccagtgtcttccttgaataccctgggggaagagaatcctccagtccttgggatgcttcatttgttctttcttccaatgggatttctgagggtagaagactgtgtccacagaagctgacaacctgttctaggcaaattttgctccataaaactcataatcctcataatcctcaggtgagtagatgagtctgtagtggagaattgagaaaaatgatctaacagaaaattcttcttagtaatcctagtgataatttatcttttataagtatagaactaataagacaactagtctgtcttttctagagctagaatttcagtagttcacttttcaggttagcctagcatcacagcagctacgttatcttggatatcccaggagacagcattttgccattgcaagcagaagagaaataagagaagagtgtttccaaatacatctgttgttttctctctctcttttttaagagatggggtcttgctctgtcactcaggctggagtccagtggtacaatcaaagcccactgcagccttgaactcctggactggggtaattttcttacctcagcttcttgagtagctgggactataggcatgccaccgtgcccagtcaggtttttttggttggttggttttttgttttttgtggggttttttttttaagagatgggggtctcactatgttgcccaggctggtctcaaactcctagcctcaagcagtcctcttgcctcagcctcccaaagtgcgcagattacaggcattagccacctcacccagccctgttgttttctctaagacacttcctttgttatactggtcagcttttaaaacttactgcattgttcagagaagtaagctctgcttcataggcaaaggaaaagcaactgggacttgctgctggtattaagagtttgcacatacagcatgttcccaaaaaggcttgtgactcaaaacgtccctctgttctgattacttcctacttaccctattggtgagggaggggtccctgtcctaaatagtgggagaagcccaaatgcaacccttcccccactggacagatgtgatggacagcagcttattagtcactagactcactgcctgggggaggaggacacagcatgttatgcagggccacatggggcttgcacttgggaacagagtggaccggcaggggccgtgggggtcatgccttgtagtagcaataggaccaggtaaccctgtgttcccatgggaggagtttcctgtcttgcttgagtaatttcacagacgggcagtgaggggaaacccattaggttggtggctgggtgagtggtggtgactgacagggtactggtcaggtgggagaccttgcctgctgagtcaggggcatgcctggtgagggcaggggaactcacagaggaactcacagttaagcccttgggcctctgtgaggctcagagatgtcaaggcagcccagagaattgtaggccttagaatacagcctcctagagccacccctgcctttctttggccttattctctgggttatctagtcctgggttcaaatctgtctttgaatttcctcaacttctcaatgccggaagggagatataatcagtggtgagatatacattgccaaggaagtgaaaaaaataaaaaagtcttcttgaccactaacagtagccagatcagaaccctcgccgcctgcttcctgagagcaggctggcacatcctcttctccagccttccagtgattttcccaccactgcaaaactcttgctgtctgatcggactcttgcaaactgatgttttttactctttatatctttttttgagtatttaagctgctatttaatacaatgtcctgtagcctgtaccttcccatagccatcaaaaagaaaacagaaaagaaaaacatttcctacatcaatttacagtttatacatttgtttataaggaagccagtttgggttcgattcccaagtcactggggaaaggggttgaagcccagattcccctgggatcccttctgtcagcccagcgtcccctcccgcccccagcagcaggtgctggcgctaatggcgcacacctgcacccttttgtgggggccgccttggttgactggagccagctggagcctgagagttctccccgctcccagttcaccccaccgacagccatagctaagggctgagtcggggaagagggaggaaaagcccaactcccttgtttcagggcaggtcaaacttgaggcatttatgcaccagagctgcccgcgggatcaggtgaaagcagggcttcgtggaaagccacatcctttcccagcgcttccctttccccagtgcttcctcccttaccctagttcgtttctcccaaggccacaccctcaacacatcccttatcccagagcttcatctcagactctgcttccagggaagccggcctaagccagggttatttctccacagctggaggcatgacataaattactagtatatccccttttacaaccctttttattttcctaaaatgacaattttaaagctttatttttattataaaagtgatacatgctatggctagagattcaaatcgtgtaaacgagtatgaggtaaaaagtaaaagatttgaagcacccccccaactcccggtccccaaaaaggtacccagtgttaattctgtagtatccttttggaatatgtctatgtatcgttaagcataaatataggtactttttacctacattatgtcggactaggctgggcgtggtggctcatgcctgtaatcccagcatttaggtaggccaaggtgggcggatcacgaggtcgggagattgagaccatcctggctaacatggtgaaaccctgtctctactaaaaatacaaaaattagctgggtgtggtggcgtgtgcctgtagtcccagctacttgggaggctgaggcaggagaatcgcctgaacccgggaggcggaggttgcagtgagccgagatggcaccactgcactccagcctgggcaacagagcgagactccgtctcaaaaaaaaaaaagaaaagaaaaaaaaattatgtcagactattcatattatttgacaagctgcatttttctatttcctggatcatggatttctttccattaccagcgcagagctctgcctcaaacacgactaatatgtattcataggacttattttaagaggctcatcctctgtaacttgcctggtctctcatttctgtgaatcaaaatgggaaaagcagtaatgtgaaactgtattttgacaaatgaacagctgagaggtcagtttgagaaactgtttgccattcctcctgtcgtgtacctaagtaggcccctggctgaactgggctcctagggaagttcgttgcagggcctttggattaggcacatgatgcacctgagggagactcacctggacgcgacgactcatcgagctcctgagaggagagaggttgattagggtggatgctattctctatgttccccaggagtgtgagagtcaacaaaatcccaccatcaccaaggaaaccattaaaaaatcccagcactttgggaggccgaggcaggcggattacgaggtcaggagatggagacgatcctggctaacttaaaagtataaaaaattggtcaggcgtggtggtgggcaccggtagtcccagctactcgggaggctgaggcaggagaatggcgtgaacccgggaggcgtagcttgcagtgaaccgagatcacgccactgcactccagcctgggcgacagagcaagactccgtctcaaaaaaaaaaaaaatcaaagccacctacttaaggaccaaactatccttccaatatcgtgtgattgtgtgaatacctacaactgagatatattcggcaacagatacaagacggaagcaacacctgaatattgcagaaggtataaaatgtatgttgttacataacaaaaattaataatgtaccacaatgaggtgcaatctcatacgcatcaggatggatgccattaaataaaaaaaggaacgaactctgaagataacaagttggtaagaatgcggtgagccggagcccttgtgcaatactggtgggaacataacgtggcacagcagctatggaaaacagtagggaaggtccccccaaaattaaaaataaaattgccatatcacccagcaattccacttctgggtatacacacaaaagaactgaaatcagagtcttaaagaggtatttgcacaccaatgttcatattaatattattcacaatagccaagaaattgaa

SEQ ID NO: 97220 - DNA, 33870 bp, Homo sapiens
  misc_feature (1)...(33870): n = A,T,C or G
cccaaaggttgataggtattgtagggtggtgtaagaatgaactgaggtgataatatttatatgttagagctttgtaaagtgctagacagatgtgaggtactgatatttcccagtattcctgatcttggaatcatggacaccaccctcccaccattgcctggatacccctgagactgcattctgctcctagagtctcatccccttttaggcactggctcctgctccctcaccatccactgtagatccctgctgaattcttagagccctcgctgtttgcatcactcaccatgacatatcatcagaccctgctagtgcaccaggcacaggagactccgctctgctgtcaacaagctgtatgaaattgaccccccgcctgcatttctgtaaaaggaagggactgggacaatacctctgggccttttagttacaatgatttacatacagtagccccctcttacccgcagttcactttctgcagttttaattaccctcagtgaaccgcagttcaaaagtgttaaatgcggctgggcgcgttggctcatgcctgtaattccagcactctgggaggccgaagcgggtggatcacctgaggtcaggagttcaagaccagcctggccaacatggtgaaaccccatctctactaaaaatacaaaaattagcctggtgtggtagtgcgtgcctgtaattccagcttctagggaggctgaggcaggagaattgcatgaacttgtgaggaggacgttgcagtgaaccaagatcacgccattgcactccagcctgggcaacagagcgaaactccatctcaaaacaagcaaacaaacaaacaaaaaatattaactggacagtacagtacagtaagatattttgagagagaggccacattcactgaacttttattacaggatgttgttatgattgttctgttttatcattattgttgttaatctgttactgtgcctaatttctaaattaaactttatcagaggtatgtacgtacaggaaacaacatagtatatgcagtgttcagtgctagccgtggtttcagcatccactgtgggtcttggaacacatcccccacagaaaaggggggactaccatatatcgattttttttttcctcttcatctaaacttcatgcttttgatttctacccacaacctagaacacaatgccaggctcacatgggaccctgtaaatgaggttctctattggtaagtgaatagtggatttgtccaactgataatagtttggacattcgtccctgcccaaatcttatgttgaaatgtaatcgccagtgtcggaggttgggccaggtgggaagtgtctgggtcatgggggcggattcctcatggcttggtgccgtcctcacaatagtgagtgagttctcacaaaatctaattgtgtggcacctcccccacaacccaacccccttgctgctgctttcgccacgtgagatgccagctctccctttgccttctgccgtgagtaaaatctccctgaggcttctccagaagtgaaacaaatcttggtgccatgcttcctgtatagcctgcagaaccgtgagccaattcacctcttttctttataaattactccgtctcagctatttctttatagcaatgcaagcatatcacctactgatatggtaaggtgattttttttttttttttgagacgcagtctcactctgtagcccaggctggagtgcagtggcgatctcggctcactgcaagctccacctcctgggttcacgccattctcctgcctcagcctcccaagtatctgggactacaggcacctgccatcacgcctggctaatttttgtatttttagtagagacagggtttcaccatgttagccaggatggtctctatctcctggtaaggtgatttttcaacacacctactgatatggtaaggtgatttttccatttgcatgtacctaatttatattttcattttccatctcataacaactgaattgttttctgggagaaatttagttagaatattgaatcgtgttgtgaaaggccactctcttagtccattttgtgctgctataagagaatacttgagaccgggcaatttataatgaacataaatgtattggttcacagttctggaggctggaaagttcaggatcaaggaaccagcatctttcaagggccttcttgcttagtcatcacaggatggaagggggaaggggaaatgtgcaagagcaaaaccactccccaaagcccattttattgcagcattactccattcaggagggcacagccctcatgatctaaacacctcccactaagccctacctcccaacactgttgcattgggaattaagtttcaacatgagttttggaggggacaaaaacatttaaaccatagtaaccactaacccaaaacctccacattgcataaatacagattcccagacaccaaacctacagattctgattcattatttctaggcggggactggaaatctgcacttgtgacaagccccataagtgattctgttgccgtggccctaaaccattctttgagaaacactaggaagtaaggattttttaaaacaatccagagagcagaattttgtttttggaggaaacaactaaaattttatttctctctgtggaaaaggttggttgatctcgttgaggggtgatgccacagggggagaggagtggtcatcactggcttctgtatatgttaggaatttcagcagtgaaagttcttttttttttttttgagatgctctgttgcccaggctagagttcagtggcacgatctaggctcactgtgacgtctatctcccgggttcatgtaattctcttgcctcagcttccccagtggctgggattacaggcgtgtgctaccacgcccagctaattttttttttttttttttttttgagatggagtttctctcttgttgcccaggccggagggcaataacacgatctcagctcaccacaacctttgcctcccaggttcaagcgattctcctgcctcagccttccgagtagctgggattacaggtgtatgccaccacgcctggctaattttgtatttttagtagggacagggtttctccatgttggtcaggctggtctcgaacacccaacctcaggtgatccacccgcctcggccttccaaagtgctgggattacaggcgtgagccactgtgcctgaccatatttttgtatttttagtagagacagggtttcaccatgttggccaggctggtctcaaactcctgacctcaagtgatccacccacctcagcctctcaaagttctgggattacaggtgtgagtcaccgtgctcggctagcagtgaaagttctaacatatacagtctaaccttctgtcaggttagactatcagtagtgcagtagctataacaattcatgctgttggattcatgtatagtgtccatctttgccaccatgactaccgtgttcatcaacttattatgccaacactagggcagctgagggaagaaggtggctgagaataactggaaaagccattctgtttcattgcttgatgagtgcctcccccataggaaatgctgtctgctgggtgttaacatatgttacaaagatgttcacattccattcccgctgccttagtacacttgccacgcatctcttccccagacaccttcatccctgatcttccaatcttcctcctttcaagtccctgaccaactggccaagttacttacgctgaccatgagtcttctgtatgaccttgcctcaggccccttctctgccttcacaaagtggatgaacagatgccctgtgtgctgctctgtcattaggaggacactccttcactgctgtccctgaggtctacccttaagtgaagctgtagcacagcagctgcccatttttgtctgatacctacgtaccaacggacccatccacgaaccaggcttagcctttttctcctctgtcagctggtcataggaatcctccacgtattctgcgccaggcagactctagagtggctcccatggtccctacctccaggtgttcacacttgtggataatcacctccccttcggtgctggtggagtggagaagagggtgaaatgatgggggatgaggggagatatgtgctgtcttacaaggcagaagcttgtacatatatccttaagagaggagcatcagcacttaacagagaggaatgggctacttctgtagatcaatagcattcagaggaatctggaaatttaagattttcaaatgcattgacccagatggccccatttcaagtctcagcgtctcagttttttttttttttttccaacagggtcctgaacttggtgtggtaaatttactggagttgagaatttaaccttttataaacccctgccactaatataattgatttttggggtatggatacagattgttgtgccctattgctgcaggatatgtgagaaattttatattctgccaaatagaccttctggcttgttttttttttttgttgttttttgagaaggagttttgctcttgttgcccaggctggagtgcaatgacacggtctcggctcattgcaacctccgcctcccaggttctggtgattctcgtgcctcagcctcctgagtagctgggattataggcgcacgccaccacacccggttaatttttgtatttttagtagagacagggttttgccatgttggccagggtggtctcaaactcctgacctcaggtgatctgcccacctcagcctcccaaagtgctgggattacaagcgtaagccactgctcccggccagaccctctggctttcatccttggtctcactggcaattggtgacactcgacccttcattatctttaaggaattagtaacatcccccccagccatgtccacccaattccaaagttcttataattactctttcttacaacccctgagatattacatctgctatgcatttccttctcctggcaccccattccagtttgccactgatgaacattttaacaattgccataggatgccgggggccgtgggagctccaccaccaccagtgatggggtttctgttaccaacaggttgggaggggatacagcttcaaaatcccgtctcagagcctttttcaaggaccacttctgggttggattccttaggaaacagattttgcgatttgcctgcaggcttttaatggtgtggtactctaagaatcaacgcatgagagggatgagggaggcaggactgggcagaagttgtattgtgatgcaggtgcaacgaagatctggagcttgaataacgcataagaactgtgccaccttaagacaaagggctaaacctttatacccctctgtcgttgtccattttgtcgctataacagactgtcaggccgggtaatttattaagaaaagagatttcttgctccctctccctctctctctccctctccatctccctctccctctccccacggtctccctctccctctctttccacggtctccctctgatgccgagctgaagctggactgtactgctgccatctcggctcactgcaacctccctgcctgattctcctgcctcagcctgccgagtgcctgcgattgtaggcgcacgccaccacgcctgactggttttcgtatttttttggtggagacggggttttgctgtgttggccgggctggtctccagctcctaaccgcgagtgatccaccagcctcggtctcctgaggtgctgggatggcagatggagtctcgttcactcagtgctcaatggtgcccagactggagtacagtggcgtgatctcggctcgctacaacctccacctcccagccacctgccttggcctcccaaagtgccgagattgcagcttctgcctggctgccaccccgtctgggaagtgaggagcgtctctgcctggccgcccatcgtctgggatgtgaggagcccctctgcctggctgcccagtctgggaagtgaggagcgtctctgcccagccgccatcccatctaggaagggaggagcgtctctgcccagctgcccatcgtctgagatgtggggagcgcctctgcccygccgccccgtctgggatgtgaggagcgcctctgcccggccgcgaccctgtctgggaggtgaggagcgtctccacctggcagccaccccgtccgggagggaggtgggggtcagcccccaccaggccagccgccccgtccgggagggaggtgggggggtcagccccccgcccggccagccgccccgtctgggagggaggtgggggggtcagcccccccaccccggccagccgccccgtccgggaggtgaggggcgcctctgcccggccgcccctactgggaagtgaggagcccctctgcccggccagccgccctgtccgggagggaggttggggtgggggggtcagccctccgcccggcctgccgccccgtccgggaggtgaggggcgcctctgcccggccacccctactgggaagtgaggagcccctctgcccggccaccaccccgtctgggaggtgtgcccagcggctcattgagaacgggccatgatgacagtggcggttttgtggaatagaaagggggaaaaggtggggaaaagattgagaaatcagatggttgccgtgtctgtctagaaagaagtagacatgggagacttttcattttgttctgtactaagaaaaattcttctgccttgggatcctgttgatctgtgaccttacccccaaccctgtgctctctgaaacatgtgctgtatccactcagggttgaatggattaagggcggtgcaagatgtgctttgttagacagatgcttgaaggcagcatgctcgttaagagtcatcaccactccctaatctcaagtacccagggacacaaacactgcggaaggccgcagggtcctctgcctaggaaaaccagagacctttgttcacttgtttatctgctgaccttccctccactattgtcctatgaccctgccaaatccccctctgcgagaaacacccaagaatgatcaataaaaaatgaaaaaaaaaagaaaaaaaagaaaagagatttctttagctcacaattctggtagctgcaaagtccaagagcatggcgccaggctgttcagcttctggtgagggcctcatgctgccttatgacatggaggagaagcagaaaggtgagcaggcacgtgctgagtgaggggaccaaggaggctgacccacttcataacaacttgctctctcaggagctaatccatttccataagaacgaatacaatctcccaggaacaagaactcactcactatcttgagaatgacaccagtctattcatgagggatccaccccagtgagccaaacacctcacactaggccccacctccacactggcaattaaacttcaacatgagtttgggcgggaacaaaccacatccaaactgtagcatcctcctagactagcccttggaggtgggctgcctccacaaaaggaatgcaatttttgataaagtggttttgttggctgaagacagttgctggacagggactcattcaagagttggccagcaaccctcccagcagctgggggagtgagtatctcagtcctgaaaggtagcataccagagcatccactacacctgcattttctgatttttttttctatttatttgktatttttctagagatggggtctcagctgtgttgcccagactggtctcaaactcctgggctcaagtgatcttctcaccttggcctatcaaagtgctagggttataggcatgaactactgcactcagcctgcattttctgatttcaaaatgacactatcatccactatctgatcttttccactcctgacagctctcttttttcatttgctacccaagtcttttcctttcctagtgaccttataaaatatcatccaggccaggcacagtggctcacgcctgtaatcccagcactttaggaggctgaggcgggagaatcacttgaggtcaggagtttgagaccagcctgaacaacgtggtaaaaccctgtctccactaaaaatacaaaagttagccacgtttggcagcatgtgtctgtaatcaagtggctgaggcacgagaatcacttgaatccaaaaggtggaggttgcagtgacctgagttagtgccaccgcactccagcctaagcaacagggtgagactgtgtctcaaaaaatttaaaaaaaaacataatccagggccagaggcagtggctaacacctgtattcccagcactttgggaggctgaggtgggaggatcccttgagccaaggagttcaagactaaacatagggagatctcgtgctctctctctctttcyctctctctctctctctmtmtatatatayayayacacacacacacacacacacacacacacacatcatgcaggtacagttttgtatcatctgtttcaaagggcaacgcactaaataaagctgtactcaacttttgaaagccctcttttaagattaaaaaacttcacagggtccaggcacggtggctcacacctgtaatcccagcactttgggaggccaaggtgggtggatgccgaggtgggcaatcacgaggtcaggagttcgagaccagcctggcaaacatggtgaaaccccatctctaaaaaaaaaaatacaaaaattagctgggtgcagtggtgcacacctgtagtcccagctacttgggaggctgaggcaggagaatcacttgaacctgggaagcggaggttgcagtgagccaagattgagccattgcactccagcctgggtgacagagtgagactccgtctcaaaaaagaaaaaacagaaataaaacaaaacaaaaaaactttacaaatctccacataatagtatcatagtagtaactgaatgaatgcccattacaataaataataaaagctattataaacttgttaaactggtttaatcatgtgaacacccacatatgtatgacacaaaaaaagataagtatttatataaggacatttcttgttctggtgagagagacaatgcttggtgtgcacacaagttcttcaactacctggattaggatgctgcctataattgtgtacaataacggagtagtcagctgaggggcaagtggagatagaaatccagcccaatctcttatcaccaagtttttcatcccaccaagggctgaatgtacctgcagaaaggtggcatttttttaaaatcaattgccaaaacaagataccactcaggtctctcttttctatttaacattaaggcacctctatgccagccctgaacctgcccagtgactgatcacaagctttgagtctggagtcagtccaagatgtggattatggctttgccacttacttgctattaacctttgttgtagtctgaatgtttgtccccacacccccaaattatagttattgaaattataactcccaaggtgatggtatcaggaggtggggcctttgggaggtgactggttcaatagagtggaaccctcatgaatgggagaaatgccttyataaaggagatggctggagaaaactagttagccctttccaccaagtgaggttacagcagtaagacagctgtcaatgagggagtgaaccctcaccagccactgaatcttatggtgccttgatcttggacttcccagccactaaaactgtgagaaataaatttatgatgtttataagccacccaatctatggcttataaacatagcagccaaaatggacaaagaccacttatccatcagcttgtctgtttttttgtttgtttgtttttgagacggagtctcgctctgtcaccaggctggaatgcaatggcgtgatctcagctcactgcaacctccacctaccgtgttcaagcgattctcctgcctcagcctcccaagtagstgggattacaggcacctgccatcatacctggctaatttttgtatttttgtagagatggagtttaaccatgttggccaggctggtcttgaactcccgacctcaggtgatccgcccacctcggcctcccaaagtgctgtgattacaggcatgagccaccgtgcccagcccaacttgtctgttaaatgagatcataacatccccctctctgtggttgtgctgttccttcaggtagcaaatggataccatctattttcatagatcttgttttatcaactgtattgtggtataatttacatacaataaaatatacaagcattaagtatacagtttgataagttatggtaatgtaaaccggtgaccagatagataacctgtgtgttttttatactgtccagagattgtatcagactctgtggaaattacaaagtagcataaagcatccttactttggttaaacccttgattgggttaggcctgggatgtaagttctcacagccccctacttcctctgcataaccacacatcacattgtctgtcactctcctagtctgtaaagctacttgagggcatctcgagcgttttccctgctgtatctgcaggcatctaacacagtgcgtggacattctgtaagcatttgttgcaagataaatgaaaaaaacgtacaaagttaacaatggatatcatgctgagtttgtgccaaacaaaacagtcatttgaagaagacccggaacaaccttatgggttagtaattagtaaagaccagtagagaaggtggcctttgagaagggtcaggtttcaataggattaaggagcatttcagagctaaaccaagtacttggaagagataaaagcagtgggctcaggcaccagcctagcccactgtgcatgaagcttggtggggctaaacatgattatcagtcctttaacttttattgaacgccttcacttccagatttctaagtggggctcaggaattataatagatgtccacagctgcatggtcttctctctccacaacacgcagacactattagargtaaaagccacgtgtcctcaagagggcaaggcaaagcatcttcagatgtctctgcccttaaagcacacgcgttctgctctgcgacgaagcaggacaaggaggacagggacctgcacctccggaggcccgcacctacgaagatagcgggctcgggaccttcggtggaccggcagggttccagaggcccgcgcgccgccgccccgccctcattgctgagcctgccaggtaagcagccccagcgccgtgcccgcgcgacctctactccttccgggagggtcgcgctcacgtctgaagtgggagcaatgcaccgggacagggacacctcctaggccatgcctgttccagtccagttctgcctgaaagtccggctggctcatcacctgcctaaataaaaccgtatacgggcaaactccctccgcaagcagcgcgccccagcaccggaagtgacgcgttacgtgcccgcgtattcctaccggcgtattcccgccctgcttttcgcccgccgttccgtggcgggaactgaggcgactgtggggacatcagtgatcgtaagtctcctgggcccgttattctcagattaggtgacggagctaagacttcgagaccatctcgtcctttttgtatcgcggaaasctgaggaacgagccggcggcggtgacctgcacgagaagccaggctaactggtaacctgctggaggaactgcaagcccgcttcgccttccccactcctgcccttgatgccccttgtgaggtcttccacctccttcggggccccagcctagtggccctttcatgccctggccgcgccctttggtgaaatggtggttccggacagcatcttgcaggccccggctttgggctgtattaatgtttaacagcccgaggcagggatggactaatccagtaacgttataaaaaccttggctgctaacagatattaaaaatttattttattgagcatatccccatatgccaagcaaggaactatgtatttgcatacattcttttatttaactcagttgtcctgtggaataggccttagctcctttaacagaaaaggaaaccgggtatcatagatggtaattcattcaccaaatattacggagcatctaccatgtaccaggcactgttctaggcaccagggcatgtagcagtgaaaaaaatagaattaaccggggacttttcaggcgagctaatgatgctttttatccctgaaaacagcctggaagaatgtttacctgcatgttagaaatagttaccttctgggtgggattttgtattacttttttaaatctctcatgcttttatgcattgttttgatttcttcaagtgagtgtgttatgagaaaaacagctgtttctattttaacaacagagtcccccaccttcccttccccacagaaagtctctgaaggtaggtaagcattgactctgccatgaaaataggtccctggccaggcgmgatggctcacacctgtaatcccagcactttgggaggccggggcaggaggattacttgagcccaggagttccagaccagcctaggcaacatggtgaaaccctgtctctaccaaaaatttaaaaaattagccgggggtggtggcacgcacctgtagtcctagctactggggaggctgaagtgggaagatgacaggagcctgggatgtcaaggctgcagtgaaccatgattccgccactgcactccatcctaggcaaaagagtgagaccctgtctcaaaaacaacaacaacaaaaaaaggtctttgagttctgacccaaggaaaggagtgaaggttctcatttgtggtgcaagcagagcacctttaattgccgaagagtccatttcagggtctgagctagagctaggcccatgactgtgaaagaaaccatggaggcccatgtggtttggtcattagcaacatcatatttatcaatgcatttggaactcattaaacatttttgtgacatatgatctttgttctataactcctgcactagaaatagattctaagttcgttagggacttwgaccacttttctgttcttgtagccctcagtacagtgcattcagagtgtcctaggtcatggggtgatgtcctttattatgtaacatctttgcacaaggctaagtktattttcgggctgtactttctcataatggttccccaccaccacccccgctttcctatggtgctgattcgcaataaaagtttcaataaaagctttttttttctgtcttgcacctgaccagggtgaagtaccatgcaagcatttcttaaaggtacatccatcagtactaaacccccgctgaccaaggatcgaggagtagctgccagtgcgggaagtagcggagagaacaagaaagccaaacccgttccctgggtggaaaaatagtaagaacacttgtgtctttgttaaaataattcataaattatctctctaaccagtactgatcacttttttttttttttaacttatggaggaatgctttgttctgtttagaagttgtctttgaaaaaaaatcacccacttatataagtcatagaaccctggaactaaagttacctgagaataatctagtttaactcccttattttgtagataaactgagatctctacaagcagaggcttccattttaggggctgggatacagaagtgaagaaaacaaaagtttctgtaaactggctataaatactaggtcaggagttctacttaaatccaaatatgtaatctgttcctccttcttctcattacaataggtggaaagtattattattattattactatttttgagacggagtctcactctgttgcccaggctggcgtgcagtggcatggtctcgactcactgcaacctccacctcctgggttcaggtgattatcctgcctcagcctcccaaatagtagggattacaggtgcccaccaccacacctggctaattttttgtatttttagtagagacggggtttcaccatgttggtcaggtcgatcgcaaactcctgacctcaagtgatccacctgccttggcttcccaaagtgctgggattacatgcatgagccaccgcgcccagccctggaaattcagttttggttagctcatacatttttgtccaaacaacacttgaattagcatttaaattgtcagtcaccacctggcatggtggctcatgcctataatcctgtatgtaatcccagcaatttgggaggccaaggtgggaggatcacttgaggccaggagttccagaccagcctggccaacatgtcgaaaccccctcctttactgggaaaaaaaaaaaaaaaaaattagccaggcatgttggcgggcacctgtaatcccagctacttgggaggctgaggcacgagaatcacttgaacctgggaggcagaaattgcagtgagctgagatcacaccannnnnnnnnnnnnnnnnnnnnnnnnnnnnnnnnnnnnnnnnnnnnnnnnnnnnnnnnnnnnnnnnnnnnnnnnnnnnnnnnnnnnnnnnnnnnnnnnnnnnnnnnnnnnnnnnnnnnnnnnnnnnnnnnnnnnnnnnnnnnnnnnnnnnnnnnnnnnnnnnnnnnnnnnnnnnnnnnnnnnnnnnnnnnnnnnnnnnnnnnnnnnnnnnnnnnnnnnnnnnnnnnnnnnnnntttttaatagagacaaggtttcatcgtgttgaccaggctggtcttcaactcctgatctcaggtgatctgcctgccttggcctcccaaagtgctgggattacaggcgtgagtcactgcgcccagccccttatatgttttgtttggcaccaataaacctcatgaaaatctagatttttttaattatgtggaggagggtctggattttcagcttctcaggagatcaggcaacactgggggcaggttctcacatgacaggagttatatggacttgtgtactgcttctccttttggaaaggtcgtgtgttcctcaatttgccatggtccctactatatcttgcatcacactctgccttcctcactcttgttatctgcttaatctctgcaggtatttgaatatgagtccctgctttataacatatactggattcccaagagaagacattaaaaaaaaaaatcataattcctacctagtgttaacctgatttatcgaaaagtatggatcaaagaacttttgattagttaactaagcacaaagcctaagcttagagttggaagtgtaactttgttctagcttctcttaaaaatcactgttgtaagatgaaaattatatatgatacttcatattggttcagcttgttgtttttgttagccctcaatgaattgaataggtcttcatttttttatgcagttagatgatggaaaaaattggcattaaccagttaacacatactaagtatatatgtaactacattaaccaaaatagttacctatactaaggttactaaatggttttcccttttcatcttaagattcatgatcttattttgtcaaagtggaacaatgctttttttttttcttttgagacagagtcttgctctgtcgcccaggctgaagtgcagtggtgcgatcttggctcactgcaacttctgcctcctgggttcaaatgggactacaggcatgtgccaccacgcccacctaattttttttgtatttttaatacagacggggtttcaccatgttgaccaggctggtctcaaactcctgatctcaggtgatctgcctcccaaagtgctgggattacaggcgtgagccaccgcatccggccaataataatgctttctaagcaggtgttcactttaattttttttttttttttttttttttgagataaagtttcgctcttgtgacccaggttggagtgcaatgatacgatctcggctcaccacaacctctgcctccagggttcaagcgcttctccttcctcagcctcccgagtagctggcattacaggcatgcaccaccatgcccggctaattttatatttttagtagagacagtgtttctccgtgttggtcaggctggtcttgaactcctgacctcaggtgatccacctgcttcagcctccctaagtgttgggattagtgtgagccatcgcacccagccccactttaatttcttttttttttttttttttttgagacagagtctccctctgtcacccaggctggagtgcagtggtgcgatctcagctcactgcaagctctgcctcccaggttcgtgccgttctcctgcctcagcctcccaagtagctgggactacaggcgctcaccaccacgcctggctaattttttgtgtttttagtagagacggggtttcactgtgttagccaggatggtcttaatcccccactttaatttctaattagtgtttgtagcatataaaataaaatcctttttctttaatttttgtgggtataacagattcgagcaatgcagaaaggaagtaaaacattatttcactctttcagaatgtgtttggttacggtaaaaacaagkggggkttccacctatttccgattatgaaaaagtttctcatttcattgctgatgtttaagaatggtcattggtattttagtagaaggaacacttgagagttttctgtggctactataatatactaaataacctctttcctccttctcaccccgcaagtcgcccaaaatgtgtggatgaagttgctttccaggaagaagtggttgcagtgctgaaaaaatctttagaaggagcagatgtgagttgcaaatggtgtttaatgtcattgggatatttaagacttaatttattcaccctctttcttcctttataacttctagccctcgttaaatatcttgctctgtgtacagtaggtccttgataactatttgtacaatgataattagttcaaatatttattgagcatctcctatttaatcttacatagcagtgttacctagtattcaagtaaaagtcatagtaattaagacaaactatgaaacatagacatagaacaagacataaaacatagaacaagacaaactatgccccttttttcatgggtttttattggtaaggaaagatagaataaacaagtaaaccaataaataattataggtagtaatatgtgctataaagaagagccagagattcctctaaagtataattgcttactaactttaggatttggattgacctataatacaaaaaaaaaatcgagctttgaattctgcttatagctctctcttctgctgtgatctgggggataaagtatccatggataacttgcattgtaaattattctgagataagataaacccatgtgaaaaattagcaacttaaagttgtgttatgatgaatgcccaaagtgctttaacagctcagtaaagtgctgaagtgggatgtggtttttgctttagtttcaagatttgcttccttcctctcaatctggctgcttttaattagaagttcttttgggttttgctgccatcattcccttgctgaaattatattactacagtacacattttgaaagaagttaaatttataaaactatttagaatctttttctttaccagtatgtgttttgatttgactcgcatactcttatacctttttggccggccacagtggctcacgcctgtaatcctagcgtttcgggaggctgagatgggaagatcacttgaggtcaggagttcaagaccagcctggccaacatggtgaaaccccatctctaccaaaaattagaaaaagtagccaggcgtggtggcacacacctgtagtcccagctactcaggaggctaaagcgggagaatcatttgaacctgggaggcggaggggttgcagtgagccaagattgtgccactgtactccagcctgggtgacagagtgagactctggtctcctacatacctacataagtaagtagtacccactagctaacacaaatactcttataccttttaattttataatagtatagcattttattttttaggtatattctgcttgcatatcttggtaacagtatataccattttaattgcagttgcatagtaattacacagattgcaggacaatatctaatttaattactagtatcttcagcaaatgtagtgagattaagatccagttcttttgtttttttgttttttttttgtaattgagacagagtcttgctctgtcacgcaggctggagtgcagtggcgtgataccagctcactgcaacctccgcctcccaggctcaagtgatcctcccacctcagcctcccaagtagctgggactacaggcatgcaccaccacacacagctcatttttgtatttttagtagagatggtgtttagccatgtcaagtgacctgcccgctttggccacctaaaatgctgggattacaggcatgagccatcatgcccagcctaagatctagttcttgactttatgccacgtaatttatgaggctgaagtaagaacttcagtttaatattttgtgcaccttttcagactaagttttgtaaagaggtgaaatagtttttttaattcaaaagagtaaaggaaaacaattcattcaatttattttgaaaggttttaaagaattataagaagataattttttcagaaattgattttaagaactggtattccacatacagttcttgaatgtactacatatattagactagtgtataattaaggtttaataattttaccctgtttcaaagaatttaaattattgtatctgatagttaacctggatgaatcgttacattgttaagggatgcacagatcaaaataatagttgtagaccttaattactaagaagcctgggaggtttttaagttatgaatctcatagtttgttctgtaagctatatgttatgaatgtaacagtaatagtcttctaattaacatatttgtctatgtattggtttattcattcatttggccaacattgactactgtagtagatgctagaatacagatgtgaatagaacaaataaggttcttggtcttttaatgaagtagacaggcattttacaattaagccccacagtgaaataacaataaaccaatgcaaaatgcaacaaacactaatgagagaataggagaggagacctactttagactgaatggtttctgatttgtaatgcattaggagttggccaggcagaaagaagaggatcagactccaggtcatgggagcaacatatgttcgggccagaaagtgccaagctgttagargccattgtaagctagagcctggaaggtgaaggaggtggtaggcagatcatggaagtcctttaggccatggtaaaaagctgagggttttttggtttgtttttgtttttctaagtggaatagttttaagtagcaagcagagtggtatctgatttaggtgaagaatgaatggacaggaagagggagggttaggcaagagtggaaacaaactctaatgcctagtttcctgtgtacactgatttccttatgtgacaggacatactgaagattgcacagtatcataacagagctcattagaatttagttgacttattaattttcaccacggatcagtcgactgcttgataggagccaaactagctagatacaaggtataaaagaaggtagctagtgatttaattttatcctttcctcttctaatgaattctccctgatacatgcaagcatccttacagagtgcataatcatgatgtggagcagtgcctagtacttaatatatatctagttttggattttttgttaatatttctgttcttggtacttctgctcatccaaagccctaattatgtcttttttagtcctttttcctcagttttggccaaatcccattactcttttggtctgcttcccctttgaagcagctgacattttgtgtaatataaaatcttacctaatcttgagcatagaggtgggataggaaactgagattccctttagaaataaaaggtttctcattccagctttgaaaatttcacctaagtggattagctatagagcaagcataaatattggttcagcttaagagattaaaaagacacttggggaaaaaagtggtagtatatgaaaaagcaggatttaaatctgtcagtactatgatatcagttatattaagaaaactttatacttagaaattacgtgccctattagagaagtcattgcactattccacagacatttttttcgatcttccttttcatctatttgtgccagaataccatttattaaaaataaaatttaatttctacagcttcctaatctcttgttttacggaccacctggaactggaaaaacatccactattttggcagcagctagagaactctttgggtacgttgaaatcagtctgtttttctttttttaaagatttgacaccaaaattctctgatattgctttttttcctctaaaaatttgcgtttcgttttctgtaggatagttttctatttctgatttttaaaaatcccatgagccattttgttcctccctcactcccctgaagaaatcagcttgcctgcgtcttttgtgaccttcattgtgaatcttgttcaagtgtggggagcctatgattttttccatcactttctttaaattttccattataactttggagtccagagggcccaacttaatgtccagttgtgctgatagttttatcaccctcttaatgattgtgttcacatctgtgtggctacatgatagaatctgctgtttctgatggcactatttgcaccatccattcttgagtcctgctctggacttcctaggctctgactctggagtggccagtccagctccttgcctcaggtctcctgagcacaagtgatggttgatgtagtgtgattccaggtacaccagaaaatcttcctgtgagtcaccttcttatgttcctcttcctagattgaccatcttggcttaaccagccattctagaggagccctttacctagagttaaaagatgtgtagtgggctgggtctgatatacatgaaacatgcaccaacataacaaaggctgttttgagtttatccagaattaatatcagacatacaactgatagaaatatctgaaatcctacatatgaaaataggctgggtgtggtggctcacatctgtaatcccagcactttgggaggccgaggcaggtggatcacctggggtgaggagttcgaaaccagcctggccaacatggtgaaaccccatctctactaaaaatacaaaaatttgccaggcatggtggcatgcacctgtagtcccagctactcggcaggctgaggcaggagaatcacttgaacctgggaggcagaggttgcagtgagccgagatcacgccactgcactccagcctgggtgacagagcgagactccgtctcaaaaaaaaaaagacgccactgaaatcaccaaatgtgtaaggattattagttatgtcaaaatgtaaaagacaaagggagaagctgctatgtgcctaatattttatttgacagcaattttttattctcagtaaaattatagaagaacttttttgattattccacaactcaatcagatagaaccaatctgaatcagccttaacagttgtttattattacttagagtaggtcagtccagattatacaactttttctatatcctttatgaaataatgtttgtctttaaagaactttaacagtgaatttcatatttaatattgtggctttaaaatagaaaatagatgcatgtaaatgtttatgtccataaacatgcttaggataccatgctgattaggaaaaatagagatgaaactaaatcacaactcttgttttttatttaaatgtgtgtgtgtgtgtgtgtgtgtgtgtgtgtgtaaaagactagagggaagtttcaaaaacagtgctttgacagtgtgcccacttttttcttttgatttctcaaatttctctacagtaagcatatattacttttagtaatttttattaaaactcactttaaaaacctgctcatgttttaatccattaattttccttaatccagtaggtttccttatagcaaactaccctgtggaatttatttatttatttgtttatttatttatttttgagacagtgtctcgctctattgcccaggctggagtgcagtggtgcgatctcggctcactgcaacctccacatcccgggttcaagcaatcctcctgcctcagcctcctgagtagctggcactacaggtgcctgtaaccacgcccagctaatttttgtatttttagtagagacagggtttcaccacgttggtcaggctggtctcgaactcctgacctcgtgatccacccgcctcggcctcccaaagtgctgggattacaggcatgagccaccacatccggccggaaataatttaaaatgtgctatattataacattatttaaaattacagtatttaaaactatctagatgtctaacaatagaagaatgtgaagtaaatgatggtacagtcataggatggaatatcatatgactattaaaatgttatttacagtggttttgataatatgccaagatacttattataaatgcaaagtggaaaatcratttaaaattttatatgtggggccaggtgtggtgcctcacacctgtaatcccaacattttgggaggccaaggtggaaggatcacctgagaccagcctggccacataatgagtccctgcctctacaaaaagtaaacaaaattagccaggtgtgatggcatgtgcctatagtcccagctagttgggaagctaaggtgggaggatcatttgagcccaggagttcaaggctgcagtgagccatcatcatgccactgttctccagcctgrgtgacagagcaagaccttgtctccaaaaaaataaaaagaaaagaaattgtatatgttatgtaatgtctacatttttttaaatgcatggaaaaaagccaaaatgttaactgcagcactctgctgaagcgagaatgcaaaagtgattgtgtgccttctatccatgttgtttactaggtggattttaaacgtctgcaaagtgtgcaaatgttaaaatgtgatttaagcctacttgtgctctatgtttcatatttgtttcattttgagataggcctgaacttttccgattaagagttcttgagttaaatgcatctgatgaacgtggaatacaagtagttcgagagaaagtgaaaaattttgctcaattaactgtgtcaggaagtcgctcagagtaagtaaatttgccctccctcctccatagcatgtattattttaaatatgtatttctgccatcgctcctcagccttttggctaagatcaagtgtatttctgccaaattgtcaacttttcatgttagaagactatcctgcctgaggtaaacagggatttaatcaactacttatgctccttaggtggcaaaggtccaggattacattggtggtacctagacatatgtgtaaattttacatgagcacatttcaaaatttgtgaaagtgaatgactaatttttgatatgcaccttaaattgatggtgcagtcagtcacaaccgctatagcacctaatgtatttttatgtgaaatgaagactgggaggtggactaaaagactctgagatcccttctaccattaatacttgaaatctgttttcttggtataattttcatacaattatgttaatgccacttttggtgggagaaaaactttaatggcagattaccaaaaatcaatgtacagaaggtaataacccgcaacgtgggagaaaatatttacaaatcatatacctaaaaaggtacttatatctagaacatatgaagaactttaaaaactcagtaataaaaacaaataacccaattaaaaaatgggcaaaggccgggcgcagtggttcacacctgtaatcccagcactttgggaggccgaggcaggtggatcacaaggtcaggagatcgagaccatcctggcgaacatggtgaaaccccatctcyactaaaaatacaaaaaattagctgggtgtggtggcgggcgcctgtagtcccagctactcgggaggctgaggcaggagtatggcgtgaacccaggaggcagagcttgcagtgagccaagatcgcaccactgcactccagcctgggcgacagagcaagactctatctcaaaaaaaaaaaaaaggcaaaggatctgcatagacatttcgtgcatgtgtaataagcacattaaaagatgctcatcaacatcattatccatttgggaaatgaaaatcaaagccacattgaaataccacgtaactcccactaggatggctatgataaaaaatacagaaaataactagcattgacaaggatgtggagaaatggtaaaccgcatacattgctggttggaatgtaaaatggtacagcctcttggaagacatgtctgctcaaaaacatgtacacaaatgttcacagcagcattattcttaatagccaaaacatggaaacagcccaaatgtccaaccgattaatggatgaataaatgtggtgtatctatttgccatagtatttgacaatacaaaggaatgacgcaaacacatgctacaatatggatgaacctttaaaatatgttaagtggaagaagtcagccacaaaagactgcatattatatgttccattcatatcatgtccagaataggcaaatctatagagatgaaagtagactaatgattgcctagagctgggaatgactgggggaagaagagtgactcctaataggtacaaagtttcttttaggagtgataaaaatgttctaaaattagattgtggtaatggttgcacaactttgtgaacatacagaaaaacactgaattgtacattttaaatgggtgaattgtatggtacgtgtatctttcaacaaagctgttaaaaccaatatacatattaatgttcaactcttatgtgtttctctgaatcagtgggaagccgtgtccgccttttaagattgtgattctggatgaagcagattctatgacctcagctgctcaggcagctttaagacgtaccatggagaaggagtcgaaaaccacccgattctgtcttatctgtaactatgtcagtcggtatgtatattgccctgaagacagatgctaggcagccttattttcataacccaattagggaaaggaaatttaggattttcaaggctacattaatttttcctccatcaaatcttgatttgttcttgataaaaatgagttcttttggggaaattctttctttagacaccaacttggtttttctcatcttccacagaataattgaacccctgacctctagatgttcaaaattccgcttcaagcctctgtcagataaaattcaacagcagcgattactagacattgccaagaaggaaaatgtcaaaattagtgatgaggtaattactaattattacaattattagagttactaattcctttgatgaatgcatataaagaggccctgaaagatttaaatgtgtgttgcctcaatcctgatgccagttcttcagacaaacttaagctaaaggggcaacaattgaaatgtgtaggaattacaaggtttagcttttctattactttttgagttaattatcttttaatayatcagagacccgaaactgaggtggatttcatacatataatgcaaattctgcaacataaatctctgcatgatgacaagattttagtcttctagctaatacttcagtacttccctaaaattgatagaaacataaggcccttattcattataacagaatttaaccataatttgaatttgctttacgtgagcaagaaaatgggataaatatggaacattttttcatctctgcaaatttatttcagaagcaagagatctctatccttccattgtacccggcccctagactgatcatattttctcccaaaacagaaatgttttttctcattaactctagactaaaacagggtttttcacttttattaaacattttaaaattaaagttataaatccttaattggccatcataggttaaaaacaactcttttctcttcagggaatagcttatcttgttaaagtgtcagaaggagacttaagaaaagccattacatttcttcaaagcgctactcgattaacaggtggaaaggagatcacagagaaagtgattacagacattgcyggggtaagagtactggatattctgaatttctttttagttggcttttttgtggcttttaggaaattttcatccaacaaatactgggtgtttagcaagtgccaagtactgcactaggaagtataagggaataacctgggagtatcagagtgtttgaggtgaggagatagcactgacttttcagtttgtcaggcatgtaacagacatttcaggaaagaaaaggacactttcagttgttagtttttttgtttttttttttttgagacagagtcttgctgtgtcgcccaggctggagtgcagtgacgcaataccgactcactgcaacctccacctcccgcctcaccctcccaattagctgggattacaggcacctgccaccatgcccagctaatttgtatatttttagtagagacggggtttcacgatgttggttgaccaggytggtatggaactcctgaccycaggtgatccgccccccgcttagccttccaaagtgctgggattataggtgggagccaccgcacccagccttcagtttttagattttataararatgcctttggcagttaaatcaattttagcagatgttcttatacatgaaaactattttgccagttgtatataaacaaaaggcatatccaacttacagtaatcatttattaaagagaatggagtaccccacttgtctttggatactcccatgtaaaaactcacttcagaatcactactacttaacaacttttgtttctgtgacatttttcacctgcacggtaggccttccatatgacaagactggtaccactaatcctctttgtttctatgacgtttttcaccttcacggtaggccttccatatgacaagactggtaccactaatcctctttaattttctggatattgtggrctttttaaaccaatctcattagtggcatctttacatggagasattgagagaaagggcacttcccctttaaagaaatcagtctttttgrttgatcttggccactgttctgaggaatcgttatagccgctaggggaaaacttaatcttcatccactgaccagaacaagctataatccatgtgtgcccaaacttggaagttcacaaagccattaaagggctttaaaagcacagttgttagcaccttggttgcttagtggtgrctggagttactctggccctttccgttctcccaaagccttcccagraaagtatggaacttaggtgtggaacagaaatgactgggggcacgggggccagttggcagagtgtatgtctagtctcacctagaaacatctttaataccgaacattcaattacctaggtaataccagctgagaaaattgatggagtatttgctgcctgtcagagtggctcttttgacaaactagaagctgyggtcaaggtaaagtcagcttactaactttggggaaaggaatattaagtcatcataccaaaagttttttttattataggatttaatagatgagggtcatgcagcaactcagctcgtcaatcaactccatgatgtggttgtagaaaataacttatctgataaacagaagtctattatcacagaaaaacttgccgtaagtagrtactttgcacatgtcaatggaacatttaactacctgaaggrtgctaatttcttaaatttttctcgtaggaagttgacaaatgcctagcagatggtgctgatgaacatttgcaactcatcagcctttgtgcaactgtgatgcagcagttatctcagaattgttaaygtgaatatatctggatgggggkttttgtaaataatgaagttgtaataaaaataaaatgaccaaaagcacctttaaagtgaatatacaatttatttaacattcaaacttcattaagacatgtgcaatatggcaattttactggggattaaaccctacctaggattgcttgctggggcttagcaacagggtccagttcacacttagcactaattaaatactttattgaataaatacaataccaaacaaaatgcattcaaatgctttctaaaaaaattttaaaggcctttctactcaggctaatgacaaacacaataaaggcagatatgctagtttaacataattggctgattttatacagcacttatatcttttagtccacaagtatattattaaatgatagagaacatctaatacaaccatttctacagaactaggaaataaatttctaagaaagaaagattttacagaccccatcttttatacccaccccaacagtctaactctaaagaggataaagccaatgactttcctcacaagagctcacgactaacgtcgctttgctatcaaaatctgtatttctgatccgttatgagcattgagacaagattcaaatattcccaaagaaagaagcacaatgcacgttgtgatcgcctattcagcaacagcgagcactgcatccaaaactctcatcccaggaattaaataaggtcagccacattcatgggcatctcctccactgtagtattgtagaaagtctcaatgtcacgaagaatcctcttgtcttcttcagtaacaaagtttatagccacacctttcctcccaaatcgaccccctctgccaattctgtgtaagaaaaagaatcagaacgttacttctcacataatgtataaactactgaacatgacgatccacttgttaaccaccagctgctgtttacttatcaaggttatagttcgtgcttctaactggagcactagctgctaatgcatatctagagaaaaaaatcttcctttgcagttagtgccaaaaggattcaaggcttgtctggctgcaaaatgagatttttatcaggcatcttgagcattattataaagcagatgacagtatcgtgtttggggtagtgaaattaaagcccataccaaagtgggccagccaagagcaggtgtcagcctgggacagatgtgaacaccaggaataaaagagcagttatgtaatccatttcgacgcacttctggaactgtaaactgtaaacaaatgctgcaaaggttaactattttctaaaacttacttttttccagtgggaaaacaaatatttggtatggtaacccaaacttatcactgcttttttgctcagtttcacacgttgtaactcaaattactctaaacgtgtttaactgccaaacagctacctgcatgttagaaaccagacaatacaaaccacctaataagaaaggttccctaatagaaatactaatacaaaaaaatgccttagctggagcaacttaaaaatcaaataatcatgacaaaagaaaaacaaatataaataccgactcgctctttattcaaacagtgtgctgtttcgcttatgattccacgtcctaaattacgtcaacgccgtttctgagtgccatctcgtcaccaactgctgctatcgactcctgtattttttaaaaagtctttttttacatcatataacaaagtacaattcaatttatttagggataaagccactataactaaaccagggttcactcaaattgctaccaggcgacaccaagaaaatcccaactatagaaaaaatcaccaagaaaaacacatggacacaagaacatcactaaaagctcaagcataaggtaagaccaacaattgtggaaaaaaaccctatgtccacaatctgggcaatgtttacaagttttcccactttgttctcatcaaccttccctagtacaaatttaattacatcatcttactgaacactactgactttactgaatctattccttgatttgatgttacctttcatacaaatcacagtagaaaaacgtatgaatttttttcaatacagccaagatgctggcttctcacctgtgaatatagttttcacgattggtaggtagatcataatttataaccaaagacacttgttgcacatcaatcccgcgagcctgaaacacaatggcatgttttaaaaattgattcaaaaaaacttgacacctgtcatgtaggccacaaaatagtagcgaactatactaagtggtatagcccactgtggagtgtggtcttttactcttccaaatagcccaagttggcaaaggttacttaaaaacctgccccccaaaaagctaacttttggtagatttttaaaaagcattaagagacttaccaacaagtcagtagtgatcagaacacgacttgaccctgaccggaattccctcatgataacatctctctccttctggtccatgtcaccatgctgcaaattaataaaccttaattcaagaatcaccagtcaggtcggtatttaattttaatcaacatgtatgagaccaagcgtccctggctgctacaggagaatagcagacaggtatagttaagaaacaactttattttaagcagggggaacgacaacacagcacttagcagctatattgtagtctgaatcctgctttagtggaaatccagacattttagaacacctcttaccagagcagaaactgtgaagtctctggcatgcatcttctcagtcagccagtccaccttgcgcctcgtattgagaaaaataacagcctgtgtaatggtcagtgtctcgtacaagtcacaaagtgtatccaacttccattcctgtaatgtttagaagttaaagttaacagtcatttagtttttccaactcttcagttaaaaattcattctgggccagccacagtgctaatgcctgtaatcccagccctttgggatcctagcacttagagcccagagttccaaccagaccagggtttcaagaaagtgaaactgtctctacccaaaataccaaaattggccagtcttagccagtctcataacccagtctcaaaacgtagaaattataaaaattaacttcattctgttaggtctaatgagatattgcaccaaatcttaagacaaaggacattggacattaagaaagaggtccaccccagtctttacaatctagtgctgttacttttcttcttgtgtgtactctgctagcattattgcaaaaaccaagacatggtcctagtgtctgcaattttagcacagtgcttatacaagaaggtaaaataatgtctaacaatcagacagttacctctctctcaacattaatataaaactgtttgattccttcaagggtcaattcttcctttttcaccagaattcgaattggatctctcatgaattttttggtcacttccaacacatcagttggcattgtggcagaaagcaacacaaccttaaaaagagaaaattatgttgtagcacaacttacacattaatacccaaaggaaaatgtctgaagccaagcgtctctgtcttactacggaatgaaggtagacagagttatgcatcaagtgctttaagcagggggaacgacagcaaaacacatcagttgtattgtaacagtacctgcattaaataaaccccatctctacctttaagaggggggtgaagtaatgcttacctgaatacttgtgtttagtttttggaaaatctcatagatttgatccttaaaaccacggctcaacatttcatctgcttcatccaaaacaaacattttgatccattttggagctgttagaaacaaagtcatactgtcatttctagatctactcagtgatacaatttgacttttcaactatgttaacagttttaaaaaaaatactctcttaaagacaatacttacaaaggtatcttctgtttaacatatcaaacactctcccgggtgtaccaacaacaatatgtggtgcttcagcctgcagtttttgcatttcatttcgaacatttgttccaccaatgcaggcatgacaagtggctcccatatagtctccaagtgccagaattaccttttggatctaaaacccaagccttaattattattccgcagaactccaggatcaatgactaatttttaaagcataaaggcaaatataatctggtctgccaacagcttttatgcatgcacagcacaaaactacttccaagcttaaaatgcagacgacctaactgctgcaaggtaaaattcccttaatgtctttcttatgccttgtcaaacttgggatgctgctgctccacgcatcagctagacaattcaagaataacgtttcctacattattcttcactgtaggtagggagtacgtagtgaaatttatgttctgtaattacagctagggcaaatgatttttttcccccagagggtattgtgccttatataatcctgacctcaataaagcctacagctttattaggaaggtttacttcaaagccaatatagcagtgagctttgaaaacatagcatgcaacagatgcatcacgaactacggagacagtcaaatggtaacatgtcactgcagttttcatgttgcacaactgcattcaaacttaaaaaatggggacagatctagtacatccaagagagcgcttcggattctcaatctattagtatacaaccctacaaaccatacctgcatacccagttcttttaaaactttcaacaaaaactccctgcatgcatggacaattaaaaggagggatctggtaggaccaatttatactaagttttaaattcttcacagttgtgaaacctgaaacctatgcaacacgcaagcagtttttttgaactacactatcaatacctgttgagccagttctctggtgggggccaatactagtgcttgggtctccttgaactcaatctccaactgttgcaggatggaaatagcaaatgtggctgtcttgccagtacctgactgagcttgagcaatcacatcataccctaaaaaaagtaggatacacatttaccgatcccacatcaaattgtcacttctacttcacaccatgtattccatttggaacattatgcccaaataatcaagtgatcagcaatgagtattctcttcatttcaggtcagtcccgaaagatgattgccatcatttcactttaaggaatacaaacaggtgctagtcccccagaggttactttcccttttatggttcatgtctatgtagaacaatttcctaaaaatgccagtttcttttacctttaatacagggaataatagctctctgctgaatagcggaaggcttctcaaaaccgtaagcatagatgccacgaaggagagactcctttaaattcatatcatcaaagttatcaacaatctcattccagttgctctgtaagttagaaaaaataatgcacgcataaatgagatgaacacactcacctttccaaagcttcaagatccacaaccgtttcttacctcgatgacaccatcggggtccattccctctgggccgccatgttctctgctgacaagaatactgcagtcagacaccccttccaggccacctcaactgcaccttaagcgcatagccctttgcaacccgtctcagcacgttagcctcccctgcacaagctaaagcagcagcctcagggcgaatatccacactgtgcgccttccctaaaggttggggcctgcggatgcccggaaaggcagccccccaggcccgagcgcatggcgatcccgtttcaactgcggagcgtctcgcgagagctcggagcgccgaactccgcccccaacaatgcgcaagccgggtgattgacgcgggcggagcggcctggcgagggcgatgccaacggttcaccggcaccggtcctgtcccgtcgcctccgcgccgtggccgagtggagaccgctgcctccaacccttccccaagtaaagcctaggaccctcccccaactcgtgtggatgaccgaaaataaagcttcgggtcctggttacagtgtaccgaactcggactgcgccacggctttttactccatgtttcccgtgctctacactgggaaggaaa

SEQ ID NO: 97221 - DNA, 262518 bp, Homo sapiens
  misc_feature (1)...(262518): n = A,T,C or G
atgagccaccatgcctggctaattttgtatttttggtagagtcagggtttctccatgttggtcaggctggtctcgaactctcgatctcagatgatctgctcaactcggcctcccaaagtgttgggattacaggcgtgagccaccgcgcccggcgtcatgtcagttcttaggttcgtctattcaatcagctgtggagtaagtgggatcttttccaacgccacttttcattctctggcactaactgggtgtccagcaattcaattcaaatctgattttaactatctagagttagaatagacaccacaggttaagggcacagtcccataagactgcccctcaattaagacaccaattacaaatcctcagcctggttgggtataaattgagagttcccctgacttcctcctcaggtttgataatttgctagaatgactcacagaactcaggaaagtgctttacttatcattaccagtttactgtaagggatacaactcaggaaaagccaaacggaagaggtacacagggcaaagtatgggaggtggtggtctgcaaagcttccatgccctctccaggcgtaccaccctcccagcactcgatgtgtttaccaatccagaagctcccagaccccatcatttagagattttttttttttcgagacagggtctcattttgtcacataggctggagggcagtggtgtgatctcagatcactgcagcctcagcctcctgggctcaagggattctccctcctcagccccgcaagtagttagaaccacaggcatatgccaccatgcccagctaagtttttgacttttttggagatgtggtttcattgtgttgcccaagctggtcttgaattcctgagctcaagtgatctgccttccttggccttccaaagtgctgggatttacaggtgtgagccactgtgcccggcctcattttgggatttttatggagggtctgatctgtaagcaggattgattaaatcattggcccttggtcgttaactcaacctccagcatttttccctttcctagaggttgagggataaggctgagagttctaaccctctaaccaaggcttggtctttctggtgaccaggctgtgttctgaagctatctagaggtctgctaggagtctcttcattagaacaaaagacactcctatcacattatcattaaggaaattccaagaggcttaggagctatatgccaggaccttggggtgaaggccaaatctctttctcatagcacaatcatactatgatttgcaactaagaagtttgaagagctgtcatctaggccagtggtgctcaaagggtaatcccaagactagtaccatcaattttcctggggacttgttagaaatgcagattcttgggtaccaatccagactactaaatcagaatcctggaggtggggtccagaaatctgtttttgtaaaaattacttctattcccaggtgatgctgctgaagtctgcgaaccacagatgtagatgaaactgggggcctccttgatacctcaggaatctccaccctcacctgtggcatcaggggctgaggaggctgtagtgccagccactgctctctaagggaggtcctttgtctgtctttcctttgtcagaggttgcactgacagttcacccatagtgaggtggaatctacagggacgtggagcttgagcaattcttttttttttttttttttgagacagagtttcactcttgttgcccaggctagagtgcaatggtgccatctcagctcaccgcaaccttcatctcccgggttcaagtggttctcctgcttcagccttccgagtagctagaattacaggcatgtgccaccacacccgggtatttttaggagaggcggggtttctccatgttggtcaggctggtctcgaactcccagcctcaggtgatccacccgcctcggcctcccaaagtgttgggattacaggcgtgagccaccgcgtctggccagcttgagcagttctttaccggaagggagagaatggtctaggttttgtaaaggacacagtttggtcctttacagtggtatctgcaaaatgaggctaaagcctttagagtgttgttgtgaggcctcaatggtgtttgtaaaatgtctaacatcatactagacacagaacggtcacttgctatatggtggtggtagttgctgtacctgacactgcctatcacaaccatagcggatgttcagtagatgtgagtgattgttaattggttcactggagaaggaagcaggcttttctagcttgtttctctgattttgccagctgagatgtcttagtctgttttgtgctgcgctaacagaaaaccatgggctgggcaatttataatcaacagaaattgctttggctcctggtgttggaggctgggaagtctaagatcgaggggtgtacctgctgggagccttcatgctgcatcataacgtggtggaaggcatcacatgggtgagaggaagggagaaggggaccaactcctccttttatcaggaacctactccagagataacagcattaactcgggacaaagcccttatgacctaatcacctcttaaaggtcttctttctcaatgctgttgcattgaggattgagtttccaacacatgaactttggggaacacattgaaaccacagcacaaagaggcataatataagagatcataattaggaaggagaaaaacaggcagggaaggtgggagggtgggaagaaagaagacagaaagaatgtcagtgttcatgagaacaatggagacaatgaccattttcttggaagaacaaggaggtatgagctattgaacactatgtggtcatttcttcttcttcttcttctttttttctttgagatggagtctcactctgtcacccaggctggagtgcagtggtgctatattggctcactgcaacctctgcctcctgggttcaagcgattctcctgcctcagcctcctgagtagctgggattacaggcgcccaccaccgtgcccggctaatttttgtatttttagtagagatggggtttcgtcatgttggccaggctggtttcgaactcctaatctcagataacccacccacctcggcctctcaaagtgctgggattacaggtgtgagataatgcacccagccgatcatttcttcttaattccagttataggatttcagagctggaaaagggaacttggagatcacagacccacttccttactgcccaggggaagcagtgaaggccctgagagagtaagtgtcagagataagagcagaattagtttctgaggataggcactgcctgctacatctcaccataacttgagctcatttatctccatggaaacctttgaggactgtgaaagtaccaaagatgtgggcagcactctgagtgtgatttatttcctttctgttttctttttgttctcattcttaatcataagcttctcctccctccttttcctctcctccattccttctcttcttccttttcatgtttctcacccataaggacccggcctaagccaggaagctgaggttactggatcttcaaagtggctctgacactccaagtccaacataccccacatcattgtcttctttactaggcgttggtttctgctgaccaaaactcacagttggctgtgactgggcaccagggttctgactactatcagtaggaaacatctcatttggttccttgaaaattcttgtgacccttgaacgccggaaacataattcaaaagctgcctcccctcctgcggatctttaacctttcttttttttttttttttgagatggagtcccattctgttgcccaggctggagtgcaatggcacggtcttggctcactgcaacctccgcctcctaggttcaagcaattctcctgcctcagcctcccgagtagctgggattacaggtgcgtgacatcatacccagctaatttttgtatttttagtaaaatggggtttcactatgttggccaggctggtcttgaatgcctgaccttgtgatccgctcgccttggtctcccaaagtgctgggattacaggcgtgggccactacgcccggccttttaacccttttttgaatctcttgcaaaaggtggttgtgaaaatggttgctcagtggccgggcatgatcacttgagtccatgtgtttgagaccagcctgggcaatatggtgaaactccatctctaaaaacgaaaaaaaaaaaaaaagaaagaaaagaaaaagaaaatccttgctctgttttgcaggcagagtgcaaagtgcccaaacttcacagggggaagaacctctccacaaatctcatgacacaggtgaactgacctcgcttctcaatcacagcccacaattgttagagaaagcattaaaaagggctgggcgcggtggctcacgcctgtaatcccagcactttgggaggccaaggtgggcggatcacgaggtcaggagatcgagaccatccttggctaacacggtgaaacaaaccccatctctactaaaaaatacaaaaaattagccgggcgtggtggcgggcgcctgtagtcccagctactcgggaggctgaggcaggagaatggcgtgaacccgggaggcggagcttgcagtgagctgagatcgcgccattgcactccagcctgggcgacagagccagactcagtctccaaaaaaaagaagaaaagagaaagcattaaaaaaataccctcagccccctgtgatgggtggctactcctagaatttggatccagggtgtttgcggcttggctttttacatatcgaagaggaaagagatggctgagaacatccgcctgggtggtcccgccattccgcctgctgagtattcagggactcccgctgtagaaaggattgggggacaacctgaccgaattcgcatttgctcaggcgtttcccgtagcgctctgctgaactggggttagtcttttgctgccagtcagaaagtgtctgggcccaactagggaaaccacgggataatgggctgatggggaggaggaccagcatggaggatgtgccacagcccctccagaaggtagcactggcgtgcctgacaggtgacagacggagcagaggcaagggcgcagctgcacgaaggaaaacgcccacatagggggtgagcgcgcccacgcgtgctcagccttgtcggagcgcagcccgggcgccgggctcccagtgcaggtgtggccagcggaggtcaagaactgcgtggaacaaccccaagtgggggaaaacacacgccagccgcccccggggtcaggaggtggggcaagcagcggcgcctcacccagcctcccgctccgggtcctgccggatggcggcagctctccgggccagcccccttctctccgcggctcctccgcagacacccggcgcggaagaaggaggggcggagacctggccggcgcgcgtctgatgatccggaccccggtgcgactggagcgcctcagtcactgtctccccgccccacggttccgagtaaggaccggagctccactccgggggtggagcgcgggctccccgcagggaaaggtgcgcagcgttcccgaccccaaaacgagcggcgcttgggagcgtgcgtgcctccccgagagccccgggcgccacccgtgggctggacgaggtgggcgctggggcgtggggccggcggcgcagagaagccacggccacctgccgcctcccctgcacctggcggagcatccctcactctacagtccctggaggcggcgccggaaacctggcggccgggaccgcgattctggaagccccggagctcgcccggccggaggagccggggcgcggttccggcgagattggcgacttgcttccttttgcagaacggccgctcctctctcggtccagctgcgacgctgggaaagcgccagacttggtctgtcacgggagcccccgcggggcgtggcgagggagagctggcctaggctgcgagggactctcgtttcttgcctggagagccaggaagagggcgagggcagagcatccttgggcggagatgcctttaaaaaatcatccaccgcagcggtagaaacagttttgtttggctttatttatacggaatggtttttcagtgaaatgctgtcttgcttaaaagaagagatgcctccccaggagctcacccggcgactggccacagtgatcactcatgtcggtaaacgaagctttaatttttcctgcgttttattaatggcgggtgaggatggtctctgggcttcatctggctcctggcctcacccgctgccccggggcagcgcgcttcctggggggttgcccggcatctgggcctcgctgctctgggtcctgcctgcggtgcccagcggggggcatccctggggcgcgccgctggtgggggtcggggggccgaggctggtgccttcaccaggtggttgccgagtccgttgagctccaaaccgagggctgctgggctgttaccatccgttagctgcttctgacgggagtagggtgggtgggaagttatgttctggttttggggatagtgagaaaggagagggcataagaggaacgaatgccagtgcttttcagcagaaatgattgccacgccactgaaggcttgtttataagaaagtgcagggagaggcaggttacatgggagcgcccctgcgcagctcggccgctaggcctgttttactgtgctgcctggagggttaagcacacccctgatgatccccgcgagaaatctctgcaagccaaggagactgagcaattttaatcttcttccctgagttgaaaagaggagcaaaacatgcattgcttgctcctgaaataagggttgtgatggaacgtcaggccccacagactaagtaagggcaagaggacattgagacagttcccagtcagttttttcttagcactttcttccccttggccttccctggacctccctcagtaaagacacacattcaggttcagaacctctggatgtgggcaactggaattatcgggatcattttctctgttgctgactgtgcttggaggtcctcccatgaatgcaaatcagcttttattgataaagccaggaactatttgccttggttttctacacatttgtgaaagctgctttcttggtacttgcatgttaaatgttgcctcaattagtccaacgtgtttgctgtaataatcgtgcacatctcaaatgatacacttgtgaggacatactttgtaaagatgatttatatgggaaggcccagttttgataattcaagtttagaaaaaagtttctggtgccaattgtgggcactgaacttttacgacaaaagatcagtaggatcctaccaggtaaggttgaatgtgaaatattgctgaaggcagtgtgaaataagaggaaaaagaacttgtaatgaaacagaattcggaatctgcaatatgatgaaagttgaaatgattgtgctaaaacccagcacaggcatgaagttgtggtatagagaaagagcagtggactcggggtgtgaccgtctggatttgaatctttccctggacaagtcattcgacctcaggttgaaaaataggaattttaatagtactttcccactcagctcaaaggctacttgtgaagataagtaagataatttgggtagaaatactgtgtacactgtgattatacagacatttcagttattagacatatccctggtccctctgtcacgccactaaagatctttggtgggttactgggcctctctcagggcgaagcctcccatctgttaaacgaggggttgacctggatgattttaaaggtccctcctatttctctggagcaggctcttcttgaaaatctggcaggcagtattccttgactaacacttagctgcctgtggcgcccaggctatggtattttcttgcctaccttgctccctccctcctyctatagacagctccatgcaggatacacataggaatttgttgtagtttctcctttcaacctctaatgacccttggcttttgtgtgctttgcaagattctgtctcctcatacttaatctaataaaacctgtgaaatgggtggggtactcattactacccctatyttacaaatgaaggaattgactcagagaggatcatcttttttgtttttttttttgagatggagtttcgctcttgttgcccaggctggagtgcaatggtgtgatctygactcactgcaacctccgcctcccgggttcaagcgattctcctacctcagcctcccgagtagctgggattacaggcatgtgccaccacgcccggctaattttttttgtatttttagtagagacgggtttctccatgttggtcagattggtcttgaactcctgacctcgggtgatccgtctgccttggccttggcctcccaaagtgagagaggatcatcttttaaggtttcagggggagtgagtggcaggctcagggcaggaaggtagctcttcatatcccctactgggggacctcaaggtggagcgggcgtttctctaaccctgcaacagcctcagccttcacggagggtcactttgggtagccagtggagcttctcaagggtagattggctctatgcttgcctgttcttttcaggtatttccttatcaagtagcttctgaggaggtgatcatgagttggggaaggtttgagaggtgcttggagcaaggctttgggttggaacattctccgggtcctatcctagccacttgccagggtagccacactgtcttccgtattcactcggcctcctctgaccctgagtcactttctcctccagcaggggtttctgctctttccatgtcccttagacttggtaattgagtcatctctcttcacccactcccatatttccataagtgtcttggctgctgttgattcagtttcagaaacacctcgcagctttctttcctcatgtccatccccactgctgcctgcctcaatcctacttcaggacttcatttccttttaactagccgttgtgcaaacctcctgtctctctgtgtctgcctctgatgtatactacgagccaaacaaacacgacactctatattccaaagcctttaataatacctgcacctagtcattctctgcagcctaagatacaagctcttcactgtttggcctataaagttctagctttatcccctaatagttgagatttctacacctatggttggacaacttgaactcttcagttctttggctctgtcccattatgttttccagaccttttctcacctctaagtatttgcacttttaccccccacctggaataagtctttagtatatttctcacagaaatagtacacacctttgaaacccaatrcaatgccatctccttcatggtatcatttctgatcttgctggtgggacatgatgactcctgactctgaattccaaagtaagctttgttctgctcgcattgtgcccatcatactctcccctgtattatggttactgggttattcgtgcgcttgtttaacctgctctgcttctagactcttcattacttacgaagagtcttatgtaccctagatagccacttaacacagggcctcactctaaggagatgcagaataaatgtttgctgaatagatgaatgattgtgttttggaatggagttggagtattgagtaccaggcagtttttacacttttaaggacagctataaaatatttgtagataactattttgtctccaaaaccccatttgaaagtaaacatgaagcccttcatgtgttcctcatgtgatgtgcttcactctaggggcctctttctttggattttgtccattagtcaggaactcttataaaatatgcagttcacatgtgaacacatgtctagatgtgttttcatccatgcaggacacatgtaggaccatcctttccccttgattctggaccatagagtcacattggtttacagaatttcagtgtcagaaaaatattgtttgattttcctcatcctatcccttttcggttgttgaaatatctgcaaatttgctgtactgctatttatatgtggaggtgtgctgtctaagtaacatggactatctatgaatgcatctcagattgctctaggattttgatagacagggcacatatggctcacatgggggcttccaataactagaaacccatagtcatcaagatgggccatgtcgccgggcgcartggctcacacctgtaatcccagcactttgggaggccgaggcaggcagatcacctgaggtcgggagttcagcctgaccaaccctgtctctactaaaaatacaaaattagccaggcgtggtgatgcatgcctgtaatcccagctacttgggaggctgaggcaggagaatcgcttgaacccgggaggcggaggttgcggtgagctgagattgcgccattgcactccagcctgggtgacagagcaagactgtgtctcaaaaaaaaaaaaaaaaaaaaaaaacaaataaaatttaaaaaatggtccacgtcagtaactccccatagaggttttgcatttccagcatggctcactttccaccttgccccctcatattagacataattattttacattttgatcttatcattgttctaaaatgacttcatatgtttggctacacccaattaactgtgaagcagaaaagaatatcctttgaaacattccttatatcattggagatcggattggtggctattttggtgacagaggctctaggatactgatctgtaacccaggttgctacttctgggacacagtcaacattgataacatgcagccagaaaaatactagactgagaaattcagcccgtggctcattattatacaatgttgttagcagctgaaatgtctagrgtccatgcctcagctgttggtactgaaagaagagtctaattagagtagggtatctgctaatcaggtgggaatgtgcccagtggggatggctggacatgttcccccatctgactatatttgggctatttttcgattaggctctgtagacactgtgcctagtgttcacagactcttcaagggctactaaaaatgtttgaaccctaaaaaaattgatcgacaaatttaaaagtgcaaaataaaatttaagaaacatttaaatgtctacaaaagctcccttgcccttaccattttgtcacatttaaaaagaaacagttgtggagttggagttccatttccagaaatgccagtgtgaagagtcccagggatccattcctcagtgaagcaactgtacttggtgaaaattattttaaaagccaggcttctaaagcctctggaagttgtttgaagggcatgcagcaaatgaaaaaaaatacatttattcaagaaaatctactaaatcttggtaataatagtgagtgtctatggtacctgagcatgacctgctctcatcctcccagctcctctctcctcagcttttagtcaagggatatagtcccttgccaggaggggcaggtgtccagcatttctcatcttctctaactccaagttgctgaggccaagttcctggagagcctacagctgagaggtcagggtctgcttctttccacccagcccccattcataggacagaagctttatcccaggtacagcgggctgagaatactgagacctggttgcttttgccccagctccctcatgaaatggagattcaacattgagagaggcaagccaagaccagtctactgccctggctgagattttgcctggaagtagagacagtctggaagaatagagggtttgaagctctcccccaaataactgactttagctaaaactgagtgtgggaaagctcaagtctaaaggcactcttgaatacaatggagattttgagagtaagaaattaagaggagtctggtagctttgtgagagcaacaagctaaaccataggccagcttgtttatcagagagtcctctgaaccagggaaagaggcaactagagttatatggaacctaaagattggcctcaaaaactatctttgcctgaatttaattgaataagactggagcaattttatgccccagggcattgttgaaaacgataaagcaagcagtaggtaggtggagtttaacagctgagtatgatataaacaaaggcagacaacagagagatcagaaagggagacaggcagtacaactctgttaaacccacacagactatgggcacaaccaaagcaacattgtctgaggagggacatcagtgtctttacacttcaagggaaatatacttcactaaaacagtctagctatgtcactaaacaagcaaacaaacaaaaacaagccccagagatggggaaaagaggaatcagtattcatggttgctatagtatattacctaaaatgtccagttttgaaccaaaatttatgagaccttcaaacaaacaggaaagtgtgacccttaaataaacaaaaagcaggcatcagaaactgcctgtgagaaagcccaggtgtcagatttagcaaaaacttcagtacagccgcaataaatatgttcaaaggggccaggtgtggtggcttatgcctgcaatcccaggcccaggcaggaggattgcttgaggccaggagttcaagaccaacctgagcaacatagcaagaccttgtctctataaaaaacgaaaataagtgaaattaaaaatttactagaggagcttaacagtggatttgaactggaaaaacaaagactcaaggaactgaagatagatttgatagagattatgcaatctgaagragagagaaaaatgaatagagccttagaaaaatgtgagacactagtaagtgcactaatataaatggaatgtaaagagaggagctacaggaggagcagaaaaagtatcagaagaaataatgatttaaaaaattccccagattgatgaaaaacattgtacatcaaagaagctcaatgatgttgaagtaggaaaaaggtaaagagatccacacccaaacacattattgtaaaaatgctgaaagtgaaagatgagaaaattttgaaagaagagaaaaatgactcatcacatacaaagaaactttaatgagggtaacaaccaactctcatcagagatgatagatgacagaaagcaaaaagtgctaaagaaaattgtcaaccaagaatcttgtattcagcaaaactgtctgatatagtttagctctgtgtccccacccaaatctcaccttgaattgtaatccccacatgttaagggagggacctggtggggggtgattggataatgggagtggtttttccccaggctattcttttgacagtgagggagctctcacgggttctgatggttttaaaagtggcagattcccctgcatgagcactctctctcctgctgccttgcgaagatgtgccttacttcccctttgccttctgtcacgattataagtctcctgaggcttccccagccaggcggaactatgagtcagttaaacttctttcctttataaattaccccatttcaggttgtatcttttttctttttttgagatggagtcttgctctgtcgcccaggctggagtgcagtggcgcaatttcagcacactgcaacctcccactcctggggttcaagtgattcttctgcctcagcctcccaattagctgggattacaggtgaccgccacaacgcccggctaatttttgtattttatagagacagagtttcaccatattggtcaggctggtctcgaactcctgaccttgtgatccacctgccttggcctcccaaagtgctgggattacaggcatgagccaccgcacctggccaggttgtatctttatagcagtgtggaaacagactaatacagagaattggtactaagagtgggggtactgctataaagataacctgaaaatgtggaattgacattggaactgggtaacaggcagaggttggaacaatttggagggctcagaagaagaccggaagatgtgggaaagtttggaacttcctagagacttgttgaatggttttgacaaaaatgttgataatgatatgcacaatgaagtccaggctgaggtggtctcagatggagatgaggaacttattgggaactggagtaaaggtcactcatgctatactttagcaaagaaactggtggcattttgcccctgccttagagatctgtagaactttgaacttgagagagatgatttagggtatctggcagaagaaatttctaagcagcaaagcattctttttcttttttttctgaggcagagtctcactctgatgcccaggctggagtgcagtggcacgatctcagctcactgcaacctctgccccccaggttcaagtgattctcgtgtttcagcctcccgagtagctgggactacaggtgcatgccaccatggctggctaatttttgtaattttagtagagatggggtttcaccatgttggccaggctggtcccaaactcctgacctcaagtgatgcacccacgttggcctcccaaagtgctgggattacaggcatgagccactgtgcccagccacagcaaagtattcaagacttattctgaaagtgttcagttatatgcattcacaaagagatggtttgaaattggaatttatgtttaaaagggaagcagagcataaaggtttggaaattttgcagcctacctgaccatgtggtagaaaagaaaaacccattttctggggaggaattcaagctggctgcaaagatttgcataagtaataaggagctgaatgttaatagccaagataatggggaaaatgtctccagggcatgccagagaccttcatggcagcccctcccatcacagtcccagaggcctaggaggaaaagatggttgtatgggccgggcccaggggtccactgctctgtgtagccttgtgacatggtgtcctgtgttccagccactccagctgtagctgtggctaaaagggrccaagttacagctcaggccattgcttcagagggtgcaagccccaagctttggcagcttccatgtggtgttgagcctgtaggtgcacagaacaagaggtgaggtttgggaaacctcctagatttcagaggatgtatggaaatgcctggatatccaggcagaagtctgctgcaggggcagagccctcatggagaatctctgctagggcagtgtggaggagaaataagagtccccagtggggaactgcctagtgaagctgtgagaagagggccaccatcctccagaccccacartgacagatccaccgacagcttgcactgtatgcccagaaaagctgcaggcattcaacgccagcctgtgaaagcagctgcagtggctgtaccctgcagagccacaggggcagagatgcccaaggccttgggagcccatcccttgcatcagtttaccctggatgtgagacacgaagtcaaaggagatcattttggatctttaatatttaatgactgtcctattggatttcagacttgtgtgaggcctgtagcccctttgtttttgccagtttctctaatttggaatgggaacatttacccagtacctgcaccctcattgtgtcttggaagtaactaatttgcttttgattttacaggctcataggcagaagggacttgccttgtctcagatgagactttggacttgcacttttgagttaatgctaaaatgagttaagactttgggggactattgggaagacataattggttttgaaatgtggaaaggacatgagatttgggaggagctggggtggaataatatggtttggctctgtgttcctatccaaatctcatcttgaattggagtccccacatgttgagggagggacctcctgggaggtgattggatcatgggggtggtttcctccatgctgttctcatgatagtgggggagttctcacaagatctgatgggtttatttatttatttaattttttgagatggagtcttgctctgtcacccaggctgtagtggagtggcatgatctcagctcactgcaacctctgcctcctgggtccaagtgattcttctgcctcagcctcccaagtagctgggactataggtgcgcaccaccacactcagcaaatttttgtatttttagtagagatggggttttgccatgttggccaggctggtctcgaactcctgacctcaggtgatctgcccatctcakcctctcagagtgctgagattacaggcccsgccacaagatttgatggttttaaaagtggcagtttccactgcaccctctctctcccttgccaccctgtaaacatatgctttgcttccctttcatcttccaccatgattgtgagtttcctgaggcctcccttagccatgtggaactgtgagtcaatttgacctctttcctttataaattacccagtttcgggtagtatctttatagcagtgtgaaaacggactaacatagtatctttaagaaatgaaagcaaaataaagacattcctggataaacaaaaacagataattaattgctaacagatctaccttttaaggaatactaaaggaagttattcaggctgaaagcaagtgaycccaggtggtaattcaaatccatatggaaaacaaagagcatcartaaagrtaattatgtaattatgtaagacactgtaaatgcatatttcttcattcttttaactgatttraaaagcaattatgttaaacaaaagtacaaatggtccycagcttacaatgattcaacttacaactttttgactgtacaatgggtttatcaggatgtaacttcatcataagttgaagagcttcttatgacttatgatggggttacagtttctactgaatgcatacagccattccttggcatccaagggggattggttccagtaccccccagtgtttaccaaaatctctggatgctcaagtcccttttataaaatgatgtaaatgattaacctatgcacatcctcttgtatactttaaatgatctctaaattaccattttttttttttttttttttttttttttttgagacagagtctcactctgttgccaggctggagtgtagtggtgtggcacgatcttggctcactgcaacctttgactccctggttcaaatgattctcctgcctcagcctcctgagtagctgggattacaggcacgcmccaccacgccaagctaatttttaaaaaaatttttagtagagacagggttttaccatgttggccaggatggtctcgatctcctgacctcgtgatccacccgcctcagcctcccaaagtgctaggattacaggtgtgagccaccactcccagcctgatctctaaattacttataatacctaatacaatataaatgctgtgtaaatagttgctgtactttatattttgaatttgtatttttttattgttgtattgttttttatttctttgaatatttttgatctgcagttggttgaattcatggatacagagcccacagatacagagggccaattatattgcttttgcaacattataaagttgaaaaatcataaatcaagccatcataaattagggattgtctgctgtgttgccagcattaagtgcatttttgacttacagttattttgacctatgatggctttatcaagacataaccccattgtaagttgaggaatgtctgcatataatgtactgttgggtatatatattcagtaatataatatatttaacaagagcacaggggaggtgggtaggagaaaagctgcatttggaataaagaaatgactccagagggtagctcaaatccatagsaacaaatgaagagaaccaggaatagtaaataaggttaatgttacaaactctataaatatatacttgttctcctttcttgtctcagattctgtaataaacataaagttatataacatagtaattataacaacatattgttgggtttataacatacgtagatatactatgtataacaataatagcagcaaagtgggaagaaggattagcactatatagaagtaacatttctgtatctcaagtttaattaagttagtataaatctgaagtagattttgataagatgtatatgaaaaactatagaataaccactaataaaattacttaaaatataatgaaaatattatcaaaggaattaaaatgctatactagaaatttttattaatgyaaaagaaagcagtaaatgaaaaaatatgagatatagagaaaacaaaacataaaatgacagacatggatcccactatatcagtaatattaagtgtgaatggataaatgatccaatcaaaaggcagaaattgwcaggctaggtttaaaaaataagagccaactatatagtgtctcctggagacacactttatattcaaagatacaactagtatattcaaagatataaaaaagtaaaaggatgggaaaagatgtatgatacaaactgtaactatacaaacactggggtgatgatactaatatcagatacagtagacttaaaacaaaaaaagtcactagagatacacaaggatattttatagtgataaaaggcttaatctatcaccaagatataataattacaaacrcctaaaaatggagctccaaaatacatgaagcaaaaactgacagaattgaaaggagacatagaaaattcaactattggccgggtgcggtggctgacgcctgtaatcccagcactttgggaggccgaggtgggtagatcacttgaggtcaggagtttgagaccagcctggccaacgtggtgaaacctcgtctctactaaaaatacaaaaattagtcaggtgtggtggcgggcacctgtaatcccacctacttgggaggctgaggcaggagaatcggttgaacctgggaggcaaagattgcagtgagcagagagactgcaccactgcactccagcctgggcaacagaacgagactccgtctcaaaaaaaaaaaaattcagttcaactattaaacataatagttggaaacttcagtatgtcactttcagtaatgtgtagaacaaacaggcagaagatcaacaaggaaatggaaaacctacacaacactgtaaatcaaccagacccaacacagaatactccattcaacaacagcagaatatacatttggaatattctcaagtgttccaaggaacatggaacattctccaggacagaccatattctagactctaaaacagcctcaataaatgtaaaatgattgaaattatacaaagtatgttctttaatcaaaatggaataaaattagaaatcaacaacagaaggaaatgtgaaaattcacaaaaatgtgaaagttaaatagcatgcatataaagagcaaatgagtcaacaagaactcacaagggaaatactttaagatgagagagaatcaagacacagcatactcaaacttagaggatgcaatgggagcaatgctgagagggaaatttatagctgcaaatgcttacattaagaaagaagaaagatctcaartcaataacccaatcttccacactgaagacactaggaaaagaaaagcaacctaaatataaagtagaaggaagaaaatagtgaagattagaggaaattaatgaaatgtagagtagaaaagcaatacagaaaatcaacaaaatcagaagttgattaattgaaaaaattaacctttagctatagagtaacaagagaaaaaagagaaggcgtaaatgacttgaatgaaagaggggacatttctaccatccttacataagcaaaaaggcctgtaaaggaataatacgaataactatatgccaacaaataagataacctagatgaaatggacagattcctaaaactatacaaactaccaaaaatgactcaagaaatagaaaatatgaatagacctataacaagtaatgggactgaattagtaattttttaaaaacttacccacccgcacaaaaaagctcaggaccagatggcttcacatgaattctaccaaccatttaaagaagaattcgtaccaattgttcacaaactcttccaaaaaatagaagaagtgagaatattccacaactcattttatgaagtcagtatcaccctaataccaaaactagagaaaaatgcaacaggaaagcaaactataggctaaatctcttatgaatatacagttgacccttgaacaacataggtttgaactgtacgggtccacttatacgtggattttcttcctcctctgccaccctgagatagcaagactaacccctcctcttcttcctcctcctcagcccacttaaggtgaagacaacgaggataaagagctttatggcgatccacttacacttaatgaatagtaaatatatttgtaaggagtaattggaaggacagccgagaaaggaatgaggccaacagacccaagttcaggcaagctgatttattgtcagtcctgctggtctacctcctgacaaaagcagaggaggcagccctgcttacagactactgcagggctttacagggcgaggaactgggtcagggtcagggagctgagttgggggtgcaggcgtcttgaccgcatcctggagatatttttgccagctttgttatgcgaggtgagcagacatgttaactgcatcgtgtaactgcctggacaaacagttactggaggggtcagtgaagtggggtttgtctttagccctgggggagctgtgaggaggtcacaaaggactgcattgtaagacccatgggaagggagggcaacagcctggttggggtgaccctaacaatattttctcttatgattttcttaaaatattttcttttccctagttttattataagaatacagtttataatacatataacatacaaaattagtgttaatcaactgttaatgttattggtaaggcatccagtcaacagtaggcattagcagttaagttttggggagtcaaaagttatacaggtattttcaaccatgagggagtttggcaccccagctcctacattgttcaaaggtcaactatagatacaaaaaggctcaacaaagttctagcaccaaatccagcaacatacaaaaaagattatacaccatgatcaagtgggatttttcctaggaatgtaaggttggtttagcatccaaaaatcaatcaatataatacatgtatcaatagaacaaaggggaaaacccacataagcatctcagtagaggcagaaaggtcatttgacaagattcaacaccctatcttgataaaaaacaaacacttctaggagtagaaggaagtttcctcaacctgataaagggtatttatgaaaagcccacagttaacatcatagttagtgctgaatgactgaatgctttcccccaaagacaggaacaaggcaaggatgtccgtcctcaccacttctattcaacattgcactggatgttctagccagagcagttaggaaaaaaaataaaaataaaaaaaataaaaggcatccagattggaaagggagtaaaactatctgtatttgcagatgacatgatcttgtatatagaaaatcctagggaatccactaaaaatactattagagaaggccaggtgtggtggctcatgcctgtaatcccagcactttgggaggccgaggtgggtggatcacttgaggtcaggagttygagaccaggttggccaacatggtgaaaccccgcctctactaaaaatacaaaaatcagctgggtgtggtggctggcaggtgcctgtaatcccagctactcgggaggctgaggcaggagaattgctttaacctgggaggtggaggttgcagtgagctgagatcgcaccactgcactccagcctggatgacagagggagactctgtctcaaacaacaacaacaacaacaacaaacaaacaaacaaacaattagagaagagcctgcaagtagctgtgaattccctttgcactgactcctaggggctctacatgctcccattagtctactctcactcagtcttatacaattaatttaaaacttctaggtgattgcttcttatttgcttgtatgcatttaagaaaacttatgattttgtagtttatctgggtttttgttgttgttgttgttagggtagtactgagcctccttctagcattctggcttctagtggaagcagaacatctccttggctttttaaccttctgtgcatttcacagagaaaacgtaattcacgtacacagctttccttcgtcatagcattgtccagcatgttacagagtttgccatactaccatctttgcaagcgataccagaaaactgggtctcaaagtttttctctgtgcttagccagatgtcaaggatcttgaatgttaaacaactgtagttcattttcaaggatgctcagcttgataaaatgcttcctatcatttgttatccaggaaccaactaaggcaaggacctctgatgtcagggagtctgggtagctggcctcttatcagggcttcctgtacttctcagctatggctacaggccatcctttgtgttccaaaggctcatgtgtgttccctattaaaaaaaaaaaaaagcttcaagtagcctaacatttctacagaaattacacttaattaatatagctaatttaaaaatctttgccagatacttgaaatcattgaggatcaaaatcgaaatggtcctgcttgttttggaatttttctttgaagggtgaggctgttatcacattggctccctttsgggtgttagtgaatatgacccagccagagggcctctgagcccaaatctggcaccatggaccagctcttcccaaatgagtgtaagtgctctttctgctgattgtgagaaatggggattgattgattttaatgagtctgaaaaggaagactatctcattgtcatggacttgtgaaattaaagcacttatttcatactggcaggcaataattattataatcaacttaagagattttggaatttaacacactgacattaccaaagacatgcatatgtaattcacattaacaaagccaaaaaaaaaattagctccttttggagcatcttgctggtaagtggcaggaccaggatttgaacccaggtggtcttggcctcagagtctgagttcctgaccactgctagtctgtgctgagtgctctccaagctagggagtatctcacagaacctcagagcaggaggtccccctgggcctcatcagcaaggtgcacagtcaggagctaagacagctgttctctctctggtgtcacctggtcactgtgctctgcttccctcctgtgtctataccattcttctgcttttctctgcagatcagctctttattcagctgtggatttagagagtggctggatcttgggatgggggtagaagtccttggggaagagggctttggggtgaacagtcaccctaaaacaagtctaataacttgggaagtactggcattatgctttcaacttttagaatcattaagaatgtaaaatacttagacggttttacaggctggcctgggaaaaacaggaaccttgccccatattcagtgtgccacctcccctgtgtgactgcctaggtgctcgggcaccataactacattaagatgtcactggtcaatgaacggatggtatttagacagcacccaccacgaccaaggcactggcccgggcatatggcccacaagctgtcatggggagagaattatggggaatctgagggcctgagctcttaacactggctgagtcacccatgggtccctgctttatccagataacaaatgatctgaggggtttggagaggacgcttgtaggccactggactggaggggagttcaaggcccaatatgatagttatattaagaaagactgcaaaaagtcacaagttgatgcttgatcaattgccaatatagatagtgctgtgagagtttggaggctgaagttattgtgagcttcagtgactggaaaaagcttcatatgagatgtgacttgagctgatcttgaaggaaggaaaagatttagatagatggagaggggaaagctatttaattggcgggataaggggaatagccacttttagagattgcattggtctttctgcactagttgtccaatttattgtagtctctgcctaggcttccatggtcaacaacccttccttggacaacaaagctcaacagtgagctttaccttgaaagaaagaatgacctcaagcttgaaggcagacctatggtgtctcactgtttttccttcctcatatagatccttttctaggagttaagagattgggaaaggctagaggatatggaaataacatttaaaatgatgttattggctgggttcagtggctcacgcttgtaatcctagcactttgggaagccaaggtggctggataacctgaggttaagagtttgagtccagcctgaccaacatggtgaaacctcgcctctactacaaaatacaaaaattatccaggcatggtcatgggcacctgtaataccagctactcagaaggctgaggctggagaatcacttgaacccaggaagtggaggttgcagtgagctgagatttcaccatcgcactccagcctgggcaacagagcagaaactccatctcaaaaaaaaaaaaaaaaaaaagaaattttagctaccatttatttcctgccttttagtgtcacaagttgtgctttattatgtacatttttatttaattaagtttaatggtaagtgcagtctatttatatggaggagaaatttgaggcttaagcaggttaggaagcttgcccaaggtcatagcaagaggaaacgtcagaatcaaaagtcaggtctggctggctttgaggcatttgaatgctcacatttgctttaatttcccatgacaaagtgatatataaaccagtaaatgacaaagtgctattactgagttttgaaaaatcttttgaaaaaatcaaatagaaaatgaaagcattaatccctgaatcttaagtattttatgagccactcgaaaagttggcttattaatagtcactttcttccaaagaaaaactgttagctaaagctagaggatttactttgtagtctttaaacatgcagaaataatacatacataattcttaaataaggataataagcctgttaaggaagaaatgtttgcctaattgcatttcccatgctaagcactagagtcttaaacaaacaaaaagtctaataatctaataaagttataacctcccattatcatggcaaggtggcagcaccactatgcacttttatttagtatagaagactttctgtatttagaggactttactgtgagggagttataagtacaaactgtatgcatgtggacaaactacaggtgttcaaaatgagcacagaggcttagaagagttgcctctggatttctttgttcagttatttgaactgaacctgtccagcccaggttttggattgtgtgtctgtttttttctacctattgttagatcagttcacattcattttagctttctctttcaataccctgggaagctagaattaattaaattgctgtggggaaagaggtccttctgcctgtttctcctctttaatccccaatttaagactaaccatatttcatgaaggcctgcgggagctgggcactgggccaggtctaaggatgggatatgaaggagtggggataacccctgcccatggccataggtccctaggggccagaaccaggccaccacctccactgctgcagccgcagcatcctgcgcagctcctcaggtgtaatgggggccaggaggaatgaaggaatgtccttctggagcctgcggtctaatggggaggtagacattaagcaaacataagacagtatttaggcaaagttagccatcattcccaggtcgctcgtggagtcccaagcctccccagggttctctttcattgttgggctgatgttgtggtctcctggcctctctactctgggctccagttttcacagtggctgcctttcttttgcacttggttggtttagttgtgaaatccagctctttctcccagtgtctcaaaaatcatgcacacagaagattgggggggacaaggtaattttccgaagatgggagagcaaatgtttaccgtctagcaacacagacactttgaaatggagccggaggcatctttgtgtcaaaagtgtcccctggccaccctagccctcagggtttcacaggcccttaccctcaccaatttactggcacctcccataccccatagcatctttctctttcctcttttttctcccccgccgtgaagagggtttggtgcaggacctagactagaatgacaggccttatgaactcttgcattctcatcctcctattcttcattccattttatttctattgcaatatttatacctctagccttgcttgcaaaggaggaacaagcccgcaggctgtgaaatgggattttagaccttgacatattctgcagaaatgagaaggaaaattccactacacaaacctcatatgtgaggtgaccattttctccctcagtgccttgggaaaactgacccagattttaaaaagaaagatcatgtttcctggtcattttctgtggctttgcagtagaatctaaaaaagmagcagaagaaagagggaggagaatgagcattatgtgatatttcataagggtttcaaaacctctgtttataaaactaacatatcatccatatttaaggtttggaagactcaagatgtcaattcttcccaaattgatccatgaattaaacacgacttcaataaaaaatctattgtatatttttgtagaaattgagaatcagctaaaagagatactatagtaggcaaaaagaactataataacaatttttttttaaaagagtacatttggaggactcacattacctaattttaaaacttactttaaagcaaagtaatcacgacagtgtggtattggcaaaaggatagacatatagatcaatggagcagaggagatattccagaatagtatcatacaaatatggccaaatgatttttgacaaaggtataaaggcagttcagtggagtatgatgtagtggcaatttcaacaaatggtgctggaacaattagacatctgtgtgcaaaacaattgaatccttatgtatacctcaccccatatagaaaaattcactcaaagtggatcatggacctaaatgtaaaacctaataaaaaatctgttagaaaacataggaggaaatctttgtgaccttagttggtcacaaagaccaaaagtctggttcataagagaaatttgatttaagttagattttggtaacgttgacatttttttttctctgcaaaaaatactgttaagagaatgaaaagacaacccaccatctggggaaaaaagatttgtgaataggctgggtgtggtggctcacgcctgtaatcccagcactttgggaggccaaggtgggtggatcacctgaggtcaggagttygagaccagcctggccaatgtggygaaamcccgtctctactaaaaatacaaaaattagctgggcatggtggcaggcgcctgtaatctcagctactcgggaggctgaggcaggagaatcgcttggacccgggtggcagaggttgcagtgagccgagattgtgctactgcactccagcctggacaacaagagcaaaactctgtctcaaaaaaaaccaagacttgtgaatagcatatctgacaaaggactcgatccagaatgtataaaaagaactctcaagctgagtaataaaatactcaaatgacccaatttaaaaatgggcaaaagatttgaatggatactttatcaaggaagatataagatatacagatggcaaaaaacacatgaaaatatgctcaatatcagtagtcatcagtgaaattgtgtacctgttagagtgactaaaaaaaatgaygataccaagacatggtgaagatgacaagggactggatatcttacacgcactgttggtaggaatgtaaaatggtacagccaygttggaaaacagttggcagtgtcttataaagttaaacatacatttaatatacgactcagtaatcgcaacccaagaaaatgaaaactcacggtcactcaaaaatctgttcatgaatatttatagcagctttattcttaatcagtaaaacctagaagcagggccmggtgtggtggtggctcacgcctgtaatcccagcacttttgggaggctgaggcaggcagatcacttaaggtcaggagttcgagacagcctggccagcatggtaaaaccctgtctctgctaaaaatacaaawattagctgggcatggtggcttgcgcctataaccccagctactggggaggctgaggcatgaggattgcttgaagtcgggaggcggaggttgcagtgagccaagatcacgccactgcactccaactgggcgacagagtgagaccctgtctaaaaaatacaaaatgaaactggaaacaacccaggtgtccctcacctggagaattgataaactgaggtacatctgtccagtggcatattcaataatgaaatgatttattgatacagatgataatatgaatacatctgaaatatattatgctaagataaagatgtcagattcaaaaggtacatactaatctttctatgatattgggaaaaggtaaaactataggaatgcagtgatttccaggggttaagggtgggtgagtggtttgactcacaggggcaatcaactatattgtatcctgattgtgtcgatgcttaaacgactccatgcatttgtcaaaactcatagaactgtattcccaaaagagtgacttatactattggttaaaaaaacaaatttaagaagaattagcaaacaaaaacaatacagaaaaaataatacatgctcattgttcaatatttggaaaatacagaaaagtacaagaaagaaagtctataatcccattttctaataataatcagttaccttttgagctatatcyctctagctttttgytcctttggcatttttacatagttaagattatatgatctagctttctttatatgtataatacatattacagatagaattatatagattatattctgcttatgaaaactatactgtacattcaattatattgtaaattctattaagacatctccatagataatattttaacggctttataattttttgctacatgatttcaccataaattacgttgttcatataggttattcccagtttcccaatgttatttttaagatgcaaggagcatctttagtcagaaatttttgcacacatttcagattttttttttctttctgtttttgagatggagtcttgcactgtcgcctgggctagagtgcagtggcaagatctcggctcactrcaacctccgcctcccaggttcaagtgattcttctgcctcagcctcccgagtagctaggattacaggcgcccaccaccatgcccggctaatttttttgtatttttagtagagacggggtttcaccatgttggccaggctggtctcgaacacctgacctcgtgatccacccatctcggcctcccaaagtgctgggattacaggcgtgagccaccacgcccrgcccatattgttttacaagtagaattctagaaaatattattggattagagagtgtaagtgtgaagtttttaaataygttttggtcagattgccttctgggaaacttacacccatcaacaggatgtggggttcttgttttcacttgatctgtttatcagcacttgtgattttgtatgacatatgagctaatgacagaacttacagggttgttttaaaacaatgcatrttaagggaatgatgccgtacctgtaatattagccttctggtgatgcctatttttattgtttcttatttgaatttttgcttgtttgatagataaatgtgttattgtattcattttaatgaattttaaaaaattatgagtgaactctaatgattttaatgtttttattagctgttttattaatatttggcttgggaccaaggtatttgtgcataaattttttaaatgttaaagttattaaacctttcttaagtttatagaaggtttttttattctacagttttctgtttataattttgtttttgatgtcttttaacataaaaggtttaaaattgtatgtagtcaaatctatagatcttttattttgttgttttataaccatcagcttagctgagcctcaaaccactttttaaacatttttttcttctttcccttttcctcttccccctgtccgtttcaagatataactttgacacaaactgcatgtatgttacctctcatcttaaaagacagcaatggaatgtgctgtgaacctccactccctttcctttcccatactatactctcatgccttatgaacatttatttacctaatgcttattaagcacmgaccatgctgtcttatctggtcatatatttccgtagaagcttcaggagtcagatcctgatagggaccaggcacctccagaattctctcttcaacaaaagattccttcgaggatggaacccacacccagctgaagactgactaatttacaacctggcaggatccacaaaggtgccagccccttcaccaaatgagacaataattcaagaaggccactggagcaagtctcgccacctggcatctcataggcccatttgcctcttctactttccaagctctttgtttaaaaacccccatgttccctccacaaattgaagagtggaattgctttctactcttcccctgctagcacggataatacaatctcrctctctcttatcacaagtcgtcattatttttgacttctttccacaaacggtgagcgctaagactcttttgctggttataatttcttctgttgcttttattttattttatttattttgagacggagtctcactgttacccaggctggagtgcagtggtgcagtctcggctcactgcaacctctgcctcctggattcaggtgattctcctgcctcagcctcctgagtatctgggattaccagcacctgccaccacacccagctaatttttatatttttagtagagacggggtttccatgttggccaggctggtctcgaacytcaggtgatctgcccgcctcagcctcccaaagtgctgggattacagggatgagccactgcacctggcctcgtctgttgctttttatatccttcctcaagtaaagaataagtaaataatcatcaagtgtttttttttaagtatcttttagtggttttatttttttacacaacttttaaatttctgatatatatatatatattttgtctatgatatgaggtgagactcagtttcctcggtagcatttattaagtatttcttcattgattggcaatgcctcactctttacatattgttatttttgaatttataatctatttcttggtcttgtttcattctttttattttattagtgctaacataataactttaaaatacctgccaggagaaattctctttttcaagcatttgtttttttaaaaaccttttttttgagacatggtctccttatgttgcccaggcttgtctcgaactcctgggctaaagcgatctcctgcctcagcctctcaatgtgctaggattacaggtgtgagccactgtgcctggccaaaaaaccattttcttaacccttctascctctagccttttatattcttttttttttttttttttttttgatggagtctcgctctgtagcccaggctggaatgcagtggcgtgatctcggctcactgcaagctccgcctcccgaggtcacgccattctcctgcctcaacctcccgagtagctgggactacaggcacccgggaaaaacccaccacgcccggctaatttttttttgcatttttagtagagacggggtttcrccatgttagccaggatggtcttgatctcctgacctcgtgatctgcctgcctcggcctcccaaagtgctgggactacaggcatgagccaccgygcccggcctatattctttcaaataaacttgataatcatttcattaattccccccatccccacaaacttactgtacttttaacaacaacaaagaactagctctaattactcaacagagtagtctctaatcttgaagtgctttctagtacaactgctttgggaaaagatttgacagtttcttataagttaaatatacacctaccctttgactcatcaataccatttctagatatttgtctgagagaaaggtaaacatgtctacacacaggsctttacatgaagattcacagcaacttcatttaaaacagcccaagttggggaagaacctgaatgtccatcagtaggagaatgaacaagcagtagctgtccatacaatgacatgaaactcagcaatgaaaatgaatgaactactgatacctactgtggatgaatctcaaatgcgttatcctgagagaagctagacacaaaagaatcaatactgtattattaacaccatatgatgttttggaacaggcaatactagtctctatcgaaaaaagtcacagtggtggttgcctgggaaccagggttgactgggaagggacttgaaggtatcttctggggttatggaaatgttctgcatcttgaaagagggatgggttacatggatgtattcttttgtcaaagctcaccgaaatgtatagtttcatatttgtacatttttatccctccccccaaattaagttaaaaacctttaaaaaaattttttttttaaaaaagtcttccagtttcttgttggccaatggcaaggcttactctgaaattttagcttgaatgatacaaagatgagaagcttgtgtaaaaacatttattacttgctgattggctatttcacaytgtgctctttctttaactatggaaacacattattaataaataccattaagcatgaggaaccaaaataaaatgcatcaggaaaaggcagcctctctctgagtatatcatcctctctgcacggcagtttgaaaggtgaactcactttccccaagtggtagtgagtaggctcttgatcacatcatgacaggcaaagaatatccttgtttgagaatcagactatacttgcacctgatcttcaggagtcgttcaggaggcgctctacatcctgtctcaggatctgaacctttaccgtttgccgtgtcaatttaaggtgcctgctcagatagtgaatcttactggctgcagcgttaagcctctggattttattactggcagcctagagaggttagaagagaaggagggtagaattgtggcctggaataagtttttattttttttttaaatcatcctttacaaagtttatccctatcgttttattttaagtatctggtggcctgatttgtgtcttgtgatgatgtgatacttctaaaaaaaaaaaattctgattctcattgaggctaggatgtccctcgctgtcatcccccagttttccttttgtttctaaatgagtacgtctgataatctgctggggctgtaatcctgtgagcactcaccaatcaaaaggatcaactctcggccacgaaatgacctcgagtgaacttcagggagattaaccgggagaaaggattgaacatttctgtgtgagtgcagtgcctagagagaaatggagagcgagcgaggtggcgccgtttcctggaatccagtcgtggtctggtgcatgaagtgtgagcagcaagatcctagatactcaccttacaccttggtgcggataacagaggcagagatgagggcctatcaccgtttagtaggaagttgcatcaggctggaatatatggcaaaaaaaggtagtgtggaagcaaggatgcatgtgttttatgtatgtgttttatttctcctcattcttagcataatgatttaaagcgaagaaattttacattaaaaaaaatcttactttgcagtaccgtctcaagttttttgtgaagaagttttaaaatgacttttttaaaaaaagcattaattagctattacaatattgtagatggtcatttattgatatgttcataggtagattcataataaaaacattttctgaaaaattaggttataatatggaacgtgtaagtatgagcttgttttgaaagcctacatatgtctgcacatacatatatgtgcactgaatattgtataccaatgagataactacttaattttggttgaaggaataagttttacttaattttgtttggttgtattttctattttttaaaattaccaacatatcttgcttttgtccaagtggtagtaagtaggatcttggtcacttcatggcaggcaaagaatatccttcatttgagaatcagattgtacttgcagctgatcttcaggaggagttcaggagacgctctacattccgtctcaggatctgaacctttaccatttcaatatttctatatttcttctattaaaatgaaaataagaatccagattatgaaattcatattcctgaagaaaaatgtcaagtctgaaaggcttcatgttagatgcatgaactgataacagactgatggtctcagagtagaaaaagaaaagcgcttcccttcgatgggctggtgagaagaatcatcatttctaagtgtgctttccgtgtacttggaagccagcaggacagatgttctcaaagctgaagcagctacttgtttctaagactgcttcttttagaaatgcacttattggtatgctcccaccttttttatttttattttttgccttgaaaatgtttataatacatttattccctttggatcacaggccagaaaaggtgattaaagcaaatgtcttaggctctctcattactctttatacttggaacctgtttcttcaacagtgggaagttattaaatgaagtgtgctttaaaaataatcattgttgcagtatactttctgattgagacatgattcatagttatataccatatacttatatagtagataatgcataaattatattctcaaaggcaatggctattatatatttgctacttagagaaggacaacttgttagattttgctttccatatttaaacatgtgtgctcacctgcgcatgcacacaaatccttacaaggcttgaattgaagtgtatatatatgattgccctaattttattaaaattaaattattacaagagctttccaactctgttagtagtgaggagaggaaataatttgaaagaagagtaagatttccaaatcctaagctcacagcattatatatgccttctttttttccctactaaagaagattatgaaacattcacctatattctttagctgtcagtcattttattctgtgactcaagacaacagtgaaagttgagtatgttaatgtaagttttgtgagtatctaaaagacctttctgacattactgccacgttatattcatgagatactgtcagctgacttttcggactaaagcaacactgattaggggaattaaactagagataacatgctgattggaatatgcgttaataaagacccatagtttatgtaattgttggggagtcaggagagttagcaattgggtgtttgcttttccactgactgtccctcctcccttttttctttttttaaagaaaaaagcatattatatttataacatatgattataaatatattatattaatattataaaatgaattcctctaagttagagtagcgccagctgctgtaacaaacacccaaatttcaatggattaatagattccaatacactgtcctcagtcagagagctgtcttctctcagtgttttagggaccctggctgcctctatcttgtgggtctgccatttgcaatacttggagttgtcaccttgcagcctgggagagggaagagagagtggcgaaagcaaacttgttttttaaataccctagcttagaagtaagacatcatttttgcttacctcccattggcattcacagtcacatgacaataactgaaggtaaaggggtgggtgggagattgagtccctggctagacaactgcctttcagtggtaaagctactgtatggaagaggatctgtgacattttgatgggcagttagccatctctgcttcaatggctcattgcaattgaacttaggcagtacctctatacatatatacatataaacataaacaacattctgttctctatctcactttctttttaaaaaacttaatgtattttaaacctcctttcctgtcagtagcatagatgtatctgattttatttaatgcctccgtagtattctatggctttatcatcatttatttaaccaatcctctattaatggtcatttgcaacaaaagaacaagctataataaacatcttcaaacccatttattttgtacttgtgttaatattaccttagaaatccctagacatggaatttcttggctaaaatgctgcatatttcatattttgacagattttcaaattaattaatggaaagattgtacctatttatattttactcatagataatctgcctacactcttaccaacccaatcttattcattgttaagataatcactaatccatcaggcagaaaagatctcattttgttttaatttagatttctttatccatggtttgaatgtatgtggccctccaaaattcatatgttgaaacctaacccccgaggtgatggtattagaaagtggggcctctgkgaggtggacaggtcatgaggaatccacctttgtgaatggaattagtgcccttataaaagaagcttcagacagctgcctccctcttccatctctcctgccacgtgaggactcagtgtacacccctttcgcccttccaccatgtgaggatgcggcaagaatgcactatcctggaagcagagaggaagtccttgccagacacggaacctgctggtgccttggccttagacttcccagtctccagaaccatgagaaataaatttctacatttgtaaattacccagtcgaaggtattttgttatagcagcaagaacagactaagacttgtggttaaacatgtttcaatataaatttattggctatattctatgaattgtctgttttcagtctatgcctattatattagtttcctgtgtctgctgtaacaaatgaccataaaacttgatggcttacaacaatagaaattaatttttctcacagtcctagaggccacaagtccaccatcaaggtgctggtagggccactctctagaggccctggggatgattcagtttcttgtctcttctggcttctgggggctgtagctatttcttggcttgtggttgcatcattcagatatctgtctccatcttcacatggttttctccatgtttctgtcttcctctgtttctctgtctaacctcctttctcatctcatcatactattccatattattgcatgtatactgaatatacaataataataattattattattgttttgtccacagsaccatttccagccaataggcttcactgtttatgggccagtgatatgtgaattaataataaatatatacagaatccataagtcattacttattccataaaatatattttttcttgccttcatgtcagcaaaatcagtgttggtatagctgagattttcactttgaactgttgagaacagtcatctaaagtcaatgtgatctaagtaaaatgtaattgtgtttaacaagttcaaactttgagtatatttgcatgatgaattaccaaaagaaaactaagagcattgatgcttggttctattggactggctatgtcattaccaaagaatctacagcatcatgctatgtgagaggaaggatttctcaagttaattcatttattttttctcttatctaagcacttccacagttcaaatcctccctgcactctgaagcagtgtgtgtccctgatgtcagcagtggtgcaacccacaaaccaccctagcatttggatgcggtcrcattttcttttgaggacataaaccaagagctgtggagtatttccctgggtctgagcagcgttaaaagagtagatttccagggctatgtgcacctgccagcattgagcactggaccatgagtgcccagggcagccaagtgttctttaatacatatgttcatggggggagggtgtgagatactgagccctccaaagtgagggtctgggcaggyggtgccacraggaactttctggaggtggggggaggggaatattccatttctttctttctttctttccttttttttttttttttttttgagacgatgtcttgcgctgttgcccaggctggagtgcagtggcatgatcacagctcactgcaacctccgcctcccaggttcaagcaattctcctgcctcagcctcctgagtagctgggattacacgcacgtgccacgacactggctaatttttgtatttttattggagacggggttctaccatgttggccaggctggtctcaaactcctgacctcaggtgatcctcccacttcggcctcccaaagtgttgggattacaggcrtgagccactgcaccccgccgaatattccatttcttgatctgtttgatggttacatcagtgtatatttgtcaaaattcctcaaactgtatgcttaaggctttgtgcattgtattgcatgtaaattatacttcaataaagtaccaatagcataaaaaataaaggctaccagtgcatacttttccgtatgtaaactaaaggggtaaccacatataattccatcactttaacacaactgtttcatatattcttttctcatacacccacacatatgtgcataaacatatcacacgcttggttttttctttcttttttaaaatctgactataatytcaccacttgtaggatttttgtgtccttgacattgtatcttaaatctttttcggtgaatgtgggtctttatacttgtataatgattggttccattttttcactctggtaaaaacatcacagtctatgccattacatataaagtttttattatgttctcatgatacattttcagatataggatgagtgcataaaatattatggagattttaatgactgtaatggttaagacgttgggctttggaggtcagaatgagctggattcaagttctggctctgcatgatcttggacaagctacttcaaatctagttcaatatcatccttagagtagatttaaggattaaatgaggttgcatatataaagtactggtatggaatcgaccacataagtgctcaataatcaccaggtaaaagattgagaaacgactttccaagaggatgctacctgcttcactccctgaggttctgcagaagtactgattttccaatataaccccagcattgtgtattagaatctcaattattttatggatgaagtgagatattttgttgctgtttaagtttcatttgttgatgactaggaagttggacattttctagtgttcttgatttttaaaatctttaaatttccttctaaacaattattctgtctgctttcaaaagcctttacttcattattcattatggataagataaaagtcactgttatggggcaggttaagcatcgctatagcgcaggacccagtaaaagaaggaaatatgtttgtgttatttctgacctggccaataaaacagagcagtgaaatgcattatgccccatgggctggctttttgtaccagcccggcaactggtgtctctgagcctctggtccagagtttcctcagtggtcaagtccagtctggttgtggaggtaggagggtggggcgggctggaagaggttcatttgagtgttagggcacattccttttctgtcattgtgcaactgattcaaccagttaatctgtgacgtgcaaagttagtgtccagctcacagctggtgccctattcatgttattaacagttagggtcttgttacacagcgcctgagagcagagatcctggttcatggcttgttacgcgttgttgcaaactcagttgttgagatctagtttgatcaactggcagatccttctgttccttctgtccccttgagtctctgggcaaagcagtaatgtcacagggtctgccaaacttggggcagctgttctctgctccagaccatactttttcccccttaacctaggtatttatttatttagttctttttctttttttcccctcagatcatacttgaatcttttaaatcatagtgtgacagaaatttcagaagagcaagagtgggaggctaagggtctcactgccctttatcctttagcagttgcagcagtcagacagtgttgagatatcatcagccctgtttcctgccctctgttgtaaggaggatggctccagtcattagcaaaggtcctggctccagagcgcatgctgctctctcagcctgggaagtgggcaacacagggatattgcttgctgcctgcagtggaattcccatgggacatgctggactattatttcatcgcgtaagagtctggaggttgtgtttggcctttgataccgtctgtatttctggaactgtgggctcagggtaaaatagagtcacacttctgtgtacttatcaaggatagaaaagagacaagtttttccctagtatatttgtttgcccaggatagaaattgtgttgaaattgaattatcacttccctttgccttgtgtgggtaacaaagagacaagtttctgccaggcgcaatggctcacacctgtaatcccagcactttggraggccgaggtgggtggatcacctgaggtcggaagttggagaccagcctgaccaacatggagaaaccctgtccctactgaaaatacaaaattagccgggcgtggtggcaggtgcctgtaatcccagctactcaggaggctgaggcaggagaatcgcttgaacccgggaggtggaggttgcagtgagccgagatcatgccattgcactccagcctgggcaacaagagcraaactccaccttaaaaaaaaaaaaaaaaaagagacaagtttctccctaatctgtgcatgccaaaaatggcaaagaagcaggaagcctccacagacctytgtgaggccagggcaggtgtgtaacaggcaccagcgccttggtgggtcayggttctgctcacctgttcctgggagaaggaaaaacccttttactggtgagaacactgagactcagagtgtacttgccctgatcacctatctagaaggtggcagaaagggcctttgcatgcaagcctgtctgaatctgaagcagatcctttcccattgcagtggaggtgttctttcagaaccaaagacttcttgtacttcctcccctacctacctatacaggagtgggaggcagggcctgccagccgcagggtgatctttgtgtctcttggtgtagagcataagtgtactttactgggggcagaacagagcatgccctattccaacaggaccacaagtgtcaggcaactgaaggctgggtgtatctgcagtcatctccatgccgagtcagaggatgagtctgggaaagcctcatgatctgttgcagctggccaggttgggtcatgtggctcctttgctaggaagacttcaaggataaccatgtcacttcctggctggagagcaagcactctcagcaaaacctgcacttaaagcaaagcagctcattgctattcttagaaaaacaaattatgaattttagtcctgttcatttgatagccacaggaggctagcgagaaaggtctcttgtcgggggctggggggatgggcaaacctcagattcccatgacactagtcagcctctcagggttgcaggagcctttgcaactcaaggccaagggtctgggaactctatcacgcgtggccgaggtttgccctcttagcgtcaggtgatccgggctctacagttatttgttgtgtaaccacaggcaagtttaggatctctctgggtctccatgttgtcatttgaaaaatgagatggcgtggggatcgttgacttcgctaatgtctgctcccctttcagatcttacatctttaaaatgtttaatttaaagcacacctcaaatattgacatgtaagaacaataaattacaccttatgatttttgtttttctctcggttcatcatctctgaaatatgcttgcttggccaggcgtggtggtttgtgcctctaattctagcactttgggagcccaaggcaggaggactgcttgagcacaggagttcaaggctgcagtgagctatgattatgccactgcactctagtctgtgtgacagagcaagatcctatatcttaaaaaagagaaatcaaaaaaatgctcaggtatgaacaaataatactgaagctctatttctgagtatgccactgtcctagaccactgggagattgtactctgaaaactctttaattacataacttccgtttctgctgaaattctctatgttgttgtctacttgtgttttacattttattacagaaaatttgaaacgtagcaagagaattatgtaacaaacccctgtggacccatcaaccagcttcaataattatccacattttgtcagcatgtttcatctaccccccacttccacmccatgcatagttttagtgaaggggagtgctggagtatttgtcagcaaatctcagacttcatatcatttcactgttaaatgcttcaatttgtgtttctaacagagaaggccccctttttataaaatgtgactaccatgccrttattacacccaccgaatgaacagtgacgaaggagttctttgaacttttagtgaattcagggtggaagtggtattgggatgaagaagctctggtctagatttatcccctttacccaaaacaatgggggaattcattgaaggggatcttggggcttaagctggcacttggcccaccccttacaagactttcagaaaaaaaaaaaaaaaggcttttagaaagcaaatttgggaaaggcctgtctgttcagaacaakggatataactagcatttgctcagcaccctctatatacatctccatatatattatctcctttaacctccacaccaaaaagctgagagtagaccaagactcagagaggaccttcccaaatattaccttctgattggtcaacactagaatatcataatgttaccatgaccccataatgaatcagtaggaaattcccacctagcatcagagcacaggttgtttggttcatgccttaatctaactagatgtttaactcctgtagaaacaataaccagttcattcattttttgttattgtttttgttttgttttgttttgttttgagacagggtctccatctgttgtccaggctggagtgcagtggcacagtcatggctaacgacagcctcaaactcctagactcaagagattctcctgcctcagcctcccaagtagctgggaccgcaggcatacatcaccatgcttggctaatttttaaattttttgtggagacaagatcttactctgttgaccaggctggtctcaaacttctggcctcaaatagtccttccccctcggcctcagtacccagccaccagtttattctttaagattccctgggaaataattgaatgaagataatatcttaggcagagataacatgaaaatgccttcctctcttcagcctaggttgaaagattccagttggtcctcccctctctctaattccttttccccaaatggaaatgagggcaaatcacagggcttataagtcactttctagggttagaggaactttgtagatttgtgcttgaaaggattggatttttgcattggaaacctatataacttattattcagttaggagaatctttaaatagaaaaatgaaaaagtgccttcttatatacatttagcagtaggaagaggccccttaaagtattctggaagggggaaaaaaaggaatggagataagtaggggaggaaggaagtgaggtagggaggaaaataaaaattaaagaaccctcatgaatcccagattgattttatgacctgttttgaaaggagctctagtaacttatgttgtttgtgtttaaaatgtccttctgcagacccaaaggtgtaggcaaatacctgccttcgtaatgaggtcatccagcaggttttctgtgaagctgctggagcttaaacttcagggttctttccttgtattggtccctcccaaagccttggtaggggctctagaaatgtgttccatgctcagatgcataagctccaaagcacacaaatccagatacagccctggatctcagcaatcaagttctcaagggaatgttgtgccagcaccgtctcttgataagtcccagatttcccaatagtacaacttgcctttgtttctttttaatttcttcttgtaatttgcacatgtttaactaacccactttgtatttcatttgtgcagatgaaattatgcagcaggaagtcagacccctgatggcggtggagataatagaacaacttcacagacaatttgccattctttcaggtaaggggcacattcatttgcatttccagattttgatgggggggtcttgatgggaaggtccagcctcttgaaccttgaggaatrttatactcaaatctcactcaccccttaggcttcacccrggactagaacaggctgaggcctatcctgccagaagagggtgggatctcatacatattattccctttgctgtttggtgcaatctgatctttcccaaaggagcacatttctttgtggttgtaaataacagagctgaaaagattttgaggaaagaaaaagagacaactactgacatcagctgccaccatgatgttcttccaatgttcctttggatgttcttccaagattcagccttacaaaggtcttagttctaagggttcccgagcgttgctgaggttgtttgttctctgggagaattgtcttttactcttagctcatttaagggatttccatcaagcatttgattgggaatgaagagaggctgttctgactaaaagtctagcattttttgagcctagacacaaccctgaaaggttgtcatgacttgaatactgttctttcttattcgctcagccaaaggtgacatgactttaattactaaaactagaagtacatgccaaaccccaaattatggttagacccaacttaggagaatgaagtggtgacattagatatccttagtatataacatggagggataaagtggcaagttactcttttcaacttttacatctgttctgaaaaaaacaacaaagccatcttagttacatcacagagagaatatgtagttggtgtgaattttattctacaacatgggatattaaaaaaaaagtcacatctctttcttttctccaaatcacatttaatctgctccaagctcctcatcccactgatttgaaggagatgcgaactcagttattattgggatatttctccccaccccagcattgcctcctgggtgaccacatcttacacaatccaggacattctgggggaattctctggtctttccgccatatcagtcactgcgcacatagtcactgaaagctccataaatacagggtcctcctttttcttctttctgtctgtattgccaatgcttagatcagagactggaacataaaaggtgctcagtacaaaaatatccaagtccctgtggtctattctgcgaggccggtggtctccctgctccccagatgcctagttaggcaccattggcccctgtgggaggacctaaccagcctcctgaaggcacagtctcatggcttcccactgtgagtctgggcttgcgcaagacaaaaggcagaatggggtctgttctctgggttcctggaaactgttgctgtggccctaccacagaaggccccgagaccaccatgcagctcaaggtctggaatggatgacagggtgggctggggtcaggtagattcctagagccttagactaaagctctgaggcctcaatgcatgattctggcttatataattacacaatggctcatctcaggaatcagtctagtgacagattaattaatacatttatgatccaaatttatctcctttgagtattattgaggcctttctttctgttcttatgacttagaggcaatatagaaaaaaacatgaactggtatcagacagctccagatatgaatttggattctgtacttactagcagcatcaccttgggcaacttacttctctaaacctcagtttcctcatctgtatgatggggttattgtaacttcttttttttttttttttttttttgagatggagtcttgctctgtcatccaggctggcgtgcaatagcacgatctcaactcactgcaacctccacctcccaggttcaagtgattatcctgcctcagcctcctgagtagctgggattataggcacccgccatcatgcccggctaatttttgtgtttttgtagagatgggctttcaccatgttggccaggctggtctcgaactcctgacctcaggtgatccacccgcctcagcctcctaaagtgctgggaytacaggcatgagccaccacacccagccagtaattttgaggattaaatgacataatgtatgaaaaacacttagtattgcaactgctgaataagtgtttctctttttttctgatatctttttatagttctataaaatgtttattttggggttctattacaagtaagataatttttataaggaaccaatgtcatgctcacaataaatatggtatacaatgccaccattgagtcaggaatagagataattgtcactccctaacgtagaacagagaactgtggaaacacacactgggcgcagaagacacttctgctttaggaaggtactttgaccataataaagataacccttcatttctgagttccttttgtcatttaagtttgtcttctttttttctttgctttttttttttttttgagacatggtgtcgctatgttgcccaggctggggtgcagtggcaccgtcttggctcactgcagccttgacctcccaggctcaagtgatcctcctacctcagcctcctgagttaactgagactacaggcaggcattggcgcacaccatcatgcccaaaatttttaaattttttgtagagatggggttttgccatgttgcccaggctggtctggaactcctgggctcaaacagtctttccaactcagtcttccaaagtgctgggattacaggcgtgagccagagtgtctggcccaaatttgcctttcttatgaagcagaagcatggattcgctgtgatagtaattacagccttgcaagtctgcaagaatagcggcagccgtgggtctctctgagtcagcactttgtttggaatcagaggcctgcttttcatctttaaccatctctcttattctggcagaaacagcaagtgtcagcaaggaggctgttgtgggggcctgtatagttgttgctgtaaaacagaaatctctctaattaggtcttttcccatggctgtggtagcctaagagctgcagcctcagcctcaactcatagcagcttccttttcctgattcaggcaagtaaggtaaagattttccctacaaaattttctaccaatttcactgatctctggaaggagccagagaccctgtcaaccgggaaggctgtgaaggagaggatagagcctttccctcaatgcagccctagctgcctggtctgctgaactgtgcatgtgttcccacggctggtagaagagcagaggctcattacatgaagcctgacccagatttgtggcccgatggtttgcggcctctggatgcgaagcctgtgagcagggccaccagcgggaattggatattgaccagggctggggcctctggtagctctgacgttggaagacacctgcatgttcacagtgaacttgggatatttctaaattcagggcttagctaggaaacaagagagtataagcaggttagtgtggtggaaacactctgggctttggacccagacaattctgggttcacattccaacacaaccagtaggtggctccaaaccccagtttttcatctgtaagaagaaaagtttcactcagcatggtatctgactacaagggaacttagcctctgagacttgttggtttgttttttaaattgcataacgaggtctgacgatagaaactcttggtattggatcagtggctcaatgacattaaggctgacatctttatgattctcttgatgttttcttcttatttgtcaactcttgattcaaggtggctgctgcaattccagacattaggtcagtgtccaaagcaggaagaaggagaaggaaaatgctggcttctttggttctgtttgtagaaactcttggctgccttctgcttatgtctcattccagaattctgtcacacagccattccctggcagcaagagaatctcagaaggcaagcatttagctttctaactgccacaggagacggtggtcagggaaaaggggactgggagtgaattagccatcaatcaacgtttgccacagctcctttcctttaattataaggaattgtccttttatatttatcttgatggttgtttcccacttggaattattgtgaactgaatctctctctttcactttctctccctctttgctccctttctctgcctgtctcttgtggcagcttgaatccttttgaaaataattgatgaagaaatcaactgctcaatactcttaggcttgtagagtccccagtttcmcctcatacacaccaatgaagcccaggtttggtggagggtagggctcccaggggtgagtgggaggctcctaactgaaacaatggaaaatgtcaaaccaaggaagagatcggagccccaactcctagcttacatatggagctagtgacctgaaacctgggaggtgagaaccaaggggcgacatctagagcaggactgtttaatagaaatacagtgtgggccacacatgtactttaaaattttatggtaaccatattaaaaaggttaaaataaacagatacaatgaattttaattatatattttaaatttacccatatctaaaataatatttccacatgtactcgatattcaacatttttgggattttaccttttttattctaagtctttgaaatctagtttgtgttttatacttacagcatatctcaatttggactggttccatttcaagtgcttaataatcacatgtgtctagtggctgttggattcggtagtgcaggtgagagggaaggttctcagtcatgtttgactgaatatctcctttttataacaaatgatttgtattgccctctgccatcctaacataaaatttatagatactatatctgcaagggtgggctcaacaactacaacgaatatactccaaagagtatagagctccaactgtaaccaccctaggggttcaccttgcctgctgcccagacagaaccaggggaattacaatagagaaagagtaattcatgcagagccggttgtgtgggatactggaggtttgttattactcaaatcagtctcaccaagcattcagggaacagagtttttaaggataacttggtgggtggggggaagccagtgagccaggagtgctgattggccagagatgaaatcacagggagtcggacctgtcttcttgtgcttagtcagttcctgggcggggggccacagatcaggtaaacccatttattgatctggatggtgccagctgatccatcaagtgcagrgtttgcaaaatatctcaagcactgatcttaggagcagtttagggagggtcaggaccttgcagcctccagctgcatgactcctaaaccatcatttctaatcttgtggctaatattagtcctacaaaggcaatctaatccccaggcaagatggaggtctgctttaggaaagggctgttaccatgtttgtttaaactaaactaaatttctcccaaagttagttcagcctacgcccaggaatgaacaaggagagcttggatgttagaagcaagatggagtgggttaagttagatccctttcactgtctcagtcatgattttgaaaaggcggtttcaaaacacacataacagaaattaagttcttactcttttaccagttctgcatgtatgttcctggtcagcagacaacttttctccatgtggaggttcaggaatgaaggctcctttgagtttctggttcttattgttgttatgcgtgtctggggagcagacaggctaagagaacatggaaggagcatagtgcttcttaaaattctcagctcagagatagcatacagcacattccattgacttgaacttgtcacagtcatttgaacaaacttaacagcaagggaagctgggaaatgtagtgtagctatatgcccaggaagggaaaacttaggtgaacagccacacctacctatgcacatatttttaaaaattaaaaaataaaatataaggaactgtaaaggaggaatcaaaggaaactaattatagtaaagtaacatatctttcaatagtatgtatttccacatgcatgtctagctacatgagaataatgaaagaggtgcttgcccctcaatttggagtcaccaaaaatgtgatgggtgcaaatgctgggatgtggtggggtgatcagatacctggagtgactttattaagattaaaaaaaaacctcttggccgggcatggtggcttacgcctgtaatcaatcccagcactttgggaggccgaggtgggcggatcacctgaggtcgggagttaagagaccagcctgaccaacacggagaaaccccatctctactaaaaatacaaaattagccgggtgtggtggtgcatacctgtaatctcagctacttgggaggctgaggcaggagaatcgcttgaacccgagaggcggaggttgtggtgagccgagatcgtgccattgcactccagcctgggcaayaagagtgaaactccatctcaaaaaataaataaataaataaattaaataaataaataaatataaaaattctttatgattatttgtaaaaacagagtctaggttcagagcattttaaatggatttttcacttaaattaagcctctggtaagacatttggaagtcacgtagcatgtggggcaattctttgttttattatggagaatgggtcatttagtatcctaggccctgagatttccaaagtgcttaccagggaatggttctgccatttccccagttaaaaccttgtgtagaggagaaagggaaaatagatactggaaggcaaagagcagtaggaagatgctttgcaaccttccccatcattggtctttgccatcttcctgtaggatttcctgtattctcaattcacctgtgcatgaagccttcatgccagctatcaccagggccctttcagcaatcaccttatgtaccccaagcgcttaatgttttctgcactaaaactatttgtctttcacttaatgaaaaggtacaaaatcatagtaggaggagtaaagtttattttaagttatcattttacttagtaccaaataatttggggttgtttgtattccttgcattcaaggaatgcactggactttggaataattattctttcttcctattgcattaccgcgtttcctcagaaggtggcactagatgccatgttgtaggttgccccacagttaagtccagctctgtttccttgatgcttctgcctcttaagactaatattcaacagtaggtgggtgtgcacagttaaccttagggcctctctgctgttcagtattggtagtaaccaaggtagaagaaaacttcaccttttttcatttaggtgaggatggctttaatacagtcaactataaaaaggtaaaattggccgggtgtggtggctcaacgcctgtaatcccagcacttagggaggccgaggcagacggatcagttgaggtcaggagttcgagaccagcctggccaacatggtgaaaccccgtctctactaaaaatacaaaaattagctgggygtggtggcatgtgcctgtaatcccagctactcggtaggctgaggcacaataattgcttgaacctgggaggcggaggttgcagtgagcggagatcacaccactgcagtctagcctgggtgacagagcgagattccatctaataataataataataataataataataaaaggtgaaattaaatggcataatcacattctagtgaatattttagggtatttcagttccttgaaatgttttagccagtccctcagcaaatgttgattatgcaattactacagtgttataatgcatcttaatttagcttttcaaagacgcaaattctctgaatgcacatttctctgaaacttcccatagttgtgaaactgcaaagaggaagaatattattagatgaaagctgttaatatcctcatcagtcactgtaatgaggtagttcaatatacttgtcttgataaacatctaatctgtagatctcatctttggaaatttagagtaaacatataggattaataaagaggtaccttctgtggagggatgactgaccatccagacaaatctcacatggtttcgttctacagcaattggtttctgagcacctaagacccatattaacaacactcacaagagactcatgcagaaaaaccacagcgctaacttattctttayataatatacttatgtttgctcaataacacattccttttcttgaaacaartttacaatttacttggaaaatcagattataaacagaagattcttatcaggcttggagtcagcaccagagagttggctggatgatcttacagtggtgtcatcagatagactggtaacgtgggttggactctcagagtgggctggccctctctccttagaatagcattggctgtacactgcccgcctttgctcctctgagtcctcctcttctatagtttcttcgtggaccacacatcctcattaatcacacagtccccactaaccacaccccacactgatatgtgtgtctcagatatgttgaatacattcagtcatttgtagttggccttgccttgagagccatgattcctcttcaagtggtttctcttcaaggacataacttgggaggtgcatgcagcttaagctcctatactactggctagggcagaggttcccaaaccctctcaattctctgcgccttagcatctcagtctttttttcatggcccccctaggccaaaagcaataactaacatgtcaaacaacttaatatgtatctatgtcctaacaacttagtagctgtttgaaaaaataatacatataaattaaaatattattttttctctcatttttattcttaaataactacaactatcttaaaccttgcartcaaactagatatcaccacctttatgtcttgttccacattgatttgcacactgtttttgctttttattccagcaagtaccaaacccccagctttataaagatgcaacaccatctgcaagaatataatgcaatttgatgttgaagttgggaactacctgggctgggcgtggtggctcatgcctgtaatcccagcagtttgggaggccgaggcgggtggatcacctaaagtcaggagtttgagaccagcctggccaacgtgatgaaaccccgtctctactaaaaatacaaaaattagctgggtatggtggtgcacgcctgtaatcccagctactcacgaggctgaggcaggagaatcgcttgaacctgtgagtcagaggttgcagtgagccgatattgcaccactgcactctagcctgggcgacagtgcgagactctgtctcaataaaaggaaaaagaaatagggaactacctcaagtagttcatatggtagtagtagtgcatatggtgtctgacagatgtcaactgtcactgtgtttccctcaaaaatttaaaacagtcacagtgctcccatgaatttactgtggttccctgcttacctgcgacacagtttggggactgtggggctagaacttagtcaaatggctccatgcagctgcaaggggactgggaaatagaatctattgaatttggtggtctctgctctgaattaaatgtgaattttcatatttttactttcacagggatatcttaaattactatttataaattcttgaagggaagctgattattgcttccttgtaataataataattataatcatggtcaccattttttgagcagttttatataataagcaccctgctaaggtgcttctcatttgtgctgtcatttaatcctcaccttaccatgtaggtacaagcattattcctatataataaaatggtaggtcatatatatctatatatatacatacatatatatgtatatataaatatgaaagaaacacattaagtatcttgccaaaaatcatatagcaacaatgtggcaaagcagatttgacccaggctgtctgattttagcgttaactctcttaaccaccatgcaatattacttttgacatttactgactacaaaaatgaagagcaatattacatatttgtgttggcattatttactattctacctatgctgaataattaaatcagtatttccttttacacagtaactctcttcaaaggattcaaaaattgaattcttacaatgccatggagccagcatgaatgagaagagagacttgttcaaaataactgtgttaacttctcccaaattctagtctgagataatataggtaggaaaagaggtgaccgatattctttcgcccaacttccctgcagaggtgtgacaggacaacattttgctaacattttgaccacctgtttttgttgcaggaggccgaggggaggatggcgcccccatcatcacgttcccagagttttcggggttcaaacacatcccagatgaagacttcctgaatgtcatgacctacctgactagcatccccaggtgagctgagcacagtgtcctgccgccttaggcactggctttattccacacttcccatgtggcagggctgggttgagacatatacttccatgagcatggtgtaccctggtatgcataataacccagctggcttctgtcacccatcagtcacgagcaaggaatgtggaaagggactggaaaacaatgacaaacaagcctcagttttgactctcttrtgcacacaggagggacagagtaaacatggtcgggtggatggaaaactgagcagctgtgttgcctttgttccttaggctattgctttattttcattttttatttttgagatggagtcttgctctgttgcccagggtggagtgcggtggcacgatcttggctcactgcaacctccgcctcccgagttcaagcaatttccagctaatttttgtatttttttttttttttcagcagagaggggtttcactatgttggccaggctggtctcgaactcctaacctcaagtaatccgcctgcctcggcctcccaaagtgctaggattacaggcttgagccaccgtgcccggcctaggctgttgctttagctaaaggttattctggcttcctgggtcgcgttgtctaggacacatgacccttgtttagggaactccaactgtgtcaggagttatttctctctccgaaataagaaaattaggggcagattgttgtcatttgcattgtcagatggagaaactaaggcacagagcaaggaaactacaaggccagggaaaaaaactgtgcttgtagctgagcccatgatagaaatgctttctggcatcttcttccaccctctccagcctgggcctcaactctttatgccgcttaaatcggtatgggcccaggtcttcgaggggatggagtgtgggcagagtccacattggtcaccaccatttcacagaccggggcagagcggggtctaaaccccctccttaggcagtgctgtgtccacctccagcagagaagacttggttgggaaaggccttccctccatgggtttgcattgcttatgagcccccacccctcccttgactatagtgtggtttagaatgtacacagtggccaggtgtgtgrtattttgcctgctttccacctgccttctatgatttagaggtaaacagcagctttgtgactgagrggctgcctggcgtctgataccacttgtggagattaggaagttgattgctttaaccaaacccacttgaaaaatatgttttttcttttacacctttttctttagttttttcttttgcccatcttatttcttcagagaaggttatggatttattttgaatgcatttcttcaaagttagtacttaaatatatttcatcaatttcctcctttcctcctccctgccactgccatatgccacgcgttaatgcagatataaggatgtggggaatcctttgttgctgtgagggaaagacaccacacctgtctcacggctttgctcagrtgtttctctgtggcacacctctgcccctcttctaggcctgactcatgcacattcatcaaccctcaactctgacctcatctcttcgatgaaaccttccttcaccccagttctgctttcacagagtctttttttaaatttccacagaaccccgaggtttacctttgcctatggaagttatttgtctatggaaattatttctgcctctcccagtagactgtgaacttcttaagagtaggggccaatgctttgcttttcttctctttcgtttttaaaatctccagccctagcacagtgcccaacacctggttggttctcaaaagtaatgttggtagagttttcagttttgataatgagtcattccaaacaaatggtatttgttgtagggtgatgaaggggttaaaatatgctattctgtactatgcgccataaaaaagaatgagttcatgtcctttgcagggacatggatgaagctgggagccatcatcctcagcaaactaacacaggaacagaaaaccaaacaccacatgttctcactcataagcaggagttgaacaatgagaacacatggacacagggaggggaacatcacataccggggcttgttggagggtcggggacgaggggaaggagagcattaggacaaatacctaatgcatgcgggtcttaaaacctggatgatgggttgacaggtgcagcaaaccactgtggcacatgtatacctatgtaacaaacctgcatgttctgtacatgtatcccaaaacttaaagtaaaaatttaaaaatgccattctggaatattgactatttaagttaaaagcacttgaaaaacagcaggtacaagaatatcactttgacctttgtgctgtttcttaagaggagaagatggaattcctatgtgaaagacactctctagggactagaaggaaaggtaacttagagaatattgcacagaccttgttagaaattctattttttaagcttccccacataatttagtcacattttcatagtttattattctttgttcaatccagtatagaagtaactgactctaactgattctttgggtcttcatttctttatgagggctcttgtgccatgtaaaacatttatgaataaatgtctatgcttttctcatgttaatctgtgttttgtcgatttaactcttggacccagccaggaccctaagacaatagaggtgaagtttttccattcctacagtgagaagggggaccctgacggaggggaaccccagctcttcattcctgcctttatcaacctgggttttaagaagttgaacttgaactctgtctttggcccagtggcatttcaggacaatatcccatcagtttagcaacttctgtgggagcggcaaggaagagggtgaatagggatgtagacaataggaggagtgtcccctgtccccattctccttatatttgttttaaattcgatgtctagttttacttaatccccagggatacagtcaaatgctaagttaaatggaggattttccttttgcatttgcagccttttccaaatcacgctgaagatagctcagccccccggactgtgtggcaagaagcaggcagggttatcacccctatctcacagatggagatgaggagatcaaacaggggcttctgttttggatttctttgttctactgtaggctcctggtacaatttcttgtgacctagggaatattttcttttcctagaatgctgtttgtctttcgggaaagagtggctgtctggccagttcttcccctcgcctttcttcttccgcttttgctcacactacttgctgcccctcccctgttcctttccacaaaaagtggagacaaagggtgagaaggcctgaaaggggaacttgacttggacctatgtctaatttccatgtcagatttcaaagaatgaaaccacccttgttcgttttatgactcctgtttatcacaatttgcatctttttgtacgttacatagttatccagtaccagagtccttcccaattgcaaaatgttttatagacaggtggcagagggctcgtggatggataaaaaagaattgatacactagaataggaaaatggcaggatacttggggttgggaaatgctatctttgtgcctgaaattaattaggatctcgcattgtgagtgggttgggcaggtacagaarggcttcccacagtaattcattcttcagcagacctctatgagagcccacagcatgtagggtgcggtgtacgatgctgtaaaggactgaaaaacctcaagacgatgtctcagaccgcaggaaactcattacatgactctgttatcaatatcttttgtgaaatatgtaaacaaagtgctataggagctcagaaaacagaaagtcacttcgacaggaaaaaaagggaaaacttcaggaaaaaagggggtttcaatccagacctgtaagagagggttcttggatcttatgtgggaaagaagtcaaggagagtcacaaaatgcagtgaaagaagcaagcttattagaaactactgttacagagtagggtgccctcagaaagcaaaaggaggaacgcattgactttaagtttttcttatatagggatcttgtctatataaagattaaactaagctgtgcctatgtgcggatgggcagacagtgtgacaaaacttattattctattgatttaaagaaaactatccttgacattttagtgtgtgagaacatcaaagcataactataattttttgaaaacatatattgttatggtattgggacatctggactttctgttgttgtagtatccttaggctgttttctcaaccataaacatcttatgaccatgggtcctggttggcaaggaatgtgccttgttactctcaagatggagctgaacttaaaattgtgtcactttcactctcctaggctcctgcctccctaacaaaatgtccttgaggggatggtacagttgctacagatagatacagaagggagcattccagagagagaaaaggatagtgttgaagagctttgaacacagcccaaacctggattgaaatccagatcctattgctcactagctaggtggtctggggcaaatgacatggcttctattttttctttctttctttctttctttttttttttttttgagacggagtttcgtgcttgtcgcccagactggagtgcggcagggcaatctcagctcactgcaacctccgcctctcgggttgaagtgattctcctacctcaacctcccgagtagctgggattacagacacgcaccaccacgcccagctaatttttgtatttttaggagagacggagtttcaccatgttggccaggatggtctcaatctcttgaccttgtgatccgcccgcctcagcctcccgaagtgctgggattacaggcgtgagccactgcrcccagctgacctggcttctatttctatctaacgcagggtctgaagttttcaacagagcatatttggggaattacagagcatcccagttcaccagaacagagtgaggctgcttttcagacagtattgagaaacgagggctggaaaaagttggaaacagattgggcaaggcctttacccccaagttaaggagttgaggcacagtgagcaggaagaggccattttcctgcaagagggtttgaggagcagagtgaggagcagattgatctggtgrtggtgtgyaggatggattggagagagcaggaaagggaggcagggagaccaattaggggattctacactgagacaggtgcaaaacgaagagggatgatggcatgagaactggataggaagggatggacaagaagacaggcactggggactggtggaggtcgggaaggaggaagagggagaagctacggaagacgcttggttttaggagccttacaattatctygtattactctaagtctggtgtgtggagtattctgtgtggaattcaggcctcattttggktttgatggtctcatcgtgatttattttaaaactttttctaatcaaagccatgctaagacaatggttctcracctcaactgcattttaggattgcctagggagattttaattcccaatgtccagactataattcagatgaattacatcaggatttctmggggtgaaacctggattttcagyggtgtctaaatctcaccggtgatccccatgtgcagccagggatgagagtgtctgtgctaggagcggayagggagaagctatggtgagacagaacagacatttgaggggtgtgaagaagaaracctggaatccgacttagcttttggataaagtgaggtggcagtgaatgtgcagaaattgaaagytggagggagggctgttcccacgtcctttacttttgctatcacagttctgtatttctttccttaaaatcaatatataaaaagattcaatttcttgagcttccttgaccctggaatttctttgygaattatgtatagtactgtacataaggaactattgaattacaaacmttcccacatgaatcttatggtattaaaataaataaatattcaaaaatacacagaaatcattaccacatctctattctgtttccaaaaacagctgagggccagttttagcccatcaggtgccgtctgctatataaattgtactactagtggttttcacagtccagcttataacaatagcacaataaatcctagtggtcactttctcagaatgtaagatatcgtcatttaaaacatgtcacctgtggctacagagtagagccagatggtctgaaaagacattagtaaaatattctgagccacagagatggagctgaacttgggtcaccctcagtctcctaggctcctgcctccctaacaaaatgtccttgaagaatgggacagtttaactgcgtttcaatcatagttgttggtcctacaaatcaacatttgtataactaagcatggatatttatcactgtgtttctctacttagtttccttattttaacttccagttctgggttcattattagaaacggattggagaaagtacttttattagatggtacaagagcagtatttcatatcaatggttaattttgttattgtttctatttctttctttctttctttcttttttgagaccgagtctcattctgttgcccaggctggagtgcagtggcgcaatctcggctcactgcaacctccgcctcccaggttcaagtgattctcctgcctcagcctcctgagtagctgagactacaggcacgtgacaccatgcccggttaatttttgtatttttagtagagacggggtttcaccatgttggccaggctgggattgtttctatttctaaaggacttttctatacggaatctgttgagggacctatttaagttagagtaatttttctacattcattttcctcacatacagtgtgatgaatagtctttggtgttcgttgtgtcctctttttatgataagtggcctaaaatggggtctgatattagtactctaggaaggaataggagaagaatagtgttattatttggcctgtgaattgtgatgagacttactcctttgtattgaaagactcagtgggattataataactactcagctttagaaaccagcctcgtcagagaagtgagtgcaatctgggcctcttactattatgaagtgtgaagggaaaataaatctcaggacccccaaatcattaagccaaagggtagtgaagctgggaagtgcatcagacaaacctgcctcccattttattcctaaagaagatagctacaaagataaaaaaaaaaaaacgatatacctccctaaagataaaaaatactatatacctccctcacaatttgcccacaaggaattcctcgtggaaaaaagacggacagtactcagagttatccctctgcccctgtgaaacaaacgcctatctgattgcttcctctgccctcctgtttcactaagccaaactgaggcataagtgactattcctctaccctcttctcacatgtaaattgtgtattgtgtaaaaggctaatcagaggccgggtgcggtggcttacacctgtaatctcagcactttgggaggctgaggagggtgaatcacttgaggtcaggagttcaagaacagcctggccaacatggtgaaaccccatctctacttaaaaaaaaaaaaaaaagaaaaattatctgggcctggtggcataagcctgtaatcccagctacttgggaggctgagacaggggaattgcttggacccaggaggcggaggttgcagtgagctgagatcaccccactgcactacagcctgggtgacacagtgagactccgtctcaaaaaaaaaaaaaaaaaaaaggcttctcagagactcaaaagactgcaaccttttgtctcttatctacctatgaactggaaacccccctcacccgtggagttgtcctgcctttcctgaatgactaatggacatcttacgtgtatagattgatgtctcacgtctccttaaaatgtataagagcaagctgtgcctccagcaccttgggcacttgttgtcaagacctcctgaggctgtgtcacaggtgcgaccttacccatggcaaaataaactttctaaactgattgagacctgtctcagatacttttgggttcacagaaggcaatggaaaatactgtttttcaagtgtctaaacaacattaacgagcaaaagtgctgctttgatggagtagctggggtgaggtgtggttttcgctggactggctgtggaactgtgactcaaagggtcagggagatgaattcattcatctgactcatcaggatgtacatccagagtgtacagtcacgagtacagagtgtacttgtcaatccagagtgtacagtcatgtgggcagctgtgttgcccaaggagggtagatttgcttcagagccctcagggaggataccagagaggctagattttgggcacccaactgaggcctgaaatcagaaggcactccttggktttattaagagtaaatggtggcactggcaagtaagtcttacatgtcacgrgaatttaagtaaattgtagtaaagggcaggaaacaaagttaatatgccaggctcttgtccttctctatttaaaaactaggggtctgatgttacttcttcccagtggaatgacctcatatgtgtatgatggcttttctttgttcatttgcctgggtgattgttttagaatacctcctcactgttctgcctttgcgtcatctattctgttttgttcagatagaaacccacgttccatctttcgacatttcaatttagattgcttcagaaattcaaaacacaacttttgcttgaatttatgagtgctaatgattgtaaacatctggaatttggtcttagtggaattcttgatgcatgatttttcttcttggtcacttggcaagccagagaccctgggccttgcccgatgccccacccgggcattgctcggccacactactgaggcccagctcacctgtgttatagcttgcatccgcatctgctggttccacacgacagtgtagaagaacaattaggaaagggtaggtatatgtaaaatacatgaggggtggggatccatcacaggaaagctcgacaaatgggaagacaagttctcaatccggtctgaggatttaacttgtagcttggctttcaggctttaaactatcttcggcttggagagggggtttcaccggggacctgcccatatctgcctgggcatttggctgcctcctgccactctcatgatcaattataaagatgatagccacataccataacaagcagcctcctctcctatttattatgtgatatgggttgttacagtgaagaattgagatgaagttggagaagttagtgggtgagcgattagctataaaatttgtgaatgttgcctttttaaaatcaaactttggatgtagagtagacaactgtttgccacgcccttcaacatttattatgcaatcaagaaagttttccaagactatgagccagagagggcttgactttttactatttatttactattgtcaactaaagaatgaggaggttcataaatttggaaaggagagctttatttctcataaagagttccaacctgcagggtgaccattctgacaggctgggaagcatagcctcctgccagaagctggaaatggactcttcaagagagggtctagagggaacaggaatttatgttgagcagggtggccaaatatacttcagtaagctataggaagagtctgaatatttatacaaggagaaacgtgcacacacacaattgagcttcttgccccttcatgggtctcatgtacaaaaaaatggcagcattagcatgatctgagggtggaatatttggccctctgatgtcaaaaagggaagcagaagacatgaaaacccttactgcacattctccatagactggccagaaccactctgtgatcagtggcctcttatcaggcaaaaaaggagaagcagtgttgggtggttggttaatatcagtggtagagtcttttgaaagggctggtttctgtgaaagccttwgggaagaaagcctaattgtggttagcaagggagggggataacgaggcgtgtaagactgctcattccatcatggcctagaactcggttttcaaggttattctgaagttcccttggctaagagatggtccattcggtcagttgggggacttagaattttattttcagcttacactatttattaagtgactttttactattatttactattctattgtgtcaagaatatggggaaggattctagtaccactgccagaattagtccacacacttcttaaaggattctaagcatttgcacaaatacctttctgattgaataatctttatgaatttcatgggttcataaagattatcatcctcacggagatgataaacatggcatcaaatttagtaatgatgtacattcagtattatcaatcagagtagtccaggtcagaggtcggccaactttttctgtaaagaaccagagaggaaaaatattttaggcttttgttttgttttgtttgtttgctctgtcgcccaggctggagtgcagtggcacaatctcggctcactgcaacctctgcctcttgggttcaagcagttctcctgcctcagcctcctgagtagctgggattacagccacctgccaccacgcctggctaatttttgtatttttagtagagatggagtttcaccatgttggccaggctggtctcgaactcctgacctcgagtgatttgcccgcctcggcctcccaaagtgctgggattacaggtgtgaaccactgcaccaggcctattttaggctttttgagccatagtgcctctacctcaactactgaaccctactgttgtagctcaaaagcaaccatagacaatacttaaattggctgtgttccaattaaactttatttacaaagatgagagtggggtggatttggcagatggatggtagtttgttggccagtggtctagattagtggttctcatgcattaggacacaacagaatcacttggaggactttttaagacacaaattgctggtcccaacctaagatttctgattcagtaagtctaggggtagggccaaataatttgcatttcaaacaagttcccaagagatgctgatgctgctggtctggggaacacactttttgaactgctggtctagtccaagctcatttacagaggtggatattaagactatgaagaaagaacttgggtaaactcacaagctggtaaaggaaaaacttagggcttgattaggatttagattttctggcccctggctcagtgctgttccaccatgtcatgcagttttcaaatgatataatggtggttagctccatgatactaacatgcatatttatgtctgtatttcttgattcatcgactttagacagtatcttgtgtttctttactgtgaaaaatgagttttgcgtattatgatgctttctctcacctcactctctctcattctctcatttttgttagttacattgttatttttagatcacatactggtgatctaattgaaacaacatacttaacttctttttggtgatccagctaccttagatagtatctgttgattttctaccacgtgtttccatctttctctatgcttgtccttcatgttcttctgcctattatataatgttgtaagatagtgaatgtctttacatttatactacacacagatcctttttgcctgactattaggggactgtaagtaatcgacatacagtatgcctgccacatagggtcacgcctgtaatccctgctactttgggaggctgaggtgggtggcatcacctgagtcaggaacttgagaccagcctggccaacacggtgaaatcccatctctactaaaaatacaaaaaaaagtagccaggtgtggtggcaggtgcctgtaatccccagctacttgggaggctgaggcaggagaatcgcttgaacccaggaagcagaggttgcagtatgcctagacggcgctgttgcactccagcctgggcaacaagaaagaaactccatctcaaaaaaaaaaaaaaagaaagaaagaaagaaaagaaatcattaaaatgcatttatatgcattctgtgatgtacattatgtatacataatagattggacctctcaagtgacagttgtaatcctgtgtcattaaacctgtatcactgaaaggaggaagctacaaatggtaaagtaaaatgggttctctttccttataccccatcagttactcaaaatcatgccataatttaattcatttcagagtcagacaatgacttttttatgtgcattttcacctggcatttctaattgcccttcttttttccctatttacagaagtggcatatacctttattgcattattactrtcttgcagattctttattatagagtgtgtaatgcatacacttacttcttgaagatattcttttgaggccctctggtctgctcttataattcaggattgttgctgtctagatctactgcaagctgtcaaccaggaagtgtttttcactgagtctctgggaaagtcccctctattttggatttcattttcattgaaacacttaacaattattttatcttccaaaagcacgtatggtaaataattttttttttttgagacggagtcttgctctgttgcccaggctggagtgcagtggtgcgatctcggctcactgcagcctttgccccgctgggttccagcgattctcctgcctcagcctctcgcgtagctgggattactggcacacaccaccatgcctagctaagttttgtatttttagtagagacaggattttgccatgttggccaggctggtcttgaacttctgatctcaggtgatctgcctgcctgcctcagcctcccacggtgctgggattacagacatgagccaccgcgcccagccggtaaataaatcttaacagtaccttgaacatttgaaaatggctgtatttgtcctcgtatttgatcagtagtttggctgggaatggaatttttttatgtaaaaaacattgatccatcgatttgtagcatccagtgttactgataacaatgctaatccttctcacaaagatctgtctcatttctttataggtaaactgtttattttgttgtaggtttgaaatttcaaacctttttccttctttctcctgggccttcaaacctgcataaagtctttcttaggcttagaattcttttcactattgtttctttgagtatttctcccctycaactctattttctgtttctgtttctatttttcatctctttatcactttactttttactcatatatatatgtactgaattgtctattcatgtttttgcgttattctattgagtttttgatttttatttttctctcatttttttaaagaattctttatgtaattggtgtattagccctttatctgtgaggtatattgcaaatgtttttctctcacttcttaatttgtcgtttgtctttgcttaggatgtttttttgccgtgaagaatttttatgtcatcaaatgtattgatttttcttttattgtatctgaattttgagtcattgttagaaagctttcctaaatctagsttatagagtaattcatccatgctttcctgtaatgtagtatgctttctatttttactgtcagctctgatgagattgtttgtggttggtatgaagtatagatccaagtttatctttctcaaaatggctattcagttatctgaacaccattaattttaaaagtccatctgtgcctcagtgacttgagaattaattggtgtgtctgtctattcataaatgagcaacaaacttttaattatagtggatttacrttgtttaatatctagtgaaattaatcacttctccccatcccttaagctttgccttcttttctagtgttttcctaactgttctttcctgttttctatttgtctagcttcataaaaaagaaaagaaaarcttgttgatcttgtcattgggactgtgttaaatttataaatcagtgtagggcaaagtgaaatttttctggtgttaaaatcatcctatcaaaaagaagtgtctttctatttgttcaagtctacttttgtgtctttcaggaatattaacaatttttttctgacatagttttgtacttttattgttaagtttttgatctcttgttgctattgtaaatgggatctatccaccattatatcctttaactagtaattttactttctgtactgtctttattaagtttagatatcaatattacacttgctttataagtagtattttaaagtcttctttcattttttagagctctgaaacaattttgtggcattgagactatgtgtatgtggtcattgattttgtagaattcgcctgtgaaaccatctgggccttgataacgttcagctaaactggtcctgtttaagttttacatttctgatgaggttaatttaagtaacctatattttcstaggaaattacttatttatatccaggttttcaaatttttttgcataggratgtgcaaagtcrtttcttagggatttttaattttttgcttcagttccttttgccatttcttattttgtgtacctgtgctttccccttcctccccttctcttttttcttcttaagttagctagtggttaatttattttgttaattttaaaagtaggaatttgatttactaattagatctattggtttttccattctctaccttattcatttctgcctttatcttttgttttttttatttttgagatggagtctcgctctgttgcccaggytggagtgcagtggcgtgatcttggctcactgcaagctccgccccctgggttcacgccattctcctgcctcagcctcctgagtagctgggactacaggcacccaccaccatgcccagctaattttttttttgtatttttagtagcgacggggtttcaccgtgttagccaggatggtctcgatctcctgaccttgtgatccgcccgcctcgccctcccaaagtgctgggattacagacgtaagcccctgctcctggcctctgcctttatctttaatattgtcttcctgttcttcggtttggtttgcttcattttctctcatttatgagtgaataatttatttcattcatttatcttgatgatataaatgtttaagtctatgaattgtctccattcactgctttaaacaaacccacaaattctgatatgtagtgttttctttgtcattacattttagaaattctgaaattttactttacattttccctttaccaaagagttattaatagtaaatttttaaarttttcaagcattttctttgtggccttacattgtgatcaatttctgtggatgttccatgtgtactttagaagatggtgaatcctctgttactggcatgtaaagctgaagacatattcattatatcttccttattgattatgtcgtgtaggtcttttataactttactgatatattgtctctttgctctgtcttgtacttaaagtagtatattaaaatctcctgtttaaagtgtatttctttctacctgcttttgagacagggtctcaaaagtggcgcaatcatggctcactacagcctcgaccttcctgagctcaagtgattctctcacctcagcctcctgagtagctgggtctacagacatgcaccattatgcctggctaattatttttttgtagagttggggtctccctatgttgcccacgctggtctcaaacttagtaatacgtatttaagtttttccatgtcttctcatggcttaaagctcatttctttttagtgctaaataatattccagtatctggcatgccacagtttgtttttccattcgtctgcatcatgagtattttcagttttggcaattatgaataaagcttctataaacatctgtgtgcaggtttttgtgtttatatacatctctggctcatttgggtaaatactaaagagcaaaattaatggatcttatggtaagagtatgtgtagttttgttatggtaagagcatgtgtagttttgtgagaaactgcccaactgtcttctaaagyggctgtgccgtgttgcattcccaccagcagtgaaygagagttcctgttgctctttgccagaatttggtgttgtcaatatttaggattttgatttttctaatatatatatggtagtatctcattgttgttttaatttgcaattccccaatgacatatgatgttgaacatcttttcatatgtttatttgtcatctgtaaatcttctttagtaaggtgctgtttaggtcttttgcccatttttaaattgggttgttcattttcttattgttgagttttaacagttctttgtatattttagataacatttctttataagatataaagacgtaaagaaatgtgtcgtcttcttattctactgaaagtaaacattttttattccaattttctttttttcttccttatagtagctttatgtagatgactactgcttgcatcttgcgtttaattgacagggctggtggtttggggtggtttacaagatttctagttcaagatatatcatcttctgttagtgtatctaaacatagtttctttgatagatggccttaaaaacttttttttcagaggttaagggaagggatttgtatcctcatctttttttttttttaatcctgtaagatgctaaattgtacctattacttctttttgcctttaccagacagccactgtcttgcttttcttttcattttctctcccagaagctatgcctttccaagaatgcctctttgattccttctctagtcagtgccctgatgctctggaactctttttcagtacagattatctcttctccaaagttcttgagacaagaggctgggtgtggtggctcacgcctgtaatctcagcactttgggaggccgaggcaggtggatcacgaggtcaggagttccagatcagcctggccaaggtggtgaaagtccatctctactaaaaatacaaaaattaaccgggtgtggtggtgtgcacctgtagtcccagctrctcaggaggctgaggcaggagaattgcttgaacccaggaggtggaggttgcagtgagctgagatcacaccactgcactctagcctgggtgatggagcaatactccaactcaaaaaaaaaaaaagttcttgagacaagaagtatttcagatgttttcagattttggaatatttgcgtatacctaatgagatatcttggggatgggacccaagtctaagcacacgattgacttatatttcacatayatatatcctgaaggtaattttatacactattttaaataattttgtgcatgaaacagagtttgtatacattgatccatcagaaagcaaagatgtcactctctcagccacccatgtggacagtctgtgcttgtttggcatcactgttattcttgaatctgaacttacatgctactgataaacagctattatcttatacttattcacacttaagtatttaatagtaaataataagacatgccattattagagcaaaaacaaataatgtgttcagagtaactgtacttgtccgttctcacactgctataaagcactacctgagactggttaatttatgaagaaaggaggtttaattgactcacatttccacaggttgtacaggaagcatggctgggaggcctcaggaaacttacaatcacagtggaaggcgaaggggaagcaagcatgccttaccatggcggcaggagagagagagtgataggggaggtgccacacacttttaaaccatcagatctcatgagaactcactaactgtcatgagaacagcaagggggaaatctgcccccatgatctaatcacctcctaccaggtccctctctcaacattggggattacaattccacatgagatttaggtgggaacacagagccaaaccatatcagtaactaagcagtacagtagcattaccagcattcttgtatctgctgttaaacaacagcaacaaggacaaacaacagcaggctttcagtttccacctatgatgccatgttttgattaaaaggttattgtacattatgtgtttccttccttccttctttccttccttccttcccttcgctctcttcctgtctcttttcctttttcttttctttttcttttttcttttcttgtcttgtcttgtcttgtcttgtcttctcttctgtcttatctggtctttcctttcctttcctttcttccttttcttttctcttttcttttcttttcttttcttttcttttcttttcttttcttttcttttcttttctgagtttcactcttcttgcccaggctggaggtgctatctcagctcactgcaacctctgcctcccggattcaaacgattctcctgcctcagcctcatgagtagctgggattataagcatgcgccaccacactcggctaattttctatttttagtagagatgaggtctcaccatgttggccaggctggtctagaactcctgacctcaggtgatccacccacctcagcctcccaaagtgctgggattacaggagtgacccaccacgcctggcctagtacactgtatgttatttttctaggtgagaagaaacatcagaagtagttgaaggcacaggaagaagtggatcctctaaggatgaggagacattctctcaaatggcttttttttttgagacaggttctcattctgtcacccaggctggagtgcagttgcatgcatgatcatagctaactgcagccttgaactcccggactcaagcaatcctcctacttcagcctcccaagtagctaggactacaggcatgccaccatgctcagctaatttttaattttttgtgtggggacagtatctcgttctgttgcccaggctgatcatgaactcctgggctcaagtgaccctcctgcctcagagtcccagagttctgggattacagggatgagccaccccctyctaccccaatctggcctggatggctttttaaaatgtttcctccagagtcatctgcctcattaacagtgggttttatcttagaagctctctttgattttgtaaactggcataatttcttgttctgttgtgaatgcagctgctgtagtccttcaataagcccattacacattttcaccgtgtcttctaggcacgtttttctgcagtgttaacagcatcgtctttaccatcactattatcacaatcggcttgattcagaaccattttggctatttcatcattggttaatgaatgaacaattggagcctcataatcaatgttaaaaatttcaatacccacgttttccagcttcgtgatggactctgaagatacatcttttgcacatgtaagaaggttagacatcattgtttcctcacttgacatgtggaattcttcaaagtccccaccttattcatcatcatcactgaacaggccagaggttgtgtcaggtcttggtgcaaaactgtgtctttagtcactgtgttccaagcgttgacaacagcctatatggcacccttcatgctaaactctgtttgaaaacctccacacccgtgccttagtttactgagtttactgctgctagcatgctgttcaagaaagtgtttatatatttattttcatcgacctaagggtaccttgttcatggctgaattaatgtagtcacatttgggggaaaatacatgacataaacattatttttctgaaatcagatgagttcaggtgtgttcaaggtgatatggccatagacagtaaatgttatttttgatgagaatttcagctggagtgtgagcagaacagttgttaaagaataagaaaatctttcagtcatcattcagtccagtttccctgcagagtgcatgagccactggtataaaatctttgtgaaacgaatcagaaaggatgtccctggtgatccatgaccttttgttagtatagtaatggactggtaagaaattcactctgtgaaagcagtgagcacacgagcttttgccttctgagtgcctattgtgttagcacatcccagcacagttattctgtctttgacatccttaattcctgtaagggctgtctcatcagtgcagtcaatgtctttctgggggaatagtgcaaaacagtgatatttcatcagcatcccaggcttattctggcatcaaattttcatcagcagtgaccttggcaaacttgtcaatgaatttctgcactgcttcagtaaagatttagaatttaagaaaaacagaaaaaaaaaaaaaacccaatgaacttttccactgcttcatgatcagcagatgctttatcttttaacatttaatgttatcttttcttatatttctgggccaggcatggtagtaatcataccctgtaatcccagcacttcgggaggccaaggcagaaggattacttgaggggttcaagacctgcctgggcaacacggcaagaccctgtctctacaaagataaaaaaaaaatattaactggaggtggtggaacatgcctgtagtcccagctactcgagaggctgaggtgggagaactgcttgagccctggagttcgaggttgcagtgagctgtgatcaagccactatactccagcctgagagatagaatgagatcctgtttctgaacaacaacaaaaaattttccgtaaccaacctgttgaatattcacacttcccttcaattttcagttcattgtgatagatttttccttgtttcatgagcggcacaccattaagttgcacaagttcactgcagtgctgatggatctactctttcgatacatgatcaagagattcatttttaactttatgtagtgtttttgtattttttgttcatttctgttcatcacttttagcatggagcatcaacagtttatctttctgtatctttaggtcatatatggtatgcattctaacaccacactcttctttttcttttcttttttttcttatttatttatttttcttgtgacagagtttcgctctcattgcccaggctggcgtgcaatggtgggatcttggttcactgcaacctctgcccctcccaggttcaagtgattctcctgcctcagcctcccaagtagctgggattacaggtgcccgccatcatgcccagmtaattttttgtatttttttagtagagaaggggtttcaccatcttggccaggctgatcttgaactcctgacctcaggtcatctgcccttctcggcctcccaaagtkctgggattacaggtgtaagccacggcacccggccactaataccatactcttctgtaagatgtttctcacttatgctgctgtccagtttctccaacagcttgaatttctgtgctatagataaacataagcttcctctttttcttatcactgttactcataggggtgtctgccggcctttttttttttttctggacattttgaaaaatatctttacatcatggagaagagaataagtggaaaaccacagtgagtattacttgtaggtcttggtcccatgcagagcattggggaacctgcctttgatgcatctggcctgtacacatgccattttattacccttcatgggcgtgcttgcataggggagtcagggtgtgcatggaaaagatacactgcagctgaacagggccggacagtctttttccccttgaggacatggaataaatggtgtgtcgtatgcttgcgttttaactgcaagttgttacatgaagtcaggtgttgggtttttccacttttggtgtcacgtcagtgctgaaaaagtttcagatttgggaggattttggattttggatctttggattaaggatgattgacctgtatctttgcacttaaagtggactctttttgttttgttttgtttttcctgtgagtagttttatctcaatggcctcttctcttagcactccttagatcgctgcaaaagctagtagcaggagctcaagaagtagttctgttgaaaattagtatcttgcttgtttttttaaaaatgtttataagtagcttgaagtttgtagtgttcttaatcttctagttattctcaaggcctgggatttgtgtggccctatttgttcttttggtttatctgcatggttctgagaggatatgtgacaattcagattttgctcagctacccagaagtccctctgttttgtttttgataaacttcaaatcactgatttcagatcactaatgctttcattactagatgactaatcagttatctcagatcactgatttgttatcagccatgtgcatttttcaaaaactcttctatacatttttaggttctagcatcatatgtttaatttctgagaactatttcttactctcccattgctcccttttcataagagtgtattcttgttttatggatggagtattctttcaacagtctgagattactgactagaaaaaatataaacttttttgtagttgttttcattgtttctagattggctgttctgtttgttcacctcagtctttctctttgatgctttgcttttattcaattcagaagatctttggttgcctttttatatttttgaagggttatgttgtaaatataattatctgacttggatttcctttgcaattgggtagctctgtttaaccaaggtacttgcacttgaatgggaggaaattgaggtcagtagactctgcaacagtgagtgggtcctataaatagattttcctttagggatgcttgattagggagtaggcaatacttttattttatttatttatttattttgagacggagtcttgctctgttgccaggctggagtgcagtggcgcaatctcgactcactgcaacctctgcctcccgggttcaaacaattctcctgcttcaacctcctgagtagctgggactacaggtgcatgccaccacgcccaactaatttttatatttttagtagagacagggtttcaccgtgttggccaggatggtctcaatctcttgacctcgtgatcagcctgccttggcctcccaaagtgctgggattacaggtgtgagctacaatgcccggcaatactttttttttttataataaagagtactttgctctagaggcagagttttttttttttttttaagtcaattttatttctagaaagacctgctctttgtattcttcttttgagtctttcttgcatatggtctgaagtttcttcaggcactgctcttcctcctccttagcttcaactcctatagcctaggcactgtcctggcaaatctactttgtgaaggaagaggtttgcaaggctgcagatggggcaaatgctacagccagctgctctttattcacaaggggaggggaggggggaagggaggggcccactgccctagtcactccaagtgaggccccagaatgaacatcacctggaagcctgtcagaaatgcagaatctggggcatcacccctagcttcatgacttgaaattgctatgtttaacaggaccctcaggtgactggtgtggacttgaaaagcattgttgatggccgggtgcggtggctcacgcctgtaatcccagcactttgggaggccgaggcaggcggatcacgaggtcaggagatcaagaccatcctggctaacacggtgaaaccctgtctctactaaaaatamcaaaaaaaaaaaaaaaaaaaaaaaaattatctgggcgtggtggcgggcgcctgtagtcccagctactcgggaggctgaggcaggagaatggtgtgaacccgggaggcggagcttgcagtgagccgagatcgcgccacggcactccacctatgcgacagagcgagactccgtctcaaaaaaaaaaaaaaaggaaaggaattgttgattatggtagctaagtaattattttgctattcctgctttctgcccccctctactgaaagagtaagactgtgttggagttgcctctaagaggccttcaagcattttcccctccattttctaaggtcagtatccttagaaagaggaattcattcatatccacaagcaacaagatctgatccttttctagtgacattacctgtctcttgcttcctcctcacaatcccctagtttttttcattttcaaacatttcatgtaaattctagaaatcaatatcatgtaaagaaagttgtggtggagtgtgtggaggggatgggatccattagacttatgaaaataaaataaaataaataataaataatataatgaataataaataatattattaaaataaatagaagcattttatgccagtgctttaaacaattattttatatcacttcacacagtacaaagacctggaaacatgctttaattcttacatttatttctgtatttattcatgcattcatgatggatttattccctttgcatgcttatagggactacgttattgatcagtaacatacctatgttgactcaaaagggccaaactctgtaaaatatttgaagaactttattctgagccaaatgtaaggaccacgacgccatgacacagcctcaggaggtcctaagaacatgtgcccaaggtcattgggtaatagcttgattttatacattttagggagacaggagttacaggcaaacaacaatcaatacatgtaagatgtacattggtttggtccagaaaggtgagacaacttgaaaacttgaaccactgggtgagagacttacagatcataggtggattcaaacattttctgattggtaattggttgaaatggttaagttattatctaaagagtagaagtcagcagaaagaaatgctgggggttaagataagtggggtggggtgggagggtgcaggttgtggaagccaaggttcttggtatgtagcaggctttagagagaatagatggtaaatgtcccttatcagaccgtaaaaggtgccagactctcagttaaatctctctcctggatcaggaaaagacctggaaagggaaggggattctctgcagaatgtagattttccccacaagagacagctttgcgggatcatttcaaaatatggcaaagaaatatattttgcagaaaaaataattctatttctttcagggcctgctgtcatgtgacgctgtactagagtcaggttggaacttggcatcttattgctataaagaatctgttgtgttagtcttaagatctcttttaatgttaatgctggacatttgagcctgaattccaaagggaagagggtataatgaggcaagtctgaccccgctttctgttatggcctgaactagttttttaggtttctttgaaatccacttggccaagaagaagggtccattcagttggttggggagcttagaattttatttttggtttacacctactcctcttcctattaaaaaaaaagtgtggtgagaggatggaatctgaaatgtggaagctctatagaaaggaatatttgactgaatatggggaaagggctgccttattttctggacaccctagcagagaattacrttggcttggaggcagtggaggccctggatatggtttggatttgtgtccctgcccgaatctcaggtcaagttgtaatcccgtgttggaggtggggcctggtgggagatgaatggatcatgggggcagatttcccctttggtgctgttcttgtgatagagtcctcacaagatctggttgtttaaaattgtgtggcacctcctccctcactctcttcctcctgctccaggcacgataagacgtgcctgccccgctttgccttccactgtgattgtaagtttcctgaagcctccccagccatgcttcccatatagcctgcagaaccgtgaaccaattaaaactctttttaaaaaataaattacccagcttcagatatatttttatagcagtgcgggaacgggctaatacatcccattactggatgtgtctggtggaactgggtgggcatcttgcagggatgtggaaggggattccttcattattaaagcacggaactaaggcattgaccatgtttcttccttctgtaaagcggaagtatcctctaaatatggtcttttctatgaatgagtgtagctgattcctaaagcttcagttttctataactctacattgtttattcatgaatcacttaagaggctttgggttttttttaatttttaaattttttaaatggaaactacagaaaaatttaaacatttgcgaaagccaacagactagtataataaacacctatgtttctatcacccagcttcaacaattaccaactcatggacaatctgtttcatgtgtgtctccacccatgttccttctcatcgttacctcgaagcggataacatatcgaacattttctgattggtaattggttgaaatggttaagttattatctaaagagtagattttgcctacaaatatttcagcatgcatttctacaagacagaggttctttttaaaacataatgataatacaatcatcacatcacaaaatatactttaatataaccaaatagttcagtcatttttcatatatctccaagtatccttttttctaataagttagttgaaatcaggatccagaagggaagtgaggaggggtataccctgccattggttgctctgcagattctctctttttttactcaagagctactgatgtccctcaaagcgctgttctttgctggctttcctgtgcagtggaagcacgtctgcttctctccattggcttgggcagggacttgccattataccacagaaaacattagagtctcagcctttagtccgttctttttttttgagacaaagtctctctctatcgcccaggccggagtgcagtggcacaatcccagctcactgcaacctctgcctctggggttcaagcaattctcctgcttcagctgcctgaggagctgggattacaggcacgcaccaccatgcccggctaattttttcatttttagtagagatggggttttgccatgttggccaggctggtctcgaaatcctgacctcagatgatctgcccgcctcagcctcccaaagtgctgggattacaggtgtgagccaccacgcccggcttcacctttagtccattctaagtgaagatgctagttctcctacatagaacatggagagtgactttccactcaggatgaggcattgaagaaaatagcaaaagataagatgaggtcagatgagagagaaagtatgatgaagatgctgaagtacttgagagatcgacaaaatcatcccatatgtcttccattcttaatttggttgtatcttatcatatcttccaaaccctataaaaatgatcaacccaattcaactgaatttgtagaagcatatccatggtccctagcgacttgaagtcactatacagaatcagtaaatcatagaatgttaaaattggaaggagggcttgagatgagcttctgttagcccccaccattttgcagatgaaggtgccaaaagaatgccacaagactagaaagcattatggatactttatttctgaattagastaataaatttaaaaagacatargctaatcatcttatctcctataccaggaacaactctgggcactgccattcaagagggaattcctaaatttgcttaagttcacagtgtaaccatcagcaaacatagacagtcctgaatagtagtttgatttcttccagtaagaagccccatgtgcagtatatctatgacaatcatattagtgcttggaattaggtatttgaatcagagttaccaattgtcctgattttcctgagactgttgtttttagcactgaaaataatgtgtcccaggaacttctcagtgctagacaaacaggatggtttgtcaccctacatttgactcagttctgatggcaatgcaataaaatttcaattgaccaaaatattttctataccttgcttaccaaaaaaggcaaatcataggaaagtatattaacatcagagctagcctggcacagtgatatgacctgtagtcccagctacttgggaggstgagatgggaggattgagatgggaggattgcttgagccctggggttctgataaataaataaatatatatatatatatatatatatatatatatatatatatatatatatayttaagaaaataaatatcacacacaccacaatgcttctttgctattttgggatcagaacatatttacctcaatctcttatacttacatatttatatttagtgattttcagaatatcaggtgtgactcatcaaaagttcaattacatttgtgacagaggagttactaagattggaaaatgaaggagtatagtgttacaatattttctataacaagacataatgaattttgtggcatgagcattggtcttggagtctgaagacttctaatgactcttttttttttttttgagacggagtctcgctctgtcgcccaggctggagtkcmgtggcgctatctgggctcactgtaagctccgcctcccgggttcacaccattctccagcctcagcctctggagtagctgggactccaggcgcccgccaccacgcccagctaattttttgtagttttagtagagacagggtttcaccgtgttagacaggatggtctcgatctcctgacctcgtgatccacctgcmtcggcctcccaaagtgctgggattacaggcgtgagcccccgcgcccggcctctaatgactcttaactctgcatatagggtgtgacttttgcaagttatttttcgaagcattcttgaggattagtttccttgtctattaaatgaaaatgttatcaccaacctcatagagcgagtatgacaatcatatcaaagagtatttgtgcaggtgtctgacacatcatagggctttggtgttaaaaagaacaagaggggtaaaaaccaagtgttaccttaagaaatacattggccagaaaccccatttcctgtgcatttggtttagttgacgttttcatacctttgttgaataagagagggtgaaaaaaaaaaatcccaccccagcagtcattactgagtgttgtctagcatgtataccttatgggaggatgatttaaagtcattgtcgtgattccttgtctctttctgaactgtggcctatatacaattatgtcaggagacacagctctttctgttcacaggtatttttccagcagatcccacactccatttacccagatgctctggttgggtcttagtctgtgtggagcgaagaggagtcttgttctgaggaacatttgccctcagtttggccggggagaccatatatgccagcagctgcttatttcataggtgaaagaatagcctgtgtttataaacgatctaatatttgctaagcctctcccagcttcaccttgtttaagagtcctggtggctcccttagaacttccttcaatgattacgtggttcaagtagaaaagaaaaaaaaaaggagcagcaaaatatacaaaatcaagctgccacaaggtacaagcaggtttgctgtgaaaaaaacagtggaaggggagcagtggaatagggtgaagagcatcagtatcagacagctgagtctgaaagccaggcttgctagtgtgatatcaggcaagttattctgttctatcagccttggtttcttcygctgttaaaaggagataacatctgtttcgttaggttaagtgagacagaaaacaaataagtctgacaaatgataggaactcaataaatagcagctatgactatctagaatgattgttgttgtgtttgacgttcacacgtttttgctagtgcagcagaactgttttgctcattctgtgtcccctatgatcagtgcccagtaacattcggaagctaagcaaccacctctatataacctatgaatcaaagaaaaaaatcacaaaggaagtgagaaaacatttttaccgagcaataacaaaaacagtatgtcaacattcatgtgatatagataaaagtagtgcttaggaagaaattgtaacttgaaatacttatattggagaagaagaaaggcttaaagtcagtgctctaatcttataccttaagaagtttgaaaagagaataagaaacccaaagaaaacaaaaggaaggaaattgtaaaggaaaataaaaagaaccaaagataaatgaaatagaaaagagaggaatagtagagttccagtttaattccatggtgatcagaagtgcaccctctatgattagcatcatgtaaaatttgttgatacttgctttatgacccagacaatggtctatcttgttaaatattccatgagcatttgaaaagaatatcgtctgcattgctagatgttgtgttcttccaagtcgggtctatgttcttactaatttttggctgcttgttctatgaattactgagagaggaatactagaatctcaaactttgtggatttatctgtttttcttttagttctacccatttttgctttgtgtctttggggcaatgttattgtacgcttagacatttaggattcttatgtcttcctgataaaaaggcccttttatatttatgaataacttatctctgccgatactccttgtcataaatactactttgaaaaatattcacatagccacattggctttcttatgactagtgatagcatggtgtatgttttactacccttttctttcaatctaactctctcctcatacacaaaagtgtatcttttgtaagcagtgtatttactccgtctctacttgcctttttaaaaatttatttatttattattatactttaagttttgggatacatgtgcagaatgagcgggtttgttccataggtatacatgtgccatggtggtttgctgcacccatcaacccatcatctacactaggtatttgtcctaattctctccctcccctcgccccccctacccgacccccgacccactgacaggtcctggtgtgtgatgttcccctccctgtgtccatgtgttctcattgttcacttcccatttatgagtgagaacatgtggtgtttggttttctgttcctgtgttagtttgctaagaatgatggtttccagcttcatccatgtccctgcaaagaacatgaactcrttctttttttatggctgcatagtattctatggtgtatatgaaccacattttttttatccagtctatcattgatgggcatttgggttggttctaggtctttactattgtaaacagtgctgcaataaacatacttgtgcatgtgtctttatagtagaatgatttataatcctttgggtatatacccggtaatgggattgctgggtcaaatggtatttctggatctagattcttgaggagttgccacactgtcttccacaatggttgaacaaatttacactcctaccaacagtgtaaaagcgttcctatttctccacatcctctctagcatctgttgtttcctgatttcttaatgatcacaattctaacttgtgtgagatggtatctcattgtggttttgatttgcatttatctaatgaccagcaatgatgagctttttttcatatgtttgttggccacataaatgtcttcttttgagaagtgtctgttcatatccttcacccactttttgatgaggttgtttttttctggtaaatttgtttaagttccttgtagattctggatattagccctttgtcagatggatagattgcaaaaatgttctaccattctgtgggttgcatgttcactctgatgatagtttctttgctgtgccaaagctgtttagtttagttagattccatttgtcaattttggcttttgtggcaattgcttttggtattttagtcatgaagtctttgccacgcctatgtcctgaatggtattgcctaagttttcttctagggtttttatggttttaggtcttatgtttaagcctttaatccatcttgagttaatttttgtataagttgtaaggaaggggtccagtttcagttttctgcatatggctagctagttttcccaacaccatttattaaatagggaatcctttccccattgctttgtttttgtcaggttcatyaaagatcagatggttgtagatgtgtggcgttatttctgaggcctctgttctgttccattggtctatatatttgttttggtactagtaccatgctgttttggttactgtagccttgtaatatagtttgaagtcaggtagcatgatgccttcagctttgttttggctaggattgtcttagctatacgggctctttttttggttccataggaaatttaaagtagttttttctaattctgtgaagaaagtcaatggcagcttgatgggaatagcagtaaatctataaattactttgggcagtatggccattttcatgatattgattcttcctatccatgagcatggaatgtttttccatttgtttgggtcctctcttatttccttgagcagtgatttgtagttctccttgaagaagtccttcacatcccttgtaagttgtatttctaggtactttattctctttgtagcagttgtgaatgggaattcactcatgatttggctctctgtctattgttggtgaatagaaatgcttatgatttttgcacattgattttgtatcctgagactttgctgaagttgcttatcagcttaaggagtttttgggctgagactatggagttttctaaatatacaatcatgtcatctgcaaacagagacaatttgatgtcctctcttccgatttgaataccctttatttcattctcttgcctcattgccctggccagaacttccaatactatgttgaataggagtggtgagagagggcatccttgtcttgtgccagttttcaaagggaatgcttccagctttgcccattcagtatgatattggctgtgggtttgtcataaatagctcttattattttgagatatgttccatcaatacctactttatggagtgtttttagcataaaggtgttgaattttatcgaagggcttttctgcatctattgagataatcatgtggtttttgtctttggttctgtttatgtgatggattacatttattgatttgcatatgttgagtgcatcccagggatgaagccgacttgatcgtggtggataagctttttgatgtgatgctggattcagtttgccagtgttgtattgaggattttcgcattgatgttcattagggatattggcctgaaattttctttttttgttgtgtctctgtcagattttggtatcaggatgatgctggcctcataaaatgagctagggaggagtccctctttttctattgtttggaatagtttcagaagaaatggtactagctcctctttgtacctctggtagaatttggctgtgtatccatctggtcctgggctttttttggttggtaggctattaactactgcctcaatttcagagcttgttattggtctattcagggatttgacttcttcctggtttagtcttgggagggtgtttgtgtgcaggaatttatccgtttcttctagattttctagtttatttgcatagaggtgtttatagtattctctgatggtagtttgtttttctgtgggatcagtggtgataccccctttatcactttttattgtgtctatttgtttcttctctcttttcttcttcattagtctggctagcaatctatctattttgttaatcttttcacaaaaccagctcctggattcattgattttttgaagggttcttcaggtctctatctccttcagttctgctctgatcttagttatttcttgtcttctgctaacttttgaatgtgtttgctcttgcttctttagttcttttaattgtgatgttagggtgttgattttagatctttcctgctttctcatgtgggcatttagtgctacaaatttccctctaaatcctgctttagctgtgtcccagagattctggtacattgtgtctttgttctcagtggtttcaaagaacttatttctttctgccttaatttcgttatttacccactagtcattcaggagcagtttgttcagattccatgtagttgtgcagttttgagtgagtttcttaatcctgagttctaatttgattgcactgtggtgtgagagactgtttgttatgattcccattcttttacatttgctgaggaatgttttacttccaattatgtggtcagttttagaataagtgctatgtggtgctgagaagaatgtatattctgttgatttggggtggagagttctgtagatgtctgttaggtctgcttggtccagagctgagttcaagtcctgaatatccttgttaattttctgaatccatctaatattgactgtggggtgttaaagtctcccagtattattgcgtgggagtctaagtctctttgtaggtgtctaagaacttgctttatgaatctgggtgcacctgtattgggtgcatatatatttaggatacttagcttttcttgttgcattgatccctttaccattatgtaattcccttctttgtcttttttgatctgtgttgtttaaagtctgttttatcagagactaggattgcaacccctgtcttttttttctttccatttgtgtggtaaatattcctctatccctttattttgagcctgtgtgtgtctttgcacatgagatgggtctcctgaatacagcacaccaatgggtcttggctctttatccaatttgccagtctgtgtcttttaattggggcatttagcccatttacacttaaggttaatattgttatgtgtgaacttgatcctgtcattctgatgctaactgattattttgcacattagttgatgcagtttcttcatagtgttgatggtctttacattttggtatgtttttgccgtggctatttgccttttaaatggagcgttataggccatttccaattaatgtgattattaagatggttgggttttaatctgccaatctgtgacttgttcctttatttctcctttcctgccttcttttgaattattcaaatattttcagtattctgtttatctcctttattgagtttttagcagttatttcctgatgtcacagtatgtgtttttgaattagcacaatctacctgggattaatttcataccactttatatacaatataaatagtatagtttaatttcacccaatactagtttcaatagtactttttttggggggggtggtggttttgtttttgttttggttttgagcccagtctatctcttgtgctcaagcaatcctcccagaacagcctactgaggagctgagactacgggcacacaccaccaggcctggctaatttttttaaattttagtagagatagtatcttgttgttgctcaggccggccttgaactcctgagcccaagcgatcctcctgccttggcctcctaaggtgctgggattacaggtgtgagccactgcacctggctaatagtaagtaaaagtaattttacttactgcattccgttcttcatgctattgttgtgacatatttattttataataatactgtgttatttttactttgattagttagtagtcctcagagaaataaaaaacacagttgataatacttattcacatatttaacgtttacataacatttacataactctctatttcttcttgcagattcaagttgctatgttgggctgggcatggtggctcacgcctgtaatccctgcactttggggattgaggtgggtggatcgcctgaggtcaggagattgagaccagcctaaccaacatggtgaaacctgtctctgctaaaaatacaaaaattagccgggtgtggtggtgggcacctgtaatcccagctactcaggaggctgaggtaggagaatcacttgaaccctggaggcagaggttgcagtgagccaagagaatgccactacactccagcctgggtgacaaagtgagactccgtctcaaaaaaaaaaaaaaaaatcaagttatcatgttggattatttcccttcagattcattcatttrcctgcctattctcagaataggcaagcaccactttatgtaaaagtctgctctagtatttgctctctatggaaggtcttaagtctctctggaatttgttcatttatatttctttgtcttcagagttctctcatatttaaggaaaaatatgagcttttaacttcaccagtgttttgtttgtttttggtaggagtgaaagtcttcctaaacatcagctgaacctatatttcttcaagtatatatctaatgacaatacattctctcacctctattgtctggaaatgtccttatttcactttcatttttaaaatgaattttcagcaagataacctgggtcagtatggggctgtgagaatcgattaacccaatgatgcttaactgagattagcttcttatgttttcctgcaggttttgcttagaccttctgcctcattcacatatacacacttttgtagggtaaagcccaccttttacccaaaattgaaggtttactataggccaactacttatcatgtactatatctcttttaatctctgtgacaagcacataagacttaatagaagtggagaaaagaaagaaagaataatagtgcttatacagtattaccaagtgccaggcgttgtcctgagcattttacatgtttgtacatatatgcatacacacacacacacacacacacacayacacacacacacacacacacacacatttaatcttcacatcaacctcataggtagatactattttattatttcagatttacaaacgaagagtctgagaaactacaggggttaagtaactacccctcaacccccaaaaagcacacacaatatataaatagaattcagaattcaaatctagtcaagttggttccagaatctgtgcttttaaccatctcattactggtaatatgattctcattttacagagaagagcaccggattttagaagagttaggtgaactcctctgtgtgtcactgctagtaagtggcaatactagcgtttgaaccaggccccaaagaccttgctctttcctctgtaccgtgcttcttcccaaaggagagaaaaaaaatgttttcacttttagaattctactttcgaaagattctgtgagaatttcrtgaggacttgagaggggaccaaacagcttccttttggtcttagtgacaatgatgtcttctcaagcatatkgtctattggcctatttatagccaggcactgccagggggttgcttttcccactgacgtgttaattctaaacacctctctcattactccctctcagactgctctagagcctcatagctgagcgtgttactgtactgatagctctgtgaatgtttgctttgggagyggaaggatggcagagctcaacctcaaggtcctccgcctacattgggaatatgtgatgctcacctgacacgtgcatatttcctttgggcttgaacacgtgttcctttggtgtttcatgcatttgccagccagaaagggagtcctccagtgggtctgagaaacaaagtatctattttgttaagattaccaggcttagactgggagagggagttggttgtgctgtgcagggtgtttacacggtgagcctggagtgctgtggaggcttcagggtgtattctgctgtgggagccacatggagcatatgggtctcacctaatctctgacactgaccacccttctttgcagtgtggaggctgccagcattggattcattgttgttatcgacagacgaagagacaagtggagctccgtaaaggcatccttgacacgaatagctgtaaatatttatttttgtgcttttattataaaagtcatttaaattgtctgttcaactatttcatatcaaagtcctggggaaaaggcaattattttatgtcaaattttgggaaggtctttgtaacaggtgctgttatgtcacatccctatctcctctgccatctgcaggtcacctgcaaacaattctgagcatgtcaaagacttcctaagtctctctaccttactgacttctctggtcactgaagaggggcagttggggagtgctggaaagttaatgcccsgggagtaacctgcaaccactgagttaaaggatttggtagataaatatctcagcttccagatccgcagtggggcaattctgaggtgtgttccacacagtatcccagagggtctcagccccctttgcctacggcagtaaccccctcattgagacattgccactctattcattgttgtcttcctccctgctccctcattcgtgcttcctggaatcacttccccaacaaactacctgtacttaaatccttgtctgaggatttgctttgggggcaattcaatttaagacagtatttattatttcagtattattattatttttgaaacagtgtctcactctgtcgcccaggctggagtgcagtggcgcaatctcagctgactgcaacctctgcctcccgggttcgagagattctcctgcctcagcctcccaagtagctgagattgcaggcgtgcaccaccacgcttggctaatttgtgtatttttagtagagacggggtttcaccatgttgactaggctggtctcgaactcctgacctcaagtgatctgcccacctcagcctcccaaagtgttgggattacaggcttgagccactgcacctagccaaattatttattcatatattagaaagacaatggtaaaaccagacacaatgatatttaagtagcatggtgggaggtgtgcttgcatttgcattaaattatatcaccttggattggcctccttttgcttatagtctgattttgatccctatctgttgtctttcagcaagtagatgtgtccttcctctgtagggacctcagacttgtgaactccaccacaagcagagacaccttagggccagctaagtcagcatttttacctgagcataggccctctggggcagttgggactggctaaagaggatggatgtggtagtgtggtaaagcaggacaggagagggatatttgaaacctcacttaaacctgcttgcagaaggagtcacacatgcaaacatgcacacacacggagtccctctcagatcgctctagagcctcatccaaattcacaaattatgtctcagctaatactttccgtcttggcacaacaaagcgcaaggttcttctgttaggagcttgcatttaaagatggggaagagagtcctcccattgccgcatggattgttttctccctttagtttagttgtggatataggatttatctttgggataactgcagccatgattgatgcccatgactattccagaggtctggcctctagagagttctggctttccagggtccatacataatacatgagtaatctaatgtctgagcctaatttgtcccagaattacgttgatcactttatatgtaaaacatgctgtagtgcagggatccccaaatctggctacctgccagaatctcttcaggtgctcgttgaaaatactgatacctagatttcatcccagtcctaatgaatcaaaatagtctggagtaaagacctgatttagaaaaaaaaaatccccataggaggttgctttgggggaaccactggaagaatggaaagccatggcagtttccatggagacctgggttcctaagtctgccccgaagcattacatgaacctgctcagaatcttgccttgcgatgwgggcgatactttctgaaagcaacttagcaataatatacatcaagaatacttaaaatacgaactctttgattcagtaattattttacgactctagcctaagaaaatattccaagatgtggataaaggtgttcgtctcagtattatttacaatagtaaaattatcaaaaagcctaaatgattaacaataagggattggttaaataaattgtacacccgtaaaaaataatatttccaaagaatttattaataacaggaataaaagcctatggtataacattaagtgagaaggccggttacaaaatattttaagaatatgagccatggtaaagatatttaaacagagaaaacatcctataagtgaacagatggaaatattaagtatggctataaaaacccatgggtgagttttcactttctaatgtatagttttattaatttcccaatttttctataaataatatgaattatttttataatcagaaaacatttttcttgcttgtttggtttgctttgtttttttaggaggggttaggattatctgacctctagggtctcttttagccctgaaatctggtgaaatttacatccatggcatycgttttaacttttccttctgtgatcttaatcttgggcaaggggagaccaaagtagaccctggtaacgaatatgacatttttctctctcctcctgacacttttcctgatgcttgcaggtggcatttccaggaaacttacagctcatattcatccttcgtccatctcgctttatccagaggacattcactgacattggcattaaatactatcgaaatgagtttaaaaygaaagtgccggtaagcaagacctttcatcttgtctcatttggttagggcttctggckaagatggcatttgggcagggtttctgggcaagataagattcaacaggtagagagggagaaaagsgttctctgggctgagggaaccgcatgtgtgaaggcatagaggcaggaagtacacaatggactgaggcccatgggaagcctcatttttgttggagcacgtaaacagtaatcttttggaggaaagagtaagaaacarggactagatcttcagtgtgaggaggcaggttttggattttattcagtagacagtggggatccagggaaggttttcttttttctttttcttttttttttttttttttgagatagagtttcgctcctgtcacccaggctggagtacaatggcacaatctcggctcaccacaaccttcgcctctcgggttcaagtgattctcctgcctcagcctgccaagtagctgggattataggcatgcgccaccatgcttggctaatttttgtatttttagtagagacggggtttctccatgttgatcaggctggtctcgaactcctggcttcaggtgatacacccgcatcggcctcccaaagtgctgggattacagacatgagccaccatgccagccccagggaaggttttctaggtgggaagtgacatggtaaaattagtctgaaggtggtgtctaagatgatagaaagggacttgggaggaagctaagttgtacaggtgaaacaaaacacggatctaaaatataggggtgacataaatccaggaaactaaagtaaaaagtcaacattgtgattctcagaagagaaaaacaaattaaaactaaaacattcaaaattttacctataactttggcaaacagatatgagaaaacaagcactcttatatttcactggtaggaatggatttggtaatgagcaatgtgaaggactaattatcagtatttatagaaaattcaaatgtacaccctctttcacccatctgtaaagttattctacagatattttcacacatctgcatgaagctgcttagacagcgatattcattattaagctgtttataaaggtaaaagattgagaataacgtaatgcttgacaataggggactggttaaataattagctacccaatcagtgaaatactttgtagccaataaaagtggtaagttatggtacaaccacaatggaaacggctgatagtttcttttttttcttcttttttttttttttttttgagatggagtcttgctctggtgcccaggctggagtgcagtggcgcaatttcagctcactgcaacctccacctcctgggttcaagccattctcctgcctctcccaagtagctgggattacaggtgcctgccaccacgcccagctaatttttgtattttcagtagagacggggttttaccatgttggccaggctggtcttgaacttctgacctcaagtaatccacccgcttcagcctcccaaagtgctgggattacaggcgtgagccactgtgcctagctgatagtttctttaaacatacacctaacctatgacccaaccagaagaaatgaaaacacaaattcacaaaaagacatacacaagaatgtccatcagctggtcagcggaaaagtatatacaagttgtgkcacatttatataatgtaaataccattaagcaataaaaaagagtgaagtactgatgcgttcaacaacatggatacatttcaaatatattctcttgagagaaagaagctagacactraacagtatgattatgattccttttagaaaaatttcaaaataggcaaaactatgttgtgatagaaaatcaaaacagtagctgctgttagggatgaggggtggtggagactaattggaaggagacaaaaggaactttctaggaaatattccatatatatatatatatatwttttttttttgagatggagtttcactctgttgcccaggctggagtgcagtggcacaatcttggctcactgcaacctctgccccacacaggttcaagcaattctcctgcctcagcctcctgggtagctgggattataggcacccgccaccacgcctgggtaatttttgcatttttagtagagatgcggttcgagaccagccatgttggccaggctggtctcgaactcctgacctcaggtgatccacccacctcagcctcccaaagtgctgggattacaagtgggagccaccacgcccggctaggttccatatcttgattgggtggtgttacatgtctatatacatttatcaaaatgaattgaactctatccttaaaatttaagcattttagtccattgaaaaataaaaaatagataacatgagtctatagtgattacatattacattttctaatatatattcttggatgttttatgtttagttgaaactaatttcaaactcaacagaaaagttgcaagaataagaatagcacaaagaatatcacatgccctttgtccagattcacccacccattgttaacattttatcatcatctgattatttcttatcatttgcttctctctatatatacttatatgatatatatatacacataagaatgttatatatttatgtttacttagaataatatttttacagttacatgtattatgtatgtattaccttagtttgttcgtgccgctataataaaatactgcagactcaataatttataaagaacagaaatttatttgtcacagttctggaggttgggaagtccacaatcaaggtgccaccaagtttggtgtctggtgagggacccagtctctccttccaagatggcatgctgttgctccctccttgggaggtgacgaacgctttggcctcacatggaaggagaatggaagagcaaaagaagcaaactcactccctcaagccctttatgttttgttttgttttgattttrgagatgggrtctctctctgtcacccaggctagagtgcaatagcttaggatcatagctcactgcagcctcgaacttctgggcttgagcgatcatcctggccaggttgctgggactgcaggcacacaccaccatgcctggctgatttttwaattttttttagagagggggttttgctgtgttgcccagactggtctcaaactcctgggctcaacctatcctcctgcctgggcctccctaaatgctgggattataggtgtgagccactatgctcagctaccctcaagccttttctaagggtgttaatcccatccatgaggaaggagccctcataacctaatcacctcctagccccaccttccaatatcattaccttggtgactaggtttcaacatatgaattttggagggcaacatacattgaaaccataacatgtattatagtgtatatgtatgtttagaatatgtttatgtatttatatgtagactatgtttatgtatttatatgtattgcttctgtatatgtattgtaatgcatatgtatttatctgtatacttagaataaatatacatataaagagatccatacacaatatatttaatatgaatacatatatacaagatatatgtagaagatctactctaggattgggtcgtggatttagttatcatatctcattagttttctttaatctaaaacattttcatagcctttctttgtcttttttctttttcttttttttttttaagacagagtctctctctgttgcccaggctggagtgcagtggtgccatcacagctcactgcagcctccatctcctgggctcaatgtatccacccacctcagattcctgagtagctgctaccacaggtacgcaccaccagcacgctgcaccatgcaggctatttttaaaatttttttgtagaaatggagtttcaccatgttgcccagactggtctcaaactcctggactcaagccatctgtccgccttagcctcccaaagggctgagattacaggcatgagccattgtgcctggccctttctttgtcttttttttttttttttttgaaatggagttttgctcttgtcgcccaggctggagtgcaatggcgcaatctcagctcactggaacatctgcctcccaggttcaagcaattctcctgcctcagcctcccgagtagctgggattacaggtgcctgccattacatccggataatttttgtattttttttttagtagagacagggtttcaccatgttggccaggctggtctcgaactcctgacctcaggtgatccacccacctcagcctcccaaagtgccggtattacaggcgtgagtcaccatgcccggccctttctttgtcttttatgctacttaagtgatacatgtccttcttggagtatcgcctggaggcccacggtgctcatctgtcccctattggtgatgtgaattttgatcccctagtcaaagtgttgtccactttcccaaatattaaatagattctttcccttgcaactaacaatctttgcagagacactttaagatcatgcaaatatcctgctcctcaaaaaagtccaatctctctttagtatccattaaagattcttgcctgaaacaacctttatttattggttacaaaataatgattatccaactccagcactctcatcatttactaatcagaagttggtattttactgtaagctagagctttcccttctcacctatttgtctattatcgttttggattcttagtttttcagtggtttgtcattcattgccattctcaattatcgtggtgctccagctgtcccagatttggccagcgggaaccccttcaagctgactcttgtgtccttgtgacatgtccctatcattttttttttttttttttttggcacttccttactttctggcctaatatgatcatctaggcccctctcaggcatgctctgatccagctttgttaccggccatttctcttaagagccctggttccttttggtgttgaaaatattaragtccaagatctggatgcaagatgtgctattactacttggtatctttgtttttaggctctttcagcagacagaagctgtaaatatatgcacgtatatgcacatatacatgtacacatttgtaattacaaatatcctagaaatcacaacttcatactgataccttaaatttcastccatgtaagatgtatatttaagtgagggtaaagtcaaggggagaacagtgtatccagtaagttcccatttggataaaataagagggctatatgtatgattgtgcatagatcatcttgagaaggatacacaagatatacaagaagctggttaaagtggttgccttctggatctccacctagatggctgggagtaagtgggaagggggaggatttttctatttagatagactttttctgttcaaatttattactatctataaatattatctgttcaaaattaacaaaaaatagctttaattaaaattactctgaaagagggctggacgcagtggctcaagcctataatcccaacattttgggaggctgaggtgggcagatcatctggggtcaggagttcaagaccagcctggccaacatggcaaaaccctgtctctactaaaaatacaaaaattagtcaggcatggtggcatatgcctgtagtcctagctactcggggggctgaggcaggagaattgcttgaacctgggaggcggaggttgcagtgagatgagatcacaccactgcactccaacctgggcgacagagcaaggctctgtctcaaaaaataaataaaaataaaattaccctgaaagaatattaaacccatctcagtgaagacttgccatcttagacaagggatttttctcatttttctctctcctttcctactcttattttccttgttttggttccatcctgtattaataatcaaatttctgaaaatcctttcttttctactttggggattagccaaactcaaaatgaatttcccattctattttaaatactcatttttgaaacacttgagtgtttaaggaaaatgtgaggcctgagttctttgctcagttttcctaacttgagtaactgttgatgtttgggaagagatggagactgacaagaagccgatgacgtgtcatcatcttcacgagtcccttcgtgactccccttcagaaatgaagactcatcaattcttcttgccactcaaaaacgtttggagttggaactgagcatttgaccaaatgtcacgcgtatttccctgattgcatataaaacacgtgttttatacatatgatacatatgatctaggtgtgctcatatgtacacagatacatttgtgacttatgccctccttctcaggtgatgcatctacacctaggagggactgaacatctactttatctcgatattctgactttagctacctctatttgtggtagtgtaggttgattccctgcctgacctgcttttaattttaaacttaaaatcaacttttgaaaaagctctcagtcacccaaaccctgggcacattgagtagggcattctttaatgcaagttcactccgtaagtaaccatttcacctgacgcacaaggtcacactccctggtagcgctgatgctccagaaacggcagagtctgaagttatcaagcttaatgaaatctaacttctcaatacgtgttgccttctcaatgacagttcaaactgtcagtttatcttctttatttttaaaacgtgttgtgatattagcactttactttgtagcttcctagcctctcttatattataacatcttcctggtcatttctagttagataattacattttcacgtgttggggggaaaggagtttattttgtctgactggtataggaatcaggtgggtcaaggatgtaattgtagccaagtgacagcctccctctacctttatctatggaggggaagtactttcatgtagtaaatggtttttgtttgtttttgttttgttttgtttgaaactgtgtcttgctctgtcacccaggctggagtgccgtggctccatcaggactcactgcagcctcaacctcctgggctcaagtgatcctmctgccttggcctcccagtagatggtttctgagtccctgttgctggccaggcacttccctattctggaacagctgtactcatagcagcctcataaaactgttaatgtgaagtcaccaaggcagtcttgtaaaactcctgaagaggctatgatcgtggaaattggttgcttaaaatggagtttgtrtcagaatacaggaaatgcttcttgtgcagttaaaagaccatrtatttctttgaaagaacggttttaagcatctatagataagaacacaaatgtatacagaaaaggaaaagaaacaagacatttttagcttttaacaattgttacaagaatatgcacgtatggtaaagttggtggggccacaggaagagacaggcttggaaggaagaagtttataatatccacatgtccaggggtcggggtcacctcacgccgcatgggctactggggaagcaccaagctttggtcaggaggcagaagaaggaggcagaggaaagtctaggacagagcgtttactggagttctgcaggcaaagcaaggcaggatttagtatggactagtttgaataactcctgcagtctttggggtataaggattgtctctttgttacatggcacctggccctgggatgacttagggcaaggtaaacaatggcctggtgtgtgagagtttgataaggtggtggttggggatttggatttgagactggttgttttgcgtatgaaagacctgctcccagctaaccccttccctgtctctaaraagtggttagccctggggtgggggtggcggggcagtctcttcctagtcatggaggccacaaatgccagagcctcaagagtacagaaaataagaaaatgtggctcatgtaattgaccctgtaatgagaggatgccaaatagacaaaaacagaatccaagaaaagacagaaaaaatgttttaaggccagttttacatgcttagtgtgtcctgtgggtttgatgagcacaattattctgccttttttcttcactatatagaatataaaaactttttaaacatttctatcctgtaaagattaaaagaagaaaaaaaatgtggggaaactgcctctcatttgtttttgaaaatttacatcaggtaaaattcactctctttggtgtacagttctatgaagtttgacaaatgcgtggtgttatccagtcaccacaataaagatacagaacagccccatcaccacgcaaaacttcctcactctgcccttttgtagccagcccctctccccatccctaatccctggctgccactgatctgctctccatccttatagttttgcctttttgcagagagtcatacaaatgcaattccagccatgtgctgcataacaacattttggtcaacaacggaccacatatacagtggtggtcccataaaattataaaactctatttttactgtactttttaaaaaaagtttttcctttcctttccttttccttttcctttcctttttttcttcttyttttttttttttttttttcaagacagggtcttgctctgtcacctgggcaggagtgcagtggtgtgatcatggctcagtgtaacctcagactctggggctcaagctatcctcccacctcagcctcttcagtagctgggactacaggtgcscaccaccatgcccggctgatttttttttttaatttattttttgtagagacaggggtttccttgtattgcccatgctggccttgaactcctgggctcaaacgatcctcctgtgtcagcctcccaaagtgttgggattacatatgtgagccactgccccggccccttttctgtgtttagatgtgtttagatacagaaatactttccattgtgttatacttgcctacaatgttcagtacagtaacatgctgtacaggcttgtagcctaggcacaataggttacaccagttagcccatgcatgtagcaggctgtcccatctaggtttgtgtaaatgcactttatgactgaatagcaacaaaattgcctaatggcgattttctcagaattgatctctgtcattaagtgacacatgactgtgtatactgggtagcctttgagtctgagtctgacttctttcacttagcataaaacagttggggttcatccatgttgctgggtatgcccatagttctttcctttcattgctgaatattatctcacattatagaggtccctgtttatctgttcaccattcaccaggaaagaacatttgagttgtttctagtttttagtgattaaggataaagctgcagccaaacatggtggctcacacctgtaatcccaaaactttgggaggttgaggtgggtggatcacctaaggtcaggagttcgagaccagcctggccaacatggtgaaacccwgtctctactaaaaatacagaaattagctgggcatggtgggtgtgcctgtagtcccagctactctggaggctgaggcaggagaattgctgaggcagaggttgcagtgagccgagatcatgccactgcactccagcctgggcgacagagcgagacgctgtctcaaagaaaaaaaaagaataaagctgctataaacattcacatacatgtgtttgctgggccacagagtaggtttatgtttaactttaaaagaaattgccaaactgtttttgcaaagtggctctatcattttgcattcccaccagcaatgtatgtgaattccagctacttcatactcttaccaccttttcaaaaacgagggtatttttttaattagtcatttaataggcatgttgtggtatctcactgtggttttaatttgctatttcctaatgattcatgatattgagcctcttttcatgtatttattttccatctgtatatgttctttggtgatgcttctgttcaaatcttttgcccttttttaattgggtttttgttttcacattgttgggttttgagagttctttatatgttctggatataaatcactgtctgatatatgacttgcaaatattttctctcagtttgtaggttggattttcattctcttaacagtgtcttttgcagagcaaatgtttttaatttggatgaagtccagcttatcagcttttcttttatgggttatgcttttggtgccatatcacagaactctttgcctaacccaaatatttctcctaaaatttctctgagaaaacactttctctactcacacaacacttctgacaactaatgtgtaggctgcttttttttttttttcacaccaagcagttctccaactgtctagacaccaatcaggggctctacaattcaattcagacactgaagttagcatcagatcccacaagttgagggctcagtccctcaagactgtccccacttcagatgctaattttaagtctgggcatcctgtacttctgacctaccagctgtggattaggggggttctgacagcctcctccttgggttctataatttgctagaatgactcacagaactaagggaaacactttacttatgtttactggtttatcataaaggatataactcaggaacagccagatgaatgagatccatagggcaaggtgtgtggggtgcacagagcttccacgctgtctccagcataccacccttccaggaccttggtgtattcaccaacctgggagctccttaaatctccttgttctagagtttctatagagtttaatcttcttcttcccagaggtcagtgagtggggctgaaaattccaaattataatcacttattttttctggacaccagctccatccagaggctatctagagttcccaccctgagtcaccgcattcatgtaaactcaggtgtgaccaaaggggttcattataaataatacaagatactcctatcactcaagaaattataagagttttaggaactctgtaccaggaaccagggacaaagactraatacatttcttactataccacagttttcttctacattttcttccaagtttaatgtttcatgtttagatctatgatccattttgacttaatttttgtataagatgtgagatatgtcagcctaaataacagacagggagaggctctctaaaagaaaatatttattcaggaacagggcattgaaatgggaatatgtgtgacatagtaaactacgtgcttattcaggaaggtagagggagacagaggtttttaaagggaacatgaggagcattatgtaattgtttcgagatcattattcttggctacaaagatcaataacaagagcgatgccagtcggaagttggacaggcagttgaatgttgcaatggcctgtgtgccaggttgtagtttttgccgtcctttgtgatagttttgttatcaggcatacaagtgtgagaaccctttctttgcagtcttccctggcctattggttaggttttatttatttatttatttatttttatttattttttgagacagagtctcattctctcacccaggttggagtgcagtggtgctctctcggctcactgcaacctctgcctcccaggttcaagcgattctcctgcctcagcctcccaagtagctgggattacaggcgactgccaccacgccyggctaatttttgtatttttagtagagacagggtttcaccatgttggtcaggctggtctcgaattcctgacctcgtgatctgcctgcctcggccccccaaagtgctgggattacaggtgtgagccaccatgcccggcctatttatttattttttaatactagtgactctgttttgattctggctactttcataggtgtgggtcaagattcctatttttacatatgaatgtccggttgtttcagcaccatttgtttaaatagaattatttctccattgaattacctttgcacctttgtaaaaaatcagattagtgtttgccggggttcagggagggattttgggggtgggagatgactgaaaggtgcagcacaagggaggtctttgtggcgatgggacagttttgcatcttgcttgtactggtgggtacaggaaacaacrtatgtgggaaaatgacagagctacacacacattataagcatatcaaattcctggtcttgatattgtactgtaattatgtaagatgtaaccattggtggtgaaaggtgcctaggacctctctgtactgcctttgtaacttcctatgaaactataattatctttgcaacttcttgtgaatctataattacttcacaggataaaaaggtttgtgggtttttttttgttttttttttttttttttttttttgagacggagtttcactctcattgcctaggctggagtacagtggtgtaatctcggcccactgcaacctccgcctcctgaattccagcgattcttttgcctcagcctcccaagcagctgggattacaggcacccaccaccatgcccggctaatttttgtatttttagtagagatggggtttccccatgttggccaggctagtctcgaactcctgacctcaggtgatctgtccgcctccgcctgttaaagtgctgggattacaggcatgagtcactgcgcccagcctcttcacaggataaaaagtttaaaaaatcaattgatcgtatttgtgtgggtctatcaggacttgctttttttttcccattgatctatttgtccatcctttgtcattaccacactcttctttactgcaattttattaagttttgaaactgacaaaacttatgtgactcattcaacttttttcttcttttacaaaattgttttacctatttgatgtcttttgcatttctatatgaattttagaatcagtttgttaatttctataaaaagtcagctgggattttgattatggaattgttttgactctacagatcaatacttaacagtattaactcttctaatataatcctttgtttttaattttcacttttcgctttcaacttaaaattcctcttcgtcatctaaagcttaagatgagaaagcagagttttggcaagtgtgggatatcacacctccctcatggtacagaaaatatgcagcctggcaggataggtttctgaaactccagaccctgtgcaaggttacttttgcctaatacaatgttgcacattgggtcttttttaaaatgtcgattattaccatagcaactcatactccaagaagcaaaatacatttttagcttgataatttctaacgacctgtcctaaaatttctaattttagaaagaataaataccttttaaaaactcccataagtggtttaaaatttttaggtgggaaaggcacagatagattcaggtttttatccattctcatattataaagatacattttaaaagccccaaaccattttcagaagtggaggagcaagacatggggcctgacaaggttaaggtggtgataggtggtaatcaaatcccacagagcctgagtctctctagaacagggtctgtcttgtttaccttattatcccccagtacctggcacttttttttcttttattattattatactttaagttctagggtacatgtgcacaatgtgcaggtttgttacatatgtatacatgtgccatgctggtgtgctgcacccattaactcgtcatttagcattaggtatatctcctaatgctatccctcccccctccccccaccccacaacagtccccggagtatgatgttccccttcccgtgtccatgtgttctcattgttcaattcccacctatgagtgagaacatgctttggttttttgtccttgtgatagtttgctgagaatgatggtttccagtttcatccatgtccctacaaaggacatgaactctacattttttatggctgcatagtattccatgatgtatatgtgccacattttcttaatccagtctatcattgttggacatttgggttggttccaagtctttgctattgtgaataacctggcacttttttttagtagttcaatacatatctgttgaaagagtaaatcagttttgttgcataattttggcctatagactttaggccacaatttttttttttaagagatggggtctccctctatcacccagtctggagtgcagtgatgcgatcacagctcattggagcctcaaattcctgggcccacggagtcctcctgcctcagcctcctgagtagctgggattacaggtgcaaaccaccgtacctggctggtctctaatttatattctcattccaaagtggattcattccttgactaatactttacaataatagaaggaagtccatattcttatgtcctctgaccaagagttaattttcaaaataatcaacagggagtgaaaaaatataatgtcatagttaaaggcttcaaagatgtgtttcagagataggagtgaggagtccttgtcccactcaggagtgagtagagggtgtgatatagtcactgagtgagccagaaccacacccaggccagaactactgccaaggaatagaaaggggcaattggggatgcgtcagcttcctctggatgtgtgagtgttcgctcatcagcggaactgctagcttataaaacccaatgccctgtcacctccagatcccctcagtgcaagctaaagtagggacacatcaatattcttcatcggggcgcaccagtgtagtgagtcttttcaatgcatactctttgtgtttccctgtattctagttttattttcacatttacccgaccagctttgattgggcttctcatggtagactttcaggccattgcacaacacttgattttggtggctgaaaggtgtaccttagcttgggaacttatgactgaaaattcacgtaaagcaaggcctgacttctaggtagcctggaactgtgttccctgagccaagtcaacattttgtcacaggctataccacgctttggtatttctcactcaaaagcaaaaaatggaagagactttaaaatatttccctgctggatatagtaacttttttttttttttttgatgtggtcttgttctgtcgcccaggctggagtgccatggtgcgatcactgtttgctgcagccttaacctccaggcccaagcagtcctcttgacttagccacccaagtagctggggccacaggtgcatgccaccatgcctggctaatttttttttttattttttttctagtgatggggtcttgctatgttgctctggctggtctcaaactccaggcctcaaatgattctcccacctcagccttccaaagtgctgagattaccggcatgagcgactgtgcttggctgtaaccatttttaaatataaatgcctgataaagcaaagttggagtatcatttaaataataatagaatataaaatataattatgataagaatagaatstaaatgagctattatttaatgatcaatgaggagtatgtttaattaaatttttaccttacagatcatcatggtaaactctgtctctgaccttcacggctacatcgacaaaagccaactgacccgggaattaggggggactttggaatatcgccacggtcagtgggtaaatcaccgcactgtgagtaccagcttacgtgtgcttttcactgtctctccttgttttctggaagatggggtgggggagttaaagatcaactgccaggaggtcaccctgtgmctgcctgaccttggggtggttgggatttctcagccacagggtggggaagaaggagtgtggaagggcgaaggctgggatttctcctgttgaccaccttaccccactgcatctcccggtgtgggggttttgggacacttaccttcgaatgcacctgggaagtttccagaaacaccaatagcctgttatacctcagagaaactaatttacttcatgtgggatgggtcttagacattaacacaccacagaactccccagatgattctaacgtacatacatattgacacccatgaagtcagaagaagctacatttaaatagtgtcaccccccggggactactataggtgagaaggtgggagggggacaaggattgtagaactattgggtacgatactcactacctgggtgacaggatcaactgtaccccaaaccttggcatcatgcaatatacccatgtaacaaacctgcacatgtacccccgaatctaaaatcaaagttgaaattaattttaaaaaattgtcacaataacatgttgtctgatgttgggtgagtttctaagcatttctgagcttgtttcttcatctgttaaaatgggactaacacagtatttctctataggggataattttgcctgcctcctacatttgtcaatatctttagacttttttgtagtcataacttagtggggaaagttaactggtatctggtgggtcgtcagggactccgctgaacaccttacaatgctcaagacagcctcccacaacaaagaatcctctggcccaaagtgtgaatagccaatgctgagaaaccccggactaacgaaagcctcctgaaagtttgatgtggggaataagtgatgtattgtctgtgaaagcacctgatatatagtattttactttttcctacctactgatactggtgattgttatgctaagttaggagtttcagtaatattgaggaaaaagatcaaaactcatagtcatggcttgaatgttggcgtcccctcaaaattcacatgttggaacctaatgtgatagcattaagaggagggggcttttgggatgtattaagtcatgaaggctctggcatcataaatggagttagtgcccttgcaaaagaggttgaagggagctgttatgccccctctgccctgtaagggcacagaaggcatcctttatgaggaacagacctccaccagacaccaaatctgctggggccttgatcttgaacttcccaacttccagaactgtaactgtgagaaatcaatttctgctgcttataaattacccagcctaaggtgtttttgttataggccatccctggcctagtatgtagccatggtttgtggttgtgtatgtgctgaacattttctagtgaactttaaaaaatacaactagtattgaaagaccagagatattctttacatgccttttacatgtatatattttttatacacacacatacagtcgtgtttcattttattatgcttcacattagtgggcttcacagatattgcaatttttttaaattgaagtttcgtggcaactttgtgttgaacaagtctatcagcaccatttttccaacagtatgtgctcacttcgtgcctctctgacaaatttttgcaattcttgcaatatttcagagtttgttattactattatatttggtttctttttctttctttcttttttttttttttttgagacagagtcttgctctatcacccagactggagtgcagtggcacaatctcagctcactgaaacctcagcctcctgggttcaagcaattcttctgcctcagcctcccaagtaactgggattacaggcacgcgccaccacgcccagctaatttttgtatttttagtagagacaaggtttcaccatgttggccaggctggtcttgaactcctgacctcaagtggtctgcccgccttggcctcccaaagtgctgggattacaggcatgagccactgcacccggccaactgttatatttgtaacagtgatctgtggtcagcaatctttggtgttgctattgtaattgttttggggtgccgaaaactgcatccatgtaagacagtgaacttaatggatatatgttgtgtgtgttctgactgatccaccaactggtcatcacctgtctctctccctctcctcgggcctccctactctctaagacagaacaatattgaaattaggccaattaattaccttacaatgacctctaagtgttcaagtgaaaggaagaatggcctgtctctcactttaaatcaaaagcttgaaacgattaagcttaatgaggaaggcatgtcaaaagttgagacaggcagaaagctagacctcttagcctagccagttcgcctagttgtgaatgcaaaggaaaagttcttgatggaaactaaaaatgctactccagtgaatacatgaatgataagaaagcaaaatagccttcttgctgatatggagaaagttttagtggtctgggcctggatagaagatcaaaccacccacaacatttccttaagccaaagcctaatccagagcaaggccctagttctcttcaactttattaatgagagagatgaagaagctgcagaagaaaagtttgaagctagcaggggttggtttgtgaggtttaaggaaggaattcttctctgtaacatacaagtgcaaggtgctgctacagaagctgcagcaagttatccagaagatctagctaagatcattgctgaaagtggctatactcggctcggcgcagtggctcatgcctgtaatcccagcacttgggaggccgaggtgggcagatcacctgaggtcagtagttcaagaccagcctggacaacatggtgaaaccctgtctctactaaaaatatgaaaaattagctgggcgtggtggcgggtgcctgtcatcccagctactcaggaggctgaggcaggagaatcgcttgaacccgggaggyggaggttgcagtgagctgagatcgcgccactgcactccagcctgggcaacaagagcaaaatttgtctcaaaaaaaaaaaaaaaagaaaagaaaaagtgactacactcaacaacagattttcaatgtaaatgaaacggcattctattggaagaagatgccatctaagacttccataactagagaagtgaatgcctggcttcaaagcttaaaaggacaggctgactctcttgttaggggctaatgcagctggtgaccttaaatggaagccaatgctcatttaccactccaaaaatcctagggcccttaagaatgaggctaaatctactctgcctgtgccctagaaatagaacaacagagcctggatggcagcacttctgtttacagcatggttaactgcatattttaagccacctgttgagacctcctgcttagacaaaaagatcctttcaaaatattactgcttattggagattcacctggtcacctgagagctctgatggagatgtacaaggagttgaatgttttcatgcctgctaacacaacatctatgctgcagcttgtggatcaaagagcaatttcaactttcagttttactatttaagaaatatgctttgtaaagctatacctgccatagatagtgattcctctgatgggtgtcagtagagcaaattgcaaaccttctggaaaggattcatcattctggatgcctttaagaacattagtgattcatgggaggaagtcaaaatatcagtattaacaggagtttgagagaagctgattcccaccctcatggatgactttgaagggttcaagactttagttggggaagtaactgcaggtgtggtggaaatagcaagagaactagaagtggagcctgaagatgtgactgcattgctgcaacctcatgataaagcttgaatgaatgaagaacagttttttacggatgagcaaaaaaagtgatttcttcatctttctggtgatgacgttatgcacattgttgaaatgacaacaaaggatttagaatattccataaacttagtctacaaagcagtggcagagtttgagaggattaactccaattttgaaagaagttctattgtgagtaaactgctaccaaacagtttcgcatgctacagagaattctttcatgaaaggaagtcaattgatgtggcaacttcattgttgtcttactttaagaaattgtcaccaccattccagccttcggcaaccatcaccctgatcagtcagcagccatccacattgaggcaagaccctccggcagcaaaaagattgtgatttgatgaaggcccagaagatggttagcattttttaacaataaagtattttgaaattaaggtatgtggaatttttgacataatgctattgcacacttaatagactacagtatactgtaaacataacttccctttgcactaggacacaaaagaatttttgtgactcactttattgtaacattggcttcattgcagtggcctagaaccaaacccacaatatctctgaggtttgcctgtatatataactaggaataatataaccacacatatacagtacatattgttttataagtgagatatatagattcttttctgtgtgacagtgcattttctgggtgtcacctctttgaacgagagactcagaaagttagaactcaaaggaatcttaaagatcgtgtgactcaatcactttattttatagataaataaactgacgttcagtgtaaagaggtgacttatccaaagtcatttggtcaactagtggcagcattgagactaaaaccagmctctttttaatctccctatcagaatcaggtcctctataccatttccaaggtgaggtgattattcactaattttatcaactaaatctrttgtctttccatcaagacagcatgttggtgaatgttaatctctccatattgttacaattgtctgaccttccaggccatcgaaaactttgccttgaccttgaagaccactgcccagatgctgcagacgtttgggtcctgcctggccacagcagagctgcccagaagcatgctatccacggaagaccttctcatgtcccacacaaggcagcgggacaagctgcaggtgagcggtcagtgacctctcagaggccagtgtctgtgccagcaggtatgcctgcctctcggagagagctggaagcagaattaacagttaagccctcgttttccttcttctttagtgacttggaagccactgatmatcttaaaccttccagacaggcagtttgtaatgamagaaatctcttgagactgggtggtgagtgagtctcttgagactgggtggtgagtgagtcttttgagactgggtggtgagtgaagaacggtgggaagcagcacagggaagggcttttccagctttgtccgggtgagctgaggcatgtgagcaccctttcaagggttgccctctcgtgatcctgctcaggacagagcaagacagaacgtgctgaaattgcaggggtaggggctggcttttgaagtataagctttccagcagtggttgtaaagttttggggcagactaataagcggacttattgcttcactttctcaggagtgcatctttttatttggggatgaatttgagaaaaaggactacggaaggcaccctgtcctgagttgaaggtcaggcacctattaaatgattcgtaaaagcacgtcagaacctgccgagaaaagggagcttggcaggttctttcactcatgcagtacagggaaatcttcccggggcttctccctggatgagtgttggcacctttctaccttgagaagcacaaacagaacgaacccattatttcacagaagcccagttttcaatagggcagcaaaatgaggattggacggtcagtgtatgtgtcttggcctcatggaacttgggaagagttgaactgttgtgtctgtgaccaaaaatttgcaaaaatgctttgctagatggttgatttgttcgtttattcaacatttattgagcacctaccactacttgccaggaaaaccaaaaactcaaccttaacgaacacagtctagttaggagagtctcagagtctagtaattgaggcaaattaatgcttccatgtgacagggaacaccattaaattcagtctttaaggaggttgttattcaaaaaaacaatggccgggcgtagttggttcacgcctgtaatcccagcactttgggaggccgaggtgggcggatcacttgaggtcaggagttcaagaccagcctggccaacatggtgaaaccctgtctctactaaaaatataaaaattagccaggcttgatggcaggtgcctgtaatcccagctactcaggaggctgaggtgaaagaattgcttgaagctgggaggcagaggttgcagtgagccgagatctcgccactgcactctgtcctgggtgacagagcgagactccatctcaaaacaacaaaaacaacaacaacaaaagagaaaraatatattccaaagattactgtcagtaatcaaaatrtctggaatgggctgggtgcagtggctcatgcgtgtaatcctagcactttgggaggctgaggtgggcagatcacctgaggtcaggagttcgagaccagcctggacaacatggggaaaccttgtctctactaaaaacacaaaaattagctgggcatggtggcaggcacctgtaatcccagctattcaggaggctgaggcaggagactcgcttgaacccgggagatggaggttgcagtgagccgagatcatgccactccactccagcctgggtgacagagtgagactccatctcaaaaacaaaacaaaacaaaacaaaacaaaaaaacaccaaaataaaacaaacaaaraaaaaaaatctggactgaaattgtaaaatcctgatgacatcatgaaaattttccctgaaaatgcctctgagaagcttggcctttgcttttccaaacctactggctaagttcacgtgattcctaggaggtatgagttgctgaaagcagggtccaggtgcctccatgaagtgtgctaggaaggagtttgcagttgcacaggcccacaggtggtccctgaccaaaaggagtctgcagagtggtcctgttggtgcaaaggggtgtcatgggaaggacgcccagcgcggcaaggactgtgaaactgagctgtgtgccttgggctcatgagcacggtgcgttctttgcctcaatccaagaagggcgtggagaggtcgaagagcagaagcaccgggatgacaatgtggtcagtcaggaaggtctctggagaaaaggttaaaacatttagatttttagataaggacacataactagggggtgaaaaccagccagtcaggtcttgctgtatatgctggtgggcaaggcagaggggtggggacagggaaggcagatgagtgggtgttctatagtttctctacacaggcaaagagttctgcagaggtaaaaaggtgggaaagaaccagcttccaggatggagtaagaggatttccttatgcatgctaaccagctgttctcagaattaaaacaggcagctctgagcaaaggaggctaagacttctctcaggttatgggttggagtaaccttggaggccacatagttagaagtattatttgacatttatactctattacattaatttggttaaacaccccctatccaacctgtaagacaagtgaaaggaaattagaaggttccatttaattggccttttagtaaaagaaatgcttgcatttatattccatgcagctctaaaatcatggtgaagacctaaaattattttaagacaaaattctcaaagcratttaatttgtccaagtgtttacctcgattaagaatattaagtgaatttggatttaaaatattatctttattttaccaagtaatattaacatcctttaaaagacaatacaggctgggcacagtggctcaatcctgtatgtagtcccagcactttgggaggccgaggcgggggtggatcacctgaggtcaggagttcgagacgagcctggccaacatggtgaaaccccatctctactaaaaatacaaaaattagccgggaatggtagctggcacctgtaatcccaggtactcaggaggctgaggcaggagaatcacttgaactcgggaggcagaggttgtggtgagctgaaatcactccattacactccagcctgggcaacaagagtgaaactccatctcgaaaacaaaacaaacaaacaaacaaacaaacaaacaaaaaacaaaccaaaaaaatacagagaatttcttaaggcctttttgtgattactgattattgtcctaattcaaatctgatttctttgttygttatcttgtagcttagaagcaagaataccaaaatcattaaactagagttatatatttcctctttctcatccaaaaatggcttaaagagagaaatggtttatattagaaaaaaagagatactggccaggtgcagtggctcacacctgtaataccagcactttgggaggccaaggcgggtggatcacctgaagtcgggagtttgagaccagcctgaccaacacggagaaaccccatctctactaaaaatacaaaattacccggacatggtggtgcatgcctgtaatcccagctacttgggaggctgaggcaggagaatctcttgaacctgggaggcggaggttgcaatgagctgagatcgtaccattgtactccagcctgggcaacaagagtgaaattctgtctcaaaaaaaaaaaaaaaaaaaaaaaaaaaaaaaaaaaaggaaaagaaaaaaagagatcctgtttaaacttgtattaataacttagtaggtttttggggttatttatgcatattttattttaccgggagtggtcttttacctaccttttaatcaaagattctatatgtcgtcaaataatttcttttccagctggaaaagtgaaaaactattataagattcattcttcagtacagtgaacttttatatctatttaattatctataaaagttgtagcgtgtgatataccattttctcccagcctggagagtgttttttcctaaacaactagcacagcttaggggatttggcttgatttcttgaattcctttctcctgggatttttgagatctcttatcttaggtatatgtgtctggtcgcccaaacaatcaaacagaataggagagccattgagttggagaggttttcagccttacttgctatttctccagggagttgttactattttgttcaaaataatcttccagtagaacctcttttcttttggcccttcagtatattaaaccagtatgttcacacagaaaaaaatctctaaacatccacagtggaacaatcgtatcaaacttctaagcaaactgatgactttaaagaaggctcttccccagaaacataaattctttcccccagcctgagctacagtttgggccttaatgtattcttacaatcagagagtgctcccgacttcagtaagtgctattttctctccaatcaaattgcgggcaccttgggcttcatgataaatttgaaaccttattttctctgtgatttcactctcatctgagggacagaaaggaagagcaagtcttgtaaacacaagcagctttagccttccctgggagagctcagctcctgatgagtgagacaagcagacaggactcagctgcccgtcattcctgctgtgtgcctttccacccatcaaggagagtacgagcaagtgctcagggcacacgcacaacggcacctccacctcgtctgccagttggatcctgttccaaggtggtggtggggctcccrttttctgaggaaagggaactttggtaggcaatgagctatctctcagtttataagcagtccttaccctgccaccaacgggaccctgtctgcacagggaaaaggagactctccgaaagggagcatgaacttatacacatgttctggaagatagtgccctgagtttctcctccagcctgagtgcgggcagtaaaaaaattaaatacccaaaaagtttattttctttccatggaaactgaaactccatttttaaaaaggctgagcaacttccccttaccctttccaagtaccgtagttgctccatctttccgtctgtgttcatgacagatttttgtaaccctactcaagttgaccctgtggttgaatcccaaagcagtcaccaggtcacaatttttgcttgtatcctttttaaacagtgtaaaggggatatatagtgtgtgacatcacttgtgaagattcaccttccctgtctcacacactttcctcattcatgctctgccgcactttggatgtatccctcttcccagcttccccctccagtgtctccttctgctataccaatatggcgtttctcctttagcctctccacctttcttcccaactcttcctcacatatggatakgtgtgtgtgtgtgtgtgtgtgtgttgctggaagctcagcagcagttaagaaaatgagtgggaaaagccaagaccctctttagtaggtgggatgaggaaatggctaagatactgacccaagagtacatttttccatcatatctaatttgtctttattcatctgcaacctgacttcttttaggctgttattaatttatccaacctacaaatatttcatgagcattgatgagataagaaatgagggctgacacatgagaatggaaaagaagagatatgcctgattcccaggcaaaagtgccagccatgtggctaatgtggggcactgtttggagtggacagagccagaggaggtgtccaaagaaccctgaagggccagctcagggaagccaagtccatcatcagccagatccagggccaggtttgaggatgggtatggcaatgtaacccttccaggggaaattctggagtaggatgggacacaaggaacaaaggtaccagcttgagagggtccaggacttctgtgtgatcagagtggggaggtctaaaactcttcccacagrgaatgagctctaggctgtgtgaagaccacacaggtggctgggcctagaggaagtgattcagtgtttgcgtgcagaggtgatcccttgatttgttttagaagtatgggcctgttctaatgctcaagggcataccaaaccagcctcctctgacccaggaaccaaacccataattcccaagcacaaaattctaggtcaggctctgccacttttgttttgcagtctggactttctttatgggtaaggctcagggcaacgaatgatgacctgcactgtccaaggaaaggactacagctgttggctttggaaggaagtagccttccacagctgcatagtactaagtctctgttaaaagagtagaatggggggttggcttggaagtatgaatctttccatgttaaaatgaaattgctgcccatatctgccaaacttaaataattaaacaaggccatagttggttggcaggtggagggagaggcaggtgtttattgatgagaccaactgaagtatttttatgatcaactagcagttattacattattattgctcagtagtttctagcgttcaacattcagtatctatcattttcttgtttctggtcactatcttggattaaaactagattgtattaactagttttgcttttaatttacaacaatagcttgagatatacaaaaagcagatgttgattttgaagaggaaaaatatactttttttgatgtataccctttcggatattttgaattttgtatcatgtcggtgtgttacctgtcaaggataagttaattgattaaagctgcatcttgacttcatcagcatttaatttcctaaatgaaaaatgtactgatctactattctcttcacctcaattctaccaagaatttgttttttctaattcgttctaagagagactacttttattttctaggatgagctgaaattacttggaaagcaggggaccacattgctgtcatgcatccaagaaccagcaaccaaatgtcccaacagcaaactcaatctcaaccaacttgagaatgtaactaccatggaaaggtgagtgagtgaagtggaatcagccttttcaggagagaatatgtagacctagatgttctggagcaaccaagaacagattggaacagccaatattgggtcttggtrgggccaaggaagaagaatatttgagacaacaaaggaaaaaagaatacgtccgtctggcatccacatacagagatctttttatgagcattctattcccccctcttcaatgtatatgacatgttcccaccctaggattttgagrgagagggtagtatttactgggcttcatttccaagtaacagtttagcttggagctgtgctttatattcgtgtagtctcaggtagaaagaaagaaggcatgaaggtaagatcagccggagcacattctaaagcacagcagctgcatctgaagcaaagtcactgcctgcactgtggatgtcctgattggaaaatgaaaggtgcaaagcctgctgagccagaagaaaggcataggtgacacatgctttcataataatgagatggtcacaattgacaccactgaccgaagacacaggtgttctagccataggcctatatggatgcctgtggaaatgaatgctaacctaacmtcactttctcattctttcttgaaaggttattagttcaactggatgaaacagaaaaagcctttagtcacttttggtctgagcatcatctgaagcttaaccagtgcctacaactacagcattttgagcacgatttttgtaaggtattcttttcttgtttactgtaactttcttttctggtaccgggacytctggttttctctccctcctcactctttggtatggggtttccctcttttccctaawccagctttctccttatctccttgcttctttacagaccacccmctccaacccccttctcactttttcagtggagtcaaactgttctagaatcccatttacctgttgatgtacatggcatttcagtgatggtttatcttccttttttttttgaaacagggtcttgctctgtcactccggccggagtgcagtggtgtgatcatggctcactgcagctttgatcttctgggctcaagctatcctcccacctcagcctcccaagtagctggaattacaggcatgccccaccatcacacccggtaattttttttttgagttggagtctcactctgttgcccaggctggagtgcaatggcgcgatctcrgctcactgcaacctccgcctcccaggttcaagcgattctcctgcctcagcctcctgagtagctgggactacaggtgcccaccaccacactcagctaattttttgtatttttggtagagatggggtttcactgtgttagccaggatggtctcaatctcctgacctctgtgacctacctgcctcggtctcccaaagtgctgggattacaggcgtgagccactgcgcccggcccagataatttttaaatatttttgcagagacgaggtctccctatgttgcccaggctggcctcgaacttccaagcacaaacaatcctcctgcctcagcctcccaaagtgctgtgattataggcatgagccactggacccagctgtcttcctttttgattgattatctgttgaatatagttctaatagttcagctacaggtgaattctgcacccccagcttaatttgaaagttagtgagctgcaaaaaaaaaatttttaacatatatagatatatrcaagtcttgaatcctttttggaattttgagttttcttgaagcataacaaacctataccttcaggtgagtgagtgttggtttacttctggactgttctaatgtttcttgtaggctaagcttgccctggataatttgctggaagagcaagcagagtttacaggcattggagacagcgtgatgcacgtggagcagmttcttaaggaacacaaaaaactggaggaaaaaagccaggtttgctttctgacatttttgtgtactgggagggaggttgctgtggacaatgatggatcatgtccagtcattgctattggaaggttgctaaaggacacaggaatgcccagtcctgcccttcagtcaccccaggatcccaaggagagaggcacattaacaactgctatgaataatacgggcagcacagagtcctattaaagctgccggaacatacagttgcagttggacgctcaggtcgggtgaggactctggaccagccctgccctctcacgtggtcagcagccaagtgggagaaggtcacaacaggctcatcactcaccagaacaattatatcagaggctcacccatcagcttgagctcctccctggagcctggactagggggctgggggttgtggggttggtagtaaggatgggaaactttcaaaggagaaaccagaaaaaaaaaaacaactagttttatacctggagcaagacaattagatgggggaaattggtccatgttagttccattgctacacagaattggcaaagctttctcctttctcatgtcccaagagttgtaaatgtgaaacttgtaaaagaatatgtattttacagtcccatactggaattaaacagtgtcccagatccgcacacaagtcagcatttagaaatgattccattttaagtgtttacagatttggtttattacaaatgaagaaagctgagtcgtctctttccagagaagttcctttctgcttgtttgaaattaggttctctatatttttgggtcttggggaccaagtcccctgtggttagcgcttcctttcttagctaatctggaggcatgtttctcagacggcaattttgcagtactagagatttgccaaagtgtgagcctctggccagcagcacagatgtcacctgagtaagcgctaattagaaatataaaatctcagaccccaccctggaattggaatctgcattttaagaagatccccaggtgattgacttgtacgttaaagttggagacacacacccctaaaggatacaaaacaaagtataccaaggccacactgactctaagagctgttggttgtagattctgagctgcaggtgcttgtgcacatgcatgaacacacaaacccagctgtgtatccagatccccattcaggaatcccatcccttcacagcgagcgctctttctcttaccagtgaccatttgacagataaactagtgctaaagacacatgagtcatcaggaacatttatcaaacaatggaaaagttgaatttcatatatatgatgactagataccttagattctccaggacagccccaaccttatatcattttagttttttcaaaataattttttactgaatatagatactatatttttttgcttattcatatattaagaaaaagtgcctcatcaaaaaaaatgccttcatatatatatgaaagtagctactgacctatccagagggttatttattcatcaagaggtattccttatcctaggttccgtgggtgcagcggtgagccagacagtccagaatctgccctcatggagcttacattctactggagagagacagttcactaaaaagcaatcwaataaataataacatcagatagtaacaagtgatataaaaaagaaaacaagatataatagaaagtgactggggatgctactttagctagaatggtctggaaaggcctgagaagacgacctttggtctgagatctgtttgatctgtgtaatcatgcaaagacttagggaatagtatcaaagcaagagcgagctgcaggtgcaaaggtcctaaagtggaaatgagcttggtgagttcaaggaacattgctagagcaggtgggccaggaggaaatgagtgaacagagatgagcagaggccaggtagtcctgttgcaccctgagatcttttgtgaggatttgaattttattctcagtggaacagaaagcccttggaaggcgctctgggctgtgtcttgaatagtggcgatggatctgcatgactgcatcacattctttcttctgcccacttccttgaacttgtggtccttggtatatacttcaaaagttgctgaccagagttagggatgaaacctgtggttatggaacacaggaatgctctgtgaacccatgacccacctttcgtgggcaacattcttgaagcagctagactagcccactgtggatgacctgtgacttgcaggatttgcagacctgtcacatcctatgacttgcagatcttatttctaaacttgcttcctgaaggatgtagtacacctgtgtctctgcctttgcgtaaatcaaacaaagctgtctcatcgtaactgagatcgttttcaatatatcttccctcagacttctcagacacatggcttcttcagatgattagggcttggctaatctttccatttgtcctttaaagtgttaaaggaacaagactgtgtctggccacaatctgacaaatatctgcctggagtttgtcctttactcggcactaaggggccagctccctcccagcacagccacacgctggctctggggtgttgccagcttccttattccacacagtgacatcattctcacaagtaacctcagtcaactcactaaccaggctcctgtcgcatgctgattcagcctgttctttatcttgttctcgtttgagggtttagcagtcttttgaatgctccttcctgattctgaaaaacagtagtttcaaccacttacagaaggtcttctataaaagcagaacttgcygcagggttttgactgtgggccgtactragacccttgctgaggggccagcagggaacagaccaggacagggtggaggaaccacctgatttcagccttgacctctccccataagggtgctgtgtctaagaaggcatggaacccaggccattaacatctaaggatgtcatcttgttggagggtcatggctttgtgtacatgtgtgaaattttcaaacacmcagagaagcagatagactggcacaatgaactccaagtgtccatcattcaatttcaacaaccattagctttctgcctttcttgtttcatctggcccacctccccatacacacactccatccctgtggatcctctgtgggtttgttctagattcccggatagagtagcatcactcgctttctygccaytttcttccctagtaggcactctcatctctcatctgttataccagcagastcctcggggggaaataaacttatttcaataaagatttctgattgcaacttctaagctgaaacttgacgatccagccttctggaattttcagcatctgaaagatcccagatgggcttgtgatcagaagattttagccattttttccctcactctttcttttttactttggagattttgatgactatttatcctgagtgggaggtatataaactaaaaaaataagcttcaatttggaggtktcaccataaatttctttgcaggcaccaggaggatttcatagcacatgtgtagaggccaggtgggctggaaggtgacaagaacacaggctttggaagtcrgatagggatggattcaaatcttggctctaacaagtaccagctgtatgaccctagtcacgtttcgtagcctttctgaatatggtccccctcatctgtaaagcagaggtaataattcctgcctcacagagaccttgtgaagattaaatgagttagatgtgtggtagggacttcatgtggtcagcttgcaatatggttggtggtcagtagtcagtggtcagaaactattgttgtcctttcaattctgtaatagtgaccttccagccatgtggtggctgaatccgggttgctccttagttgcccttttttttgagacggagtttcactcttgccgcccaggctggagtgcagtggcacaatctcagctcactgcaacctccgcctcctgggttcaagcgattcttctgtctcagcctcccaagtagctgggactacaggtaccctccaccacacccggctaatttttgtatttttagtagagatggggtttcaccatgttggtcaggctggtctctaactcctgaccttgtgatccgccggccttggcttcccaaagtgctgggattacaggcgtgacccactgcgcccggcctcctcagttgcctttatgggcgtttctccctagacccatttggacctgttacacacatcttccctctaacatctcaaatgtcttctggaaaattctgaagggtgaaatactgtatgctgagggaagggcaggctctgatcaccacagggtgatttggaagtatcctgtggtgaatttccctggacccagaaaattctgccctgttcttaataaattaggcagctggacttaaaaaaaaaaaaagtgtcaacagagactttcatgccaagtctcatgtttctatatttgactaaagtcagacaagttcgagcaaccaaatgaggtctctaagtttaggcagaacaagtgcagccatttttctctgtgtatgttggtctgagccagatcctggagcaagactgcctgggtttgaagcctggctcttctctttcctacctgggtcaccttgggccattgtgctccacttccctttggtaaaacagtacctgtatcaaagggtttgttgtgaagagttaaggaaataagcaaatgtaaagcattcagaacagtgcctggcatctgttaagctctcagtagatgttagctgttgttattaacattacagaggtagagggataaattctgggctatggaacatgtgctaggttcagtctgcggtagctgagcagtgctaggaaaggtctgtcattcattcgacatctattctgcaaatatttattcatctcctaccatgccaggtactgtttaagttctgaggacacagcagtgaaccaaagagtcaaaaatcactgcccagaccaggcgcggtggctcacgcctgtaatcctagcactttgggaggccgaggcgggtgaattgcctgagctcaggagttcgagaccagcctgggcaacatggtgaaaccccatctctgctaaaaattaaaaaaaaaaaaaattagccaggcatagtggtgggcgcctatagtcccagctactcgggaggctgagggaggagaatcgcttgaaccccggaggcagaattttcagtgagcctagatcaagccactgcactccagcctagctacagagcaagattccatctcaaaaaaaaaaaaaaaaaaaaaatcactgcccagggaatgagtattccagtcatcttgtaggggtggtaaccagtgcacctgggcctttgctgtttagaacaagtgttctgggtatttttgcctcagtccttttaactagccactacttgatttgtgtcacttgtttctataccagtactcctctttgttttgtgcagcatttatttgtaagtacctaagatgcagcatgcactgttttcagttgaataagagctggttctggaccataggtgtctgtggcatagcgcaggcagcagataagtggtcacaacataatgaagcaggtgctctgatcaagagaagcacagagaaagttttctggagaaggtgaagtctgaaatatgatttagatcgagttggccccagaggagtatgggtgagggggagtagggaaggatgggctttctaggcagacagcaggtggagaagggatggaggcctgaagctgcctgaatatttggggaacaataagtggataattagtatggttgcagcagagaatggagttgaggaagtggaagaggacttggtaagtcaggcacacccaggtatgagctagataatgaaattccccgtgtgcattgctcaagagtttaagcttgctcctgaagaccctgggcgcccaggaaagggcttgaagcttgggagtgatgtagacacaataagatatgttggaattgctcctttgtcagcagtctggagcatgatttgaaggagagcctgaagaaaagcagggagaccagttgtccccatgagaagccatgaggcctgagcagacagtgacaaggaggtggcagagatggggtcagaatttgaaaggcattaagaaggcgacggtccctgcggggcttcgtgaatgactgggagggtaagaggaaaggggtttggaaattgttgaaaccataaaccagtgcaagttaagagaggggcaagatgtacgcacctggagttaccgtgactccttgtgttactgtaaacagctaaagcagtgcagtgatgcactggatgcttagtgtggctggcaagggggctcatgggctctctgctcctggagaccttttggaatgtggcagtcatctgtgctgattgcttcacagagttccagccaagcaggtcaccgcatcatgtagctcattggctcattcatttattttgttgatcaaatatttattgcatgcctactaaatgctctcatggaacttacattttggtgggagtgagtggaggagggaggaattcttttttttttttggagacagagtctcattctgttgcccaggctggagtgcagtggcacaatctcagctyactgcaacctccgcctcccaggttcaagctattctcctgcctcagcctcccgagtagctgggactacaggtgygtgccaccatgcctggctaattttttgtctttttagtagagatggggtttcaccgtgttagccaggatggtctcgatctcctgacctcatgatctgcccgtctcggcctcccaaagtgctgggattactggtgtgagccaccgcgcccagccaggagggaggaattctacattaaagtaaataaagaaaatagtttttagatagagataatgctgttaaagaattaaagtgtgggagagggcctaggtgactgggcgaatrggttgtagagaatgacttaagatatagtygccrgggaagcgctgtgaggaggtgacccaggaactcagctctgcatgacccagggaagaacaatccagagaagggtcgagtcaggagctagtttggtgaccagccgtaagccgtatctctcggctggattcctgcagcagccccttaatgagtctccctgcatttcctcttattctggacactgtaccgggagtggtcctttcaaaaacatgatcgagatcctccctccaaacccaggggctttcctctcaccccggctatggaaccccctctttcctctagttagtcttccactcatttccttcttgctccctctgctgcasccacactggcctccttcctgctacccaaacttgtcaaacacgccttcacctcccagccaagtactgcacggcttgtccctgacttcaggtctcagcttgtatgcagagcgctcccaagaccatgcacacatttcttcgaagattcactaggaggattctgcatgtagctgtattagagttatgatctattaagatgagaaagtactaagcaaaattagcaaaggagaaaggcatgcgaggtgaagtctggaggaaaccaggcacaagcttcttagaatcctctcctgtgggagtctcacaggacatacttcctgcccccgtctgtgggttgtgacaacatgtgtgaaatgttgtctaccaggggagctcattagagactcaatgcccagaggttttattggtggctggtcatgtcagcagcttctgtctggcaagtaccaagatttcagactcccagaagaaaaagcaagtaatcaccataaaccatactgtttgcacaaacagttcagggatcatgaaccattcacatcagggaatggaggaaaccttcccaaaaatctaagttcctagatgccaacaaagggccaatcttaaaatcgggtctttctttctaaggctgtagtgtcaggctttcttttctcttttttttttttttttggagacagagcctagctctcacccaggctggagtgcagtggcacgatcttggctcactgcaacctcctcttcccaggttcaagcaattctcctgcctcagcttccagagtagctgggactatcggcgcatgctgccatgcctggctaattttttttgttttagtagagatggggtttccctgtgttgccgaggctggtctccaactcctgaactcaggcaatccgcctgcctcggcctcccaaagtgctaggattacaggcgtgagccaccacagcccggcctagtctcaggctttctatgtgaagtcttttctgcatagcttgagtactccttctcagggagactgtctcaccatccgatttaaaatactagctccagcactccctgccctccccaccatctaatttttctccacatactcatcactgtctaagataccatatgacctacacatgcacttgtttattgcctctgtctcccattaaaatgtaagcttcatttcatgaggtgggggtttttgcctgctttctttaccaatgaactcccagcacctatgacagtgtttggcaaatagcaggttctcaataatatgagaaggatgaatgaaggaatgcttaaacaaacaggaaaacttggcacgtgtggttagagcgaagtgtcatgcagaaagaggtaggaaatgtgattgagcagacagggtcagtgtagacagggcccttacaggctttgggaaagggtttagacaagcatatttctttttttttttttttttttttttgagatggagtcttgctctgtcacccaggctggagtgcagtggcgcaatctcaattcactgcaatctccgcctcccgggttcaagcgattctcctgcctcagcctcctgagtagttgggattacagacacctaccaccacgcccatctaatttttgtatttagtagagacggggtttttccacgttggtcaggcgcgtcttgaactcctgacctcaggtgatccgcccacctcggcctcccaaagtgctggcattacaggtgggagccaccacgcccagcctagacaagcatatttcttaagtgtcatgaccacctttgagttgtccaaatccaattttcaccagtgtttcaacttcagctcaccccccactctcctcaaggacaggtgtcagtccctcttcttgttcctttagttaataggggtattcaaaatctcttattatgtgcactccatgcttttctgccctagagtttattgcaattgtaataatttaacgatttgtgtaatttagttgatatctgaattctccattaatctgaaaattttgggcttgttaacactatatcctcgatgtctagcccagaactcaacaggtatttgaatgaatgactgctgttgttcagcatgtggacaactctgggccaggcttaacttcctgggcctggaaccattccgagctttctcaggttctccagccttcatcctgggttagcatctccacagcctccctccaggcttggagcacacagtaccaggcagctctcagcctcatgatgctctgacttctgaygcctggctgtgggtgttcactttgcaggagcccctggaaaaggcccwgctgctggcactggttggggaccagctcatccaaagccaccattatgcagcagatgccatcaggccccggtgtgtggagctcaggcacctctgtgacgatttcatcaatggaaacaagaaaaaatgggacattttaggaaagtccttagagtttcatagacagctggacaaggtgagcaaaacacagccaagaacatgatgtctgcaagattttctgtgaagaagcttccatcatactcgtcctcccttccktgtgtgattgctgagaggcttgagtgctttatgtgaaaagatgttcgagaggcattaaaaactgtgcagatcctggggtgtagaagtatacctggcacgaaggtaaaaagtgctctggccatcccaccacatcccattaaagttaactgaagcccatttctatctgtgtggagccggactttaagagtgtgttttggcttggccctgtgggaacacttcttgattccctttcaggtgtacagagaaccaagcactatatttgcagagtgcttccctcatataaaggcaaagggttttgactctttttggagaagcttaagtaataacraccattttataccccctaccatgtatcgagcacctactgyattcctaccaggaacataattatgtcatctatttataatcctcaagacaacctctgaggaaggtattaatggcctcattgtgcagaggcagaaactgatactctgctgggtctcaaaatgtagcacacgagaatcacctagtgagctgttatatggcagattcccttatgcactgccctgaagactcagcgtcgataggtctggaatactgcccaggaactagtattttagtaaagtgtctaaatgattctggtgcaggtggtgcagggatgtcaccaagaaaccctggggtaaatgactgcccaagaccacacatggtgcacacaggggaagccagaattaaagtcaggcctgccagattccacaccaaggcttcacaggatagacagcaagggcgcatgccaggggcccacaaggagaggggtgccctttggaggtgacctctagggtatgttcccagtcagcaggagcagcggtttctggagtcttccctgtgagctggtcccaggcagcatgtggctgacggcaatgagtcagcatgctccatccccacagctgttcctcttgcatggcagggggcacccacccaggcgcttacctcatcccattgctaaagggattttaatgtcaatgaaatatagttgtttcagaagcaagtagctccgaaggggctggtgtgcagcctgctctgtgtgctgagctcgctgtgggatcagctgctgttttcccaactccatttttgctccagagattataagcctggtgtgtgtgtgtgtgtgtgtgtgtgtgtgcatgtgtgtttgagagagagagagggagacagagagagagagaaagcaagtagccatagtaactctacagaaaatcccagcctaatgttttttgcagatctgggcatgatgtgtaaagagaaagttttcacagcatatatcaaagcatgagttcatattattgtggaaatccaaaaatgtaggaagaaaaaggttactcatgggcacgtacatatcccactatcccccatccctacataatggtaattattaattctgaaatatctttatgattttttattattctaaatgtggtacatattcactgtaaataatctaggaaaaaaataagacaaaaacttaagttgcctatcattttcccacttagaaagacaaccactttggcgtgttgcattttgatcttttttctctgtatagttactttatattgcttttcaggtcacatggtaaatggaaatgcagaggtattggcactggaaacttcttttcatataactcttcaggtagcataagggctccctgtctttctgttcawgtgtctcagtggagttcaaaagagcaaagaaaatgagtcttttttaaaaattgaataattagaactcatcacctatctaatgtcctcccagcatccagaaactcttgagtatcgctgtgctgagttacaaagctttgcattcttgcttccttacgaaagacaaacgccagtaaatgcaaatagggatcacctgggaatccaaagatgaaagttgtgtttttgttaaaagggacatgcccttctcccaggaaatgtaagggccaggtctaatgtcttattaatcaccctgtgttctggtaaccaattcggatgcaagaagagtggactagcaggtaaaccccaaaagccattgattacatttctctatggttagaccagcctaagagatatttagctataaggctgggtgggtgcagtgcctcacacctgtaatcccagcactttgggaggccgaggtgggaggattgcttgagcccaggagttcgagagcagcctcggcaacatggccaaaacctgtctcaaaaaaaggaaagaaagaaagagagacagagagaaagaaagaggaaggaaggaaggaaggaaggaagggaggaaggaaggaaaaattagcctggtgtggtggcatgcatctgtagtcccagctactcaggaggctaaggtggaagaatcacctgagcctggggtagacctctccaggctgcattaagccataattgcactactgcactccagcctgggtgacagagtgaaaccctgtcttaaattaaatatatatttagctgtctcctcctggagatgtagcaattactgttaatggaagagactcattttgctgaccgagtgacttccctgagaagtggacaggtatcagctggtttgggtttgtccccctcrtagtgtaatttacagtggttagaccccttaaactcgatgccgtcccatgacaatttcccattgtctgggaatccttgtagacaccttacaagctcagacctgctgaggattacggtggctctgagttgtggtcaggcgaagtgcacagggcactgtttctttccaaaaggtcagccaatggtgtgaggcaggaatctacctcttggcttcccaagctgtagacaagtgccagtctcgagaaggggttgatatcgccttgaacgacattgcgacattcctgggcacagtcaaggagtacccgttgctcagccccaaggagttttacaacgagtttgagttgctgctcaccctcgatgcaaaggtaatgcttccgggttattttgatcctgtggttgggaaacggataggggagggagggactgtaccttcttcctgataaagtacacacagggtactgagcaggctgaattgagtgggctcactggttccgaagccctccggcggcctcttagactctcggcctgaacgtcctggcatactgagtcttcgtctgactcaaatcagtcatttctctattaatgcttatgagcattcctgatgtaccatgtgctgtgctgagtgctgaggataccatgatgattaaaaataggcatgcttccatccctcactgagcttacagtttgtgggagaggctgacattaacaaaataatcacacaaaaatgtgttacaagctgatataagtgctgtcaaggagggatgcagggtcaggcatgtgacagaggaacttgacctggactggggtcagagaaggctctcaggaagagtcacttgagcctggagaacgaatagacaagatgggagagcctttccagacaggaggaacagcatgtgcaaaggcttcagggctggagggagcctggcacagtgcagaccaaaaggtcagggtgctggaacctagagagcaatggaagtgtgttttgggtgaggttagagagaggcaggcaaggtaggctttgtgggccacatgagcgagtttggatttaagcagggagataacttgattggatttgcatttgagaagcatattcttccatgaagccagcagggttgtaggtagcacaccttcctctgagagccacatcatcaccttgtctgcacctctggtttaggagcttcttttaatcagcttcctgggcacaaagaaaggaagagaagatgcagtggaggaacaaacagattatatccagcctgtctaactgtttgtgtaattctggggaatgccctgaagtccatccatggactcaggccaaaattctttgctctgtctaacatgacacaagccacattgtattctaattgtttgtttgtttgtttatttctgagatggagtcgctctgtcgcccaggctggagtgcagtggcatgatctcggctcagtgcaacctctgcctcctgggttcaagcgattctcctgcctcagcttctcaagtagctgggatgacaggtgccagccaccacacccggctaatttttgtatttttagtagagatgtgatttcaccatgttgaccaggctggtctcaaactcctgtgccagggtgttccaggcactggagacgccatagtgaaaggatgtagtcattgtcctcaagggtctcaagtaggagaggctaatccttagatacccaattctggagcatggcaggacctgcagcgacttgcatagtgatgcccagagggggtcacctgagggaggtagggatggggggagtaggggaaggtgggagaaagggaatgcttcgtgtcctcaggctgtatacagagagacctgttcatcatgatttgcttttgttactgtaggccaaagcccagaaagttttgcagaggctggatgatgtccaggaaatatttcacaagaggcaagtgagtctgatgaaactggcagccaaacagactcgtccagtgcaacctgtggccccacatcctgagtcttcaccaaaatgggtgtcatcaaaaaccagccagccctccacctcgggtaggttatttgaggaaaaraagctttgtggcttttgtgtttcatcagcaccatgaggactgtgactggttgtctacaatggataatggtcgctgttttaacagatactatttaaaacaaactacagatatagcatagtgcagacatggaagacataaacacttagataacaccaagtgcctggatgcaaggagaaacacacaatctactgaaggaataataaaaatgcatcataaaggccgggtgcggtagctcacgcctgtaatcccagcactttgggaggccgtggcgggtggattatctgaggtcaggaattcgagaccagcctggccaacatgttgaaacccatctctactaaaaatagaaaaattaggctgggcgcggtggctcacgcctgtaatcccagcactttgggagcctgaggcgggcagatcacgaggtcaggagatcgagaccatcctggctaacacggtgaaaccccatctatactaaaaatacaaaaaattagccaggcgtggtggtgggcacctgtagtcccagctactcgggaggctgaggcaggagaatggcgtgaacctgggaggcagagcttgcagttagcggagatggcgccactgcactccatcctgggtgacagagcgagactccgtctcaaaaaaaaaaaaawatatatatatatatatacacacacacacacacatacacatatatgtatatacacatatatatacacacacacacayacacatacatatatatacatatatatatataaataaattagcctgggcatggtggcgggcgcctgtaatcccagctactcaggaggctgaggcaggagaattgcttgaacccgggaggcagaggttgcagtgagcagagattgcgccattgccctccagcctgggcgacaagagcaaaactctgtctcaacaacaacaacaacaacaacaaatgcatcataataataacataataataacagcataaaatagaccccattcaggacctttaaaaggcccatgttttattagcaatggagtagtaaaattggttctttgagcaaagatttaaaaaataggtaagttcttatgccaatcccacatggtcctgattaccatagcttattagtcagcctttaagatcaagtcatgcgatgttccaacgttgttctttttcaaggttgttttggctattttaggtccttttcattgttccataaattttagaatcacctttcaatttctgctgggattatgatagggattacactggatatatgagctaatttggagagaactattatcttaccaatattgacttttccaattcctgaatatgttataacttatgttttttaggtcatctttaatttctctcaacaatgcagtcgttttgagtgtaaaggccttaggcatttaacatttttttaaccctataatgaatggaatttaccatatataattaagaataggaatagatttctatatagaaatataatcctatcatctgtgaatagggatgcttttacttttttctgtttcaatctttatactttttttcttgtcatattataatgactgggacctccactacaatgtcaaatagaaatggtgagagcagacatctgtgtgttttcccaatattaggaaaagagttcaagtttcatctttaagtatgatgtaagctataggttttccacagatgtcttttatcagattgagggaattctcttctatttctattttttaggagagtttttatcgtgaatgattattgagttttcaaatgcttatttggtccatgtattgagagaatgatatggtttttcttctttatttgttaatatggtaaattacaatgatttgttttcaaatgttaaaacaactgtacatccttggaataaactgcccttgggcaggatgtacatgtcatttgtttgtgtcgtgtattgtggacctctgtcattaagcacatacatattcatggtttttatgtctttcagatatattagctcttttataattatgaaatgtctctccttccctccttacctctagaaatactcttaaagtctatcttgtgcgatattgtcacagccattccagttttctcatgcttagtgtttgcagaacatattttttttgttttctattcttctgtctttgtatttaaagtatatttgttgtaggcagcatatagttgggtcttgcctttttatacactgtgacctctgccttgtaattggagtgattagatttttatgtttacatccatcatcattattgatatagttggatttagagttcctgttttgttatcctacatgtctcatgtgctttttattcctcttttcctcctttcctgccttcctttgggttagtaaatattttttaatattttgttttaattcctctattggcttgttatcatatctctttgtactgtttttcaccagactggggattaccatatgcatccttaacttgtcatgatctattgaattagtttcataccattctatgcaaaatataggaaatcatactacatactacaatgtcatacttccatatgctccccatccatcctctgtgctattcttatcataaatatcacatctatatatgttaatcccccactatggtattataatttttgctttaaatagtcatgtatcaaattaagagaaatacatacgtgtgtgtgtgcatgtgtgtgtgtgtgtgtgtgtgtgtgtgtgtgtacatacccccttattcaccatttctggggttcttcattccttattatagatttgaattactatcttgtgtcatttctcttcggaataaagagcttctgttagtatttattgttggggagtctactagcaacaaattcttttcttgtctttattttttcctttttgtggagaacggggtcttgctatattgtccaggcaggtttcgaactcctgggctcaagctatcctcctgcctctgcctccctaagagctggaattacagttgtgagccaccatgcctggcctgttagcaataaattctttcagtttttgtttatatgaaaattgtggggtgttttggtaattctccatttagtacaatttacgatcccttgtcttccaccatgtatcctactttttagaagtaagccttgataacatttagtgtatttctttcctgaatttttatctgcaaacacacacacacacatccacacacatacactctcacacacttgcacacacataccacagacatacccaaacatacacagagacatccttcttagatgattggaaacagaacttggttctcttgacctttcgtctgtcctcaagctaaactatgttcacatctatgacttggcctcattcgttgtttccaggtacatatgtttgtttcaagtaaataaagcaggaattacagggttgtttctcagcttttcaaatacaagatttcataatagataacactccttcccagaataaataggtctttgtcaagtctgaacaggttgtcattgacctaagtcaaacaactagctcgttttgcagaacaatcctgcacttttgtttttggtaagtatctactgagtgtggactccagcaagtcactaaaaggattttcaaacatttttgtctgattccttagtaactgagtctgtgccaagataagcaattgtatttcacagtataaagaagatgtgtggaggggcttaagagctggaatttcagctctgactcttgttagctggatgccttggctacaacttctaacacctctgaagttcataaggaacgtgaaaaaactttttagtgccatgtggcaataatagctaaaatgtgttatgcattgtatatgatctacattcttcacaaatgaactcattaaagccttatcacagccctttactgtaggatttctcatttttccctactttacagatgaaaaaggtaaggtacagaggtgactgtaatcatgtttgtctcgtgcatggaagagcaaggtttgaacactggcagtgtggcttctgtggccccgcctttcactgcttcactctacttacagtgtcaaggacaggcgcttctcagtcatggtgtcacaaattatagtgcatgcatttctagcatctagttattgtgcctggaatcactcactttatagagatcccacagagagggaggagcccaaaggattgtctgttattacaaagcagcattaatggtaatatgtataacctggggtagcagtgtaattttctgcgattttcaacataacatctatgaaaaacccatagaaagcccaagctgcttccagttggctcacagaatggaagggttggaaggggcctctggagatcagatggtcaacctccatcaagtctaccatagctaagaatcagggtgatatattggtggcattcaatgaatggcattttggtcttgggacctacaaatgctaaaattggctgggcacagtggctcacgcctgtaatcccagcactttgggaggccgaggcaggcagatcatgaggtcaagagagtaagaccatcctgtccaacgtggtaaaactccgtcgctactaaaaatacaaaaattarctgcgtatggtggtgcgcgcctgtagtcccagctacttgggaggctgaggcagaagaatcgcttgaacctgggaggcggaggttgcagtgagctgagatcacaccactgcactccagcctggcgacagagcgagactctgtctcaaaaaaaaaaagaaagaaagaaagaaatgctcaaatcctgcctgggattaatcatgtctcctgtgagtttcccaagggaccagcatatgcaagggtggtgactgtgacaaataagaattcaaagtacctcttatctattagccttgtggccatcacccacaatgcttggcaaagctggtaaggtgggttaggaagccttgaggccttctcctctcaagtcccaattttactaccaaatggccatggagcttgaagaaaggatatttcccaggtggggagaagggagatagagtggccaagagaaaagagcaagagcagcaggcatggccatcctcttacaatacaatcatagtatgattgtgtgtgtacatgtatgtgtgtaaaaagagggagagcatttgaaagaagactgtaaggaaatatactaagtgattgtgcttcagcgttaagagtttagtgtttttcagattttctgtaataagcaaaaattaattacctttataatggaaaatatattcaatacaatgtagtacctagaatttagtctttgaatccaagaacaacatcaagtgcaacattatgctgtacacatgatgcatgccaaagcagcagtgcataaaagaatccataaagtttgtaatatggaagacttcatgaggaaagtggcctttttgtttgtttgtctgtttgtttgtttgagatggagtctagctctgttgcccaggctggagtgcagtggcgcaatctcagctcaccgcaacctccgcctcccaggttcaagtgattctcctgcctcagcctcccgagtaactaggattacaggcacttgccactgttcccggataatttttgtatttttaatagagacgggatttcaccatgttggccgggctggtctcgaactcctgacctcaggtgatctgcccgcctcagcytcccaaagtgctgggattacaggtgtgagccaccaaacccagccaaaagtgaccttttagctgggccttaaaaatgggaatgacagaaaatctactattctttaccacattgctatatgtacagatttgttgtagtttaatgtttcatatggtgctgggtgtgacttttttctcttctgctgaaatgtcaagtccctggagtcaaggattctatttctcctctgtgtctctccttcacctccaatttcatccagccctaggaaatcaacgcagcagctcaagtgagcttttatagttagccacattgacrtggtccagctatttgtccaaatcagacaaagtgcactgrgttatagtttataagtyaaataaccacaytaatggsaggttytcttagtccctctagctcgtcctctgagaacgtctgaggaaccttatacggagacagagttgaactcccggggaaaggaagatgatgagactaaatytgaagtcaaggtaaaattacctttattttacttatagaacttcctgacaagagggaagattgctgtcacaattatcaataaatcaacaaattgtgtttccttaatctgtacctaaggcacatagcacagactaatgctttcaagaactggggtttataggattttttttcttttcatccttttctttcttcttaacggcagctagaagtgaaagctatttggtcatgtatgtgattattggtagatactgttgtagtaaaagaaaaatcattttatttatttctgtaatctgccttcatatttaaaattggcagaacagtgtatggttcatgtataaaaagagcatgacaggccgggcgcggtggttcacgcctgtaatcccagcactttgggaggccgaggtgggaagatcacgaggtcaggagtttgagaccagtctggctagcatggtgaaaccttgtctctactaaaaatacaaaaattagatgggcgtggtggcagatgcctgtaatcccagctactcaggaggctgaggcaggaaaattgcttgaaactggaagttggaggttacagtgagcagagactgtgccactgtactccagcctgggcaacagagcgaaactatgtctcaaaaaaaaaaaaaaaaaagagcatgacaaaattgcacagagctgcacacacacatgcacacacacaagtgcgtgaataactggtgaaccctgaataggctctgtggattgtgccagtgtcaatttcttagatgttaacattggatgaggtttggagaaaggggacatgagactttccatttctttgcaacctcatgtgacttaatataattatttcaaaatagaagtttaaaaaaagcataaggtttggaatcaggcagatctgggtttaagcaacataacctcttgaaacctcagtttcttgcttgtacaaatgggtataacaacagctacctcctgaaaatattttgagcacaaaatgaaaatttgaaaattgctaagcactgtataattttaaagtaacatatatttagaaactgaagtgtatttaattgtgaattgtgaatataagttgctgtatagcagcccccgaaggggttccctttcccctgcctcactaaaatttaaatatttgactggctgaatggttctgaaaccagaggccatgggctcaaatgaacttcagcaacatttatgatccatcatcaatccccaaagtatctgaatatgaaccccagaggaactccactgaccttgaaagagtccggaagaaagtgagttttaggcttttcttcttggaggcagaaacagagtgggaacgagggttctcagcagacttttcttagagagagagaaagctgcgtccgtttgccaatttgtttagtcatcctgtattctgggcagattaggacgtagccaccgctgtccataaatccctcctggttggaggaattgcatcaccatgttttctcaagttaggaaactgtatgaaatttcatactgtcctgatcagccacctaaaaaagtaaatagcaatttttaaaaatagattcacctgatttaacacccaggaggtctgtggaatcattragtaatattaaaagggtttcattgtggtcctcttcaaaagtgaacatcagcctatccatttctgcaccctggacttctgggagaatgtcatctctgaaggtgaggactgtgtcacatgatcacagctcagatttggcccctgagctcatatgctgctgccttgactcacgccgtgatgtgaactcacttcctatctctacgacctactttgcccatcttcagacaacatgtttatgacctgtacactataaaaatgctacgggagttttaagcatatggaagttctcatataaaggaatccaaattagagtgatttatttcaataattgtgaacagtaaacaagtgctatttttttgttgttgttgtaaaagagaaacatagacagtgtaggagcagcggtggggatagaatcagaggcctgtaggtgtggaaagtgttgagtagaatccaagaagccctagtcacccaacttttggtttcttccttcttttgccatgttgtttatttaattcagactccaaacccatcctgttaagttgccatctccctctgtatttaggcaactcaccaaacagtatgggtactgttaaacaagcacaagtccatgttacaatcatccttctgtgcttcagttgttttcttccttattgttgatttgtttgcgtatttaatgaaaagcttctcccacaacagtgtatgttaacagtcaaggtggtggaggaagcagagtaggaacagaggctggtcagatttctgcttagaaagaccaaggctttgggaggaaatgtaagcagaatccataaagtcatgaacaacatgagcaggaagaaagtggatttgtgcactaaatccccaaatcctagacttgggaatgaatttaggaccaataaatgcaattagtgtttcacacattgtgtattataaccagggaaattgttattccaaaatatgtaagaaaactagtaagaaaaagataggttcaaaaaaaaggtttagattcatgtctgtgtggatcatggattattaaaagggggacaaatcaattgactaacatcaacaataatcattgcagcttgtgtttagtggccactgtccgagagagatggccaggttgcattgagcatgcatctagctctgggtggcgattctgacatccttttggccttaggtctagaactcaaagatgaaatgaaacccagccagtctagtagagtgaatcatagcattgtgataaatgccacccctttgcccttgagagtaaatataccgagaaaaaaaatagctgtgaaccaaaaccatctataatacagtcactgatactcaccacctacagctaaaattatgacatggtttgatcatgatcagagaaatcatttccttttctggaggggtgatccttgccatgctggttctggggagcttgagaagctaaacttgacagggcagctgagactcttccggggccatctggcaagggtgatgccctgcacttggctcactgacgtcatctgggaaagcccggtggtggaagcgattcgctgtgcttgttggcaatagtgatgtgactatttcctgttcttcactggctgaaaggtgaaagcatgactcacgggaactgctttccccgggctgccaacatcacagcctttttgtaagctggaaataagtcagaggctgacaatttctttttcctaaatgtggacctacagaattaagaaagagctagcagtgttcctttggtgcctgttaaagttatttaaaggagcagaagcctattctgtgctcccagaagatgaaaaaaaagaaaaaataaagtaacaaaagccttttcaggattctgagcaaagagcctcctaaattaaaaaaataaataaataaaagtttttgaatgcaggggctggaagggaatggaraggtgagtgaagggttgctatcactggctgaaggccagacattgtactgggtgctgtgtgtacctgagtccatccctagtcctcaraaccttgtgaggatgatgttttccgttttatcagcagtgccatgagactcagaggttgagtttccccaagggtcatacaactagtaaatgttggagctgggatttgaaactagctgtttactaatctggcagcttacttaactacctaacttatctatctgattatttattaatacttaatgtacccaaccagcagcttatttaatctcttgtgccctaaatgtccttttctgccaaatggtgataaatcatagcaatttcacaggtggctgattaaatgagaaatgtgtggaagcagctagcactgtacctgacacctagcaggatcttggtgaattttagttcctcatttaatcctgtgtttagagacagaattgtcagtgtgaaagatgaaagaaggtcagattcaggtcttatacagaattatcctattgttgaatatgtaccttactgccaaatgataacagatcagggggcaagttcagttccttgtcttctcattactttgactcccaaaagttttattaatatttctgattctcaacaagaaaactatttgaatataaacacacttcaatgcttgccttctgtgatatttgaagtctagtcagtgtcagagctaatgggagattcagggacgccaccaaatcctggggtggccctcagccaagttctctgaagtttccagaacaaagattctcatggtttcttgtgtaccagagctctgagaaggttatgaattatgcagattcccagggccccactctctgagattctaattagggaggtgtagggtcgggtcctggaatctaaatttttttttttttttggagacagagtctcactttgttgcccaagctggagtgccatggagtgatctcagctcactgcaacttccgcctcccaggttcaagtgattctcctgccttagcctctagagtagctgggattacaggtgcctgtcaccatgcctggctaatttttgtatttctagtagagacagggtttcaccatgttgcccaggctggtctcgaactcctgacctcaggtgacccacctggctcagcctcccaaagtgctgggattacaggcgtgagtcaccacactcagaatctgaatttttaacttacacgtttggtgacaagaatgcaggtggtataaagatctcactctttgtaacattgtcctagaggttacatttataggtcatgaggacttgggataaaggagaactcattaagttggatctggatttctcaggctagtatagggtctaaagttgagaggagtgaggtggtgattacattaatctatgagaatgtatttttgttgagggagctgaataagataaaagagagaataacattaagatcaacgttggccttgctctttcaccaataaagaaatgacatcactaaaatatttggtgtgttcaactgggtacatggcttattcagctcaatttaatatatactaaggcaattgctgtgagtcatatgaaaatgattgtatcatcaggcctaaactcaggaaacttgaaactttcatgggggaaacaacatatttctaataatttataatataaagcagaatgacgtttctacagtaaaaggaatatataatgtggtagagaaagtaattcctcacaaggacatcaaggatggctttcaaaggaggtggcatttgaattcaactctaaagaataaataaggctggtcgtggtggctcacacctgtaatcccagcactttgggaggctgaggtgggtggatcacctgagttcaggagttcaagaccagactgaccaacatggtgaaacctcgtctctactaaaaatacaaaaattagctgggcatggtggcgggcacctgtaatcccagctactcaggaggctgaggcaggagaatcacttgaacctgggaggcagagggtgcagtgagccaagatggtgccactgctctccagcctgggtgacagagtgagactccatctaaaaaaaaaaaaagaataaatagaactctgaaaggtgggtaagacactgaagggcattccagaatgaggaagggtataacatctcagaggtctaaagggcctaggctatcctgggaatggctcaagaatgctgggaaggtagatgagagacagtttactgaggctttggttgaggaatgttgacaggaggaggagggcacctgtgtattacgaagctgactctggtagacagtaaagagcaggttagatgaaggcaggcaggctgaccagccgctggcagttgtcacagtcagctgagacatcagtggtgagagcttactaatagctatggcaaaaagaggtgagcagaaatcatacccattgactgaaacgttctccctagtggctagaacacgactatcagagaaaatgtgtagaatgaaggaggggatcaaggcagagaaggtagggggaggaagcatgataccaaagatagttttgacgtttccatcttggattcctcatgggatgaatttgttggcccgataaagtacttaggaagaacataagaagtaaaggcttatgacagctgagtccaggttgtggggggtctcatagattgttaagagcacctataccctctgtcagttggggctaatgctgccccagaggctgcagccctgcccacaccattgatgctacgatagtcaacccactggccttgtagctgtgtggcaattatttgtaaactagctttgggaccaaatttgcttggacaaagactggcctaataaagtacttttctgatttgtgattttatttatgggttaagatttacagacataaaaattgttacaatgaaatttatccatggagcttaaaatcagatgaaaccaaacagcctgagaagattcaaagatgtacgggcagcttcctttcagtgtccttggcacacttactgcctttacattttcttggttcgggaatgggaaagagttatcacataacatgtttctcacttcctgatattttaaacagaattacatatttgcaaatttattaaaacatttgcagtcagctttataagaagatgtttttcctgtaaacaaactattgccaatagcgtttagagtattagtccagacgatgaggtcaggagatcgagaccatcctggctaacatggtgaaaccccgtctctactaaaaatacaaaaaattagctgggcgtggtggcgggtgcctgtagtcccagctactcgggaggctgaggcaggagaatggcatgaaccagggaggcagagcttgcagtgagctgagattgcaccactgtaccacagcctgggcgacagcacaagactctgtctcaaataaaataaaataaaataaaataaataataataataataaaagccaatttaaccagtaagtaaattgaactcattactaacaatagtagctgggaaatttaagatcttagggattaaaaagaccctgaggctgggggtggtggctcatgcctgtaatcccagcgctttgggaggctgaagcaggatgatcgcttgagctcaggagttcgaggctgcaagcttcaggaagctatgatcacaccactgcccttcagcctgggtgacagagcaagaccttgtctcaaaaaaaaaaaaaaaaaaagaccctgtgaaaattttgaaataggcaaaattgcatttaggatccagtctcttatctttctctattcatttctcatttccacaaagcctcaggaacactgaggcttgttcctcaagcctgcccttcccctccaacggggcttcagtcyatacgatgtcctaaaaccttcctctcctcatcctttcctccaggaatcrccctcccaaggcagctgatctggactaaaggtagaggcagtctgagctagttcaccacaatgcatgaatgatgggcagtccgaaagccctttaactctcctggaaatagttgtggttttaaaaaggggacagactgcccagttttccaaaggaatatttaagtggcttttgcggccaatgaaaatggaaagtaggaaaagaagtgctaggaagagccagggagatggagcaaatagggcagacaaaccatctgtgaatgtgctgctagggtagattctcttcctgttctccatatcaaaacccagtgagtttccaaaaaaaaaaaaaaaaaaaaggtgaggttccccctcttttgcccgtcagttctggagaggaagacagagccactcattcctgtggctagtattttttactctggggctgcgtcatgtagaacaccctggactgaggctgtgggcaaatgcctttgcctttatttccttcccttcttctcacccttctcccctgcatcccatttggtagagaacgttttgataattattgattcttacttgacataccttttcactttatttctcatttccataattaatttacataattaattaattaaatttacaatgccagaaaatgctgaacctttaacattttattatcattctctatgctttaaacaaagaaggtggcacgggcccttgaaatctgcttttttttctctcctcagaattgggcctaatagctcctgtttttaagaaaattgattataatagtgaataatactttcaccttaaattaccagatacccttgtttttgtttgtttgtttgcttgtttgtttttttttttttttttgacagagactcactctgttgcccaggctggagtgcagtggcgtgatctcagctcattgcaacctccgtctcccgggttcaagcgattctcctgcctcagcctcccgagtagctgggagtacaggcgcgcaccactatacccagctaattttgtgtttttagtagagatggggtttctctatgttggccaggctgatctcgaactcctgaccacaggtgatctgccccaccttggcctcccaaagcgctaggattacaggagggagccaccacgcctggcccagatacccttgctttaaaagagttggaactgaaatcactttctacacattcctaaaatcacaaagtaaaatcatttaactttggggaaaagttaatttaattttgttcaaaggttggtatctcccctttagggaagaaaaaaaaaacaatttcaataatcgattgaaaatcagctattgggacttttcaaaatctaagtttaaaaagggtttatatgtcctttggagaaactggaaaaatataatttttttacaaaattcctctaggcgtttttttcaattttgagagcatgcatttcttcaaaatataggggagaaagaacaattagattataagtgttttggaaagatgtaagaagttacctttcaaggtgctcctggagagcctgcgtgttggtaagcgtcactttgaaactggagaggctggaagtggggaggtggaggtttgtggggtggatatgggggttggggctatgtgaggggagttggacccagagcagttccctgtctcattgccaccccctccttttttttttttggagacggaatcttgctctgtcgcccaggctggagggcagtggcacaatcttggttcactcaacctccacctccgggttcaagtgacnnnnnnnnnnnnnnnnnnnnnnnnnnnnnnnnnnnnnnnnnnnnnnnnnnnnnnnnnnnnnnnnnnnnnnnnnnnnnnnnnnnnnnnnnnnnnnnnnnnnnnnnnnnnnnnnnnnnnnnnnnnnnnnnnnnnnnnnnnnnnnnnnnnnnnnnnnnnnnnnnnnnnnnnnnnnnnnnnnnnnnnnnnnnnnnnnnnnnnnnnnnnnnnnnnnnnnnnnnnnnnnnnnnnnnnnnnnnnnnnnnnnnnnnnnnnnnnnnnnnnnnnnnnnnnnnnnnnnnnnnnnnnnnnnnnnnnnnnnnnnnnnnnnnnnnnnnnnnnnnnnnnnnnnnnnnnnnnnnnnnnnnnnnnnnnnnnnnnnnnnnnnnnnnnnnnnnnnnnnnnnnnnnnnnnnnnnnnnnnnnnnnnnnnnnnnnnnnnnnnnnnnnnnnnnnnnnnnnnnnnnnnnnnnnnnnnnnnnnnnnnnnnnnnnnnnnnnnnnnnnnnnnnnnnnnnnnnnnnnnnnnnnnnnnnnnnnnnnnnnnnnnnnnnnnnnnnnnnnnnnnnnnnnnnnnnnnnnnnnnnnnnnnnnnnnnnnnnnnnnnnnnnnnnnnnnnnnnnnnnnnnnnnnnnnnnnnnnnnnnnnnnnnnnnnnnnnnnnnnnnnnnnnnnnnnnnnnnnnnnnnnnnnnnnnnnnnnnnnnnnnnnnnnnnnnnnnnnnnnnnnnnnnnnnnnnnnnnnnnnnnnnnnnnnnnnnnnnnnnnnnnnnnnnnnnnnnnnnnnnnnnnnnnnnnnnnnnnnnnnnnnnnnnnnnnnnnnnnnnnnnnnnnnnnnnnnnnnnnnnnnnnnnnnnnnnnnnnnnnnnnnnnnnnnnnnnnnnnnnnnnnnnnnnnnnnnnnnnnnnnnnnnnnnnnnnnnnnnnnnnnnnnnnnnnnnnnnnnnnnnnnnnnnnnnnnnnnnnnnnnnnnnnnnnnnnnnnnnnnnnnnnnnnnnnnnnnnnnnnnnnnnnnnnnnnnnnnnnnnnnnnnnnnnnnnnnnnnnnnnnnnnnnnnnnnnnnnnnnnnnnnnnnnnnnnnnnnnnnnnnnnnnnnnnnnnnnnnnnnnnnnnnnnnnnnnnnnnnnnnnnnnnnnnnnnnnnnnnnnnnnnnnnnnnnnnnnnnnnnnnnnnnnnnnnnnnnnnnnnnnnnnnnnnnnnnnnnnnnnnnnnnnnnnnnnnnnnnnnnnnnnnnnnnnnnnnnnnnnnnnnnnnnnnnnnnnnnnnnnnnnnnnnnnnnnnnnnnnnnnnnnnnnnnnnnnnnnnnnnnnnnnnnnnnnnnnnnnnnnnnnnnnnnnnnnnnnnnnnnnnnnnnnnnnnnnnnnnnnnnnnnnnnnnnnnnnnnnnnnnnnnnnnnnnnnnnnnnnnnnnnnnnnnnnnnnnnnnnnnnnnnnnnnnnnnnnnnnnnnnnnnnnnnnnnnnnnnnnnnnnnnnnnnnnnnnnnnnnnnnnnnnnnnnnnnnnnnnnnnnnnnnnnnnnnnnnnnnnnnnnnnnnnnnnnnnnnnnnnnnnnnnnnnnnnnnnnnnnnnnnnnnnnnnnnnnnnnnnnnnnnnnnnnnnnnnnnnnnnnnnnnnnnnnnnnnnnnnnnnnnnnnnnnnnnnnnnnnnnnnnnnnnnnnnnnnnnnnnnnnnnnnnnnnnnnnnnnnnnnnnnnnnnnnnnnnnnnnnnnnnnnnnnnnnnnnnnnnnnnnnnnnnnnnnnnnnnnnnnnnnnnnnnnnnnnnnnnnnnnnnnnnnnnnnnnnnnnnnnnnnnnnnnnnnnnnnnnnnnnnnnnnnnnnnnnnnnnnnnnnnnnnnnnnnnnnnnnnnnnnnnnnnnnnnnnnnnnnnnnnnnnnnnnnnnnnnnnnnnnnnnnnnnnnnnnnnnnnnnnnnnnnnnnnnnnnnnnnnnnnnnnnnnnnnnnnnnnnnnnnnnnnnnnnnnnnnnnnnnnnnnnnnnnnnnnnnnnnnnnnnnnnnnnnnnnnnnnnnnnnnnnnnnnnnnnnnnnnnnnnnnnnnnnnnnnnnnnnnnnnnnatttttagtagcgggggagtttccatctctactataaatacaaatatatatatatatatttggaatataagattgccatattgttttagagctgaattggcaaaactagtatcccaggtacttctttagttagacttgttatcacgcatctgtgaaagcctacactgggcttacttcatctctgcctccagcactttctggtctcagggcgagtgcaacttttccagaccttgatttcttacaagaaaaaaaaaaaggagatgttgaatgcagtgatcgctttactgtcctcttatgaatcaataggggtggggcagtaaagtatgaatagcccttcatgattaaggggaaaggacacctgcttttttttttttttttggatatggcatctcgctctgttgctgaggctggagtgcaatggtgtgatcttggctcactgcaacctccgcctcccaggttcgagcaattctcctgcctcagcctccagagtagctgggattacaggcgcctgccaccacgcccggccgatacctgcttttgggaaggagtttttagtgtgcctaaaggaagccaaaaagggcaaaccataatggatccagagtggstggggaaaacctgagaaagyggcatgagaaactggatattttgcttatcgagagactcaaaaccaaaatcaaacacagaaattgggagagagaaaaatatagattaggaggtccctacaatatcaaatcttaccaaaatttctttcayttcagartgaagaaatctttgaaagccatcatgaaagggggaaccctgagctggagcagcaggccaggctcggagacctttccccccgcaggtaagactgcacatccgtgggtgcagggggcraggggrtgcggggcaygggtggcgaggatcctctcttttacacctcagcacctgtctttcccagataagaatcataatatttatcctctatactaaccttcatttatgtacctgagaacaaaatttgtggatcccacaaaagcaacaagcaaaagagcttaaagtgacatcttagaaaccaaacttctaagaatacagtgttttaaaaaattgggctatcaagagaatattacatgtaagctaatgttgatattgactgaattattggtttaaacacatttaaagtctcttggttccccaaagacacaaatttatacaaatgctgtttttgctctgtagaaaggtgtttgcatcctcagaaatgctgtgccatttagaaagcctaaattagggaggtaaaagccaaaaataacacggggaaatttattttaaaaaaatatttatactcagaatccccatcatgatacctgttctagtgctagtcacattatttatacccacgctggttgacttgtaagcttttatccatggcgtctatcataatgcttgactcttagcaggcctctgaaaaatgtctgtagaatgaatgaacaaacatctttaggaatgtgctccttgattaaacataatattaactagactactttatattctttcacttacggtgtattcaaagaaacatgtgggctcttactgattgccatgttcctggagttataatgaatggcccaattcagcatgtgggcgttgaatggtataatctctgaaaaacaccatttggcaatgatatgttctctagttttccttaagtgacagtttatcttttgagacttttactaaaactcatacctacttttgtaagagtcttagtgttctttaagttagttgatgaattattgtattaacttataacaggccaggtgtggtggctcaggtctgtaatcccaacactttccaacactttgggaggctgaggtaggaggattgctcgagcccaggagttgaagaccagcctgagcaacatagtgaagacaccatctccacaagaaattaaaacatttagcgggatgtggtggggtgcacctgtagtctcagttactcaggagactgaggtgagaagattgcttgagcccaggaagctaagtctgcagtgagctaagctgtgatcacacagctgcactgcagcctgggtgacagagcaaaaccctgtctcaaagaggaagaaaaaaaacaaaaaacgtatggcagactgccaaatcatacttatgagaaacacaaaggaataaagttacagcactcaactaaagaaacaaaaatatctttatgttcttgcaaaagaactttgagaaaaggcaaaattagccactgagttaatcaagaggtagaatctgtaagactactgtttttgttctaccaccagctttgactaaataccttaagatcaccagtctttgctgcaactgtttaatctgtatttccttattcctttttgattttatagatttgagttttgctgcataactaaacaaatttgcttggtatatagaaggctttcagattttggggagatgattaattattcagaaccctaagtggacactgtacaaggcatggttgccttcagaacttacagctcgtaaaaaaacacatggaatgattagtaggtagtacgataatatatgtgactaaatataaatttggggagaagggaaggaagagatgcttaagggaagagaggaggtagaattggatttccaaaatttcaacaggtataggaaaaacagtgctcttggcaagggaaaccaacttaagcaaggtatggtcatgattgacatttgtgatagataatagtggcagtgataaaaaaaaaaaaaccaagctatagggaatgaaggaggaaaagtttacgtagggcgttgaaaaccaggtagaagagtttagatttgatgctggaggcagtgaggagtctttgaggtctggagtaaaggaatattgtaatgaaagctatgattaaggattgtgtcactgcagaatgcggaagtgatcggaaggaaaactgactcaaagagacatcgaatattcctctcattattatcacagaatgaataaccttgcatatcaagagttctctggttctattctcattgcagctatagcatccaattaaagtccccaaatataggtcattaattaattcttccaagtcatcacattttagtaccaactacaaacactcctaccacgacttgcaagtaaaaagttctaccataaacaaataattcggatgcttacaagttttaaatatagattgagttacacaatatgccatgtgaagaactgagcaggaatcaggtaaaaacagatgagagcacattacatgcaactatatcgaagcaccagacactccaaagtaggtgtaagggcattcctgatattaagagattagggttaaaattgactgtatttcagacagctaaccgtgtcaaagaaaaggaaaacgtaaccttttcaaatggtatcttaaagcgctataactacaggtgatttcatccctctctcaacagattatagtcatgcattgcttaacaatgaggataagttctgagaaatgcattttttttttttttgagacagtctcgctctgtcgtccaggttggagagcagtggcacaatctcaggtcattgcaacctccctttcccaggttcaagcaattctcctgcctcagcctcccgagtagttgggattactggtgtgtgccaccacacctggctgatttttgtatttttagtagagatggggtttcaccatgttggccaggctggtctcaaactcctaacctcaggtggtccacttgcctcggcctcccaaagtgctgggattacaggcgtgagccatggcgcctggccaataaatgcatctttaggtgaccacatcgatgtgcaaacatcccaggttatacatacgagaacctagatggaatagcctactagacacctagatatatggtagagcctattgctcctgggctagaaacctgtacagcatgttgctgtactgaatactgcaggcaattgtaagacaatggaaagtatttgtgtatctaaacacatctaaatatacaaaaggtacagtaaaaatctgaaataaaagataaaaaatggtacacctgtatagggcagttccattacaatttcatgggactatcatcatatatgtgatccatcgttaaccgaaacgtcattttgtggcacatgactacattaggaaagaacatctccccatccagatattccagcatgagtcatttaacaaaaagtacatcttaggtggctctataatgcagagaacatgataatcctataggaacagggctaagaccatgtagtacattaagacagaaggaatgattatataagcaatgttcatgaaaaagtttaaatacacatctcatgataatttttcagttgtttattggaaactatagattttttttaaactcactaattattttgccatacaagagcaaaattcaagtaatacaaatatttaacattttggtataaaattaacaatatggaaaaaagatgcaaaccaaccaaaaggtaaaaaaattttaacaataacactgtgtataaccatcttctattcaagtgaccatccaagctgatagtttattttccctttgttgacattttttaaaaagatagccctacactggagcaccaaaaagttttttccttcttttttaaaaggttggaacccttttatttacagatactcttctcagtactttaagtaagtgtgatgaaggaatcatctagcaacttccttcttagaaaaaaaggaagtgccttcatatttccttgaaatttaaacttgttccattctattctaagcaaaaattaaaaggacacagttcagaagagctctttcagcaaataaataattgtttcacaaaagcactgctgtaaacaagatcactttgatggccagagacacttatgttttcaaccaatggcaaccttaaacacttccaagtatagatacacagggtatatatgggcaaaaggcaatacatcattaatcaatcaactaataaaaattaattataagcttgttgcttggtcaaatatgcttttgttctctatgtttttttaattggtcagaaaacttaaactgtaatgatctaaaaccctgtatctactctgaaagtaactacaacctagaatgtttgacactgtagttttgacattagttaaaaattctaaattatctaagcaatgtaaacaagcctcaaatttcaaaatagaaaaaaattaaaatttctgtaaacattaaaaagctacctgctaaaaattgtaagtatcatcattcagttgtgtatactgagaaatcttttttcgttttgttttgcgtgtttccgacatcaccttattatatgagacatctgattttccctaacaggtgcctctgcagtcaaaggccttagagtgagttcagtcactcttgctgaagtcattattttggccttcatataatctccctagcagtagacaccacctagttctttctgtagtgaagggaggtagtgtgtattatagccacatttttatcctgctttgtaaaataaatgtaacttactctattagatctcagacacatctctttgattacaaggaacatgcagctttaaaaatgctttaaccccaaactggcaacttttctatcacttttttactctgttttcaagtttgaaatatttagaaaataaagatcacctctgacagttattgatgaaaaataaattgttttagatattataactttgatgtttaatgctctcaatttaaaactctgaacttggaacaaagtgctgtggtttataagaccttgttggggaggagtgggttaattttagtaatcagtacaaggatttagacactaagatttcattttataaaattatggagacattaggcttgtaatgttctgtctttccatttgaagtctctccattattatattcctctatgtaaattacattcaaataacaaacttaaacacagaccaatattgaatatttaaaaaccagttgaaaacgtcattaaaatcagcttatttgaattaacaatggtttctccctagagaaggaccctatgagcaaccagctgcccgtgttatgtgtcattttctaatacttaaaaaaaaatccattaaaaacatataaagtattagggcaacattaatcacttttctaaaagttcacattaaactttgaaaaaagatgcaaaaaaaggtattttaatgactctaacaccagtagctacatggatgtggtaagacgtgatttgtctgtttataataacattgtacacatttttctacatctcctcttaagaacaagagactgttttaccagattcatgaactttctctcctatgctgacctttccctgcccctactacctccaccaagtgctctttaacaaaaataaacttgcttacctggtctaacaatatattcatttccttgaaatgttgtactgtacgttcatttggtattttccaaaagcaattattctaacatcaaaacttcttaataacatctctacacctcaagtatatatgtggcattacatgagaacttgaacttccctttagttttgttttcactaataatataaaccttttctaaatacaaattctttgaaatgaacttaggcaatgaagtagataagtgatattaaacagcttctagaatcaaagaaacattctgatggactaggctttcaaaatatttgtctttcgtcctcattttacttagggtatagacgaacatttaaaggtttttttcatccaggtttgactcagtgacagtgaaaacatacaacattcaagtactattagataaacgcagccctacaagggtatgtgtccacatagctaattttacaaaggagaattatcttcattaatctgcagtatatttgaccaaaaaaacctttggaaatggtttttactttaggatctgtagcattcttccaaaggtcctggagatcttctaagtgtccatgagatgtcatcattttttcatagatgcagggatgataaggagttttaccctctccagaaaaaaacacatggtcctgcggtactatccctattttattggcacagaggcccatgaacacatcgtctatgtaaagacttgaatttagtgtctgtgatgcctcatagactttggcagctacatcaccggagattacataggcagctccggctgtgtagtcagggtaagctggccactggtacatttcataggacacgtagtatttgctgcttttatctctaatgggaggggcaccacgatgaacacgaccaatccaaaagtcttgaacaccaatttgttctaaactttgaaggtactcaatcagatttggcatgtgaataaatatgtcatcatcagcagtcataagaaatttggcatgtggacaataggtatttgcccaactgaactgcataagtaatttcagagtaagattgtagaaagaatcaacaaagtcttgctgaattatatcattgtacctttgatcttcccaagccagttttctttgtagttcttctccctccagtggattaggagttcctaaggcaaacagagttttgatgttggcattcagctgagaccgaacataattttcattgccccacgtccttctaattccggaacgtcgatcatagttttcaggagcagtttttacaaacagtaaaaggaggacgtcttgagcttgacacttttccttgtggttaatcaagtattggtagcgaggccccgctgaggtgtgcttaagagacagggtatcattcacaaagtcatagctatttatgaggtatctgtaagaatatgacttcatatggctcacaatgtgattatcgattggttcccaaaaaaacatgaggctcgctaaaaaacaagtagcaaataactgaataattaactgccattttttgactcttctgccactaaccaacattctcatatccactcaagtctgtttttagttaggatcagttttaaacaggcacgggcttcttcgagaccatagaacttygtgtttcgtagagtaggtgtccatcttaatacatgytggtcattaaaaatggaagtcttcttattttacaaaatagtttcttttagtcccatttttctgagattgcggaagaatggaacaccctgtagaacgaggacactggcacgtcaaaattcttccacacgggcatccttcaggaagcgtggtgggcggcctcatgcggctctcccatgtgaatattccatgccacctatcacagtcaagaagagaaaagaatcacaatcgcgtgggttactaaggtgctggaaagaaacatattcctaattccttaaaaccaaatgtaacctgccctgtctgcacaaaaggtgatgaggtagttagtacttagcagaggcatacggctgtttattttttttaaaggaggacaggaaaagggaaaaaattgctttacactgtcttcccattcagagtacagagacctttttctactcctactcttaaaaaaaaaaaaaaaaaagcttcccaaacggctataatcgtgtatacttaagttcaaatttcacaaacaggtacattcatgaatatactgacttgaatatggtcaggatgaaagcagatacatagatcaaggcaaaatcttcaatgaaaagaaaattcacagcagtaaaaatccattaaggcttgccccagacaaggcaggaataagagtaagacttcttttttctttttttttaaattaaggttcataatcaaggagtcacagtttgctccttgaaagcaaactctcagtaatcaaaattactttgtgagccccagatttatacagccaccttctttctgtacttttttatttggaaatgcagcaggcgcctcaatgtaacatgttctaaactgggaagcaacagaatgtagccaacaagcactgcctttgtagtcaggcaatttgaacaccaatgccgccttagccacttacggtttcttgtaccatatcatgcgcagaaatttgacaaattggggtaagaccgtttaactcgaagtctttatgcaaattaaatgggaatatacatgacaaatgaagggaagtagacagatgattacctagcacactagggtactcaagtgtcatttctcacccattctgttatcttctcccctaaaacctgctgttcctgtttctctttacatgtgcctaactgcacttctttcatctatgcctgaaatctggaaccgccccccccattttctccacttccattatttaaatgtttaatcctgtgaatcacttcttctaaatctctcttcaccccttcatgttatcatcacttctcacccagactagatgatcccctggccagcccaccttccactttacagtcagcgtgacctttgtaaaacttggatttaaccacgagacaaactgagctcttttaactccttcagagcctctccattagttagtgacaagatgaagtccagcctggcccacaggaccctttaggatctgcctctccagctgtttggtcccatcatttgacaataccaaattattggctgaaagcacagtcacacttgccatttcatatgccctggtctttacaccagcagtcctgtggcctggctaccttcctcccttgctaatatgaagtctacagacatccttctctgggaagcctgaattgggatcaacccattccctgaaagatgcttctcatctcatctgtattgccccagcaccttcttataccccatacagagactttttaggcacgatgttgtggacaccctacactcagcatccagctcagtgtgtgacccctggtaggcattccccaaatgttggtgcaaagaaccatgccgggggtggagccactgtttactcaaagtgatggttactggggaaggattggaggtcaggaccctagccaggtgccacctcggatgaggtccatgccatggctgcttacaccaggtcctctcttttcctccaccactgggacgcagcaccctccttcctcaagaattctgtcccccgtgcttaccacaggtaaaacacttccttggatggaaaggtaggctctcttcctcgggggtggtacattagtttcctgggctttggacaggactgacggggagagagccgtgtaggctgagccacatagcaagccccagggcaaaggccctgctttgtgcccagagatctgttctcaagtccccccgccggttgacccctgatagaaaaccaactgtacacactgagtgccctgcagaatgggcctagcctcagctgtgacacctccatccccacttcagagctttcggatccagctatatttcccacccccatgatcactccacatcagggtggaggcaaaggccaggtatgtaaaatgtccaatgaggactagagattagagccaagccccattcagactttgtccagagataatcagtatagggcacactttatcgccaagggcattgatttgaaaactgcacgcaccacttaggaagccacaaccagcatttttttttttaaatacagagtgtactgagagtagtaagagcaagaatcattttgtgaaacttttgggttttctgtgtgtgtgtgttcaggggtgtaatgggaaatgtgttgctgtgctttaatatcacaaaggctgaaggccggccatggtggctcacgcctgtaatcctagcgctttgggaggccgaggcaggaggatcacttgaggtcaggagtttgagaccagcctggcaacatggtgaaaccccatctctataaaaaattcaaaaattagccgggtgtggtggtgcacacctgtaattccagcttcttgggaggctgaggcaggagaatcacttgaatcaggaaggtggaggttgcaatgagccgagatcgtgccactgcactccagcctgggtgacagaatgagattccatctcaaaaaaaaaaaaaagactgaaacactgctctaaggaacagatcaahatcagtaatttccccctttggacaggctggtcatttctggactgaatgctctagaggaaggtgagaaagacgtcagaaaatatcagtttctgatggtggcatctgcctaaaatttgcgaaatcactttcattcaggggcccactttctctcagttgctctctcagtctttccacagtgctcatccagataacaaccatcytctgaagccccaaaacaagggccctctggcctcctccaccatacatctggaaggaactggaggcttaaagcaaggtaacagaattcttgatggcagattttaagccagcatacacatttttgagaattctaggaaaattctcaactgaaaagcatctgcagtttctactctaattgaccctgggaagggaacaaagaggaaagtaacctttggaatctcagggatcaaagggaaaaccagctgcctattcctgagcagctgtgcccggcaagctccaatgccagcttgctttgcacgtmctacagttgtttgcaagtctgagcttcttgctagactttgtgcccacaagtccaactgctcccacacccattgtgcatctatctgactcattaaaggtgctagtatctctccagtgaatcaggcctattactcaccaggttggtgcattgctgctgttgcttatatggctactgtaagccggcagctggttcagaaccttcattttgtccccaccctcaacatgtacgtatttatcttattttcctgtattttttcagctgttccaaattgacatcaacaagtcaaaatgctttctgaaaaatgacaaaagacctgtcacaaagccaacatcccacgctacttatttagttcagcacagcatgtgaagctgtaaaatgagaattctccccctcagtagtttgaattttttagccaccatttacataaatcacaaccagatctcactgataatactggaatgataaggggaagatttaggaaaggtaaaactcctcaatacttgaatgataaggggaagatttaggaaaagtaaaactcctcatttgtattacacagcttcacttgtataacaaaagaacatctgaattcctccaaattgaacatagtcactaggaggcctttcccagcctaaatcaaaagcactgccctcccccggcctgcgcccgatctaaattgatcaattacaagtcaacactgttgcgcccagctccggctttgcggatggagaccacgcacatacaactggcgctcactcttctggtttctttcggcgtcttaaagcttctctaaagcacagcttccagctttcctattcagagtgcaggggagggacctaggaagaagcccacaagcctgccgatctggtagaagaaaatgctgggcctggcaggaaacaaagcaagcccaatgccgaatgcgcagctcagcaaccatccacaacagactgctgtgggtgcagcttcctttgtgtgcctgcagcacgggtcagtggccaatcaacagactagaaactcaagggttacccctgtttggggccagatttattgtgtaaccttgggcaaccctcacctcactctgattcggtgctttaatctgcaaatcagggatgaatatccatgtaatgtcaccgaggggcagtaaaaattataaatgacttcagagcctgctgaaaataggaaatagaaaaagcatgggagagaagaggacaaagaattgcttagaagaaaatatgcagatatctcagatacaacctgggtttgcttctatttggactgagaagaagggacaggtattcttagtattatcttttctaatagaggtagtcagaagaataaagaatagaagtaggaacatcagaaaagaggtgacagatcccaaatacttttcagtctaggagccgtgcccctcagttactcataagaatattctttcacaagagagctctttaaactttttgggaaaaaactagttagaacacccaaaggctacaagtttccctgcaataatccctgattgttgtaaaccttacccctgctgtcaactcatttctttgttgagtctacttttgtgatgctgagataatatgtgaaacctgctatccgttttgaagttttaatcaagatggggaggtccacacttctaagtacaagttaaacaacctcagtctccagttgtttcaattaatcctacaagtatatgagtatttactctgcgggttcttataccagacacagtgggagatcatgaagaagtattttacagtctccaatctcaaagcatttacactctatttgtgacaagactcgtagttcccacatgaaagcatagttcccacagacaacaatgggcaaatcctggtaaggtacagtgtgtctgcatgacaccaaccccaggcacaagagggaagtctctgggactagtagagaaatcggtgggggttggattagtcaggattttaggagggcctgaggacgactaggatttaggtggctgcaggagtaggaacaatctttgttttagacaagaactgtgtatggcagatagaagatttgaaagcagagaggtgggaacctgcttatggagaaccttgaaaatcaggtagaggagtcttaggggggtacagaaagcagcaggaagtcatagaaatttctggttttgtttgttatagtaactcccttgctcagtatttattaagtttgagcaagagggattaaactggctaatggtggtatggggtgaaatgcagaatgcctgaagatcaggacgctggtttctcaagggctcacactgatgccggatgaggtgaggaaggcctagtcgagggtggtggaaatggggacggaaggaaggcataaagaaggccctttcaagaaaatcaaagacctagcaggacctgatgaatgacctgggatggcgagtaaaggaggaagaagagaagtaagagctaatttcaagcattaccaacaagggagggaaaactggtttcctgagttaggagtgaaggagtatttgattttagactcgcattgagttcgaggcgatggagagacaagaaggtacagatgtccagggggtaataatctaagacgagttagacaggactggagagatccaggtgggtactctgagcatgaagatgactaatttcatgaatgtggataagctctctaggtggagagacagcaatgggcctggaggaaaaataaactccggagaaggagagaaaggaggagtcaatgaaaaaagggctcattcatcagaaaattaagatggggttaacaaatgggtagagtgggtaagcaggacaaacaaggccctggtcttggagctctaagtggggaagagagacattgaccatatagttagggttgtgctgggtgctacaggagggtctaaagatggaccctgccccacttgggggctggtttgaggttggggagggcaatttccaggaagaaaagcaacagtgaactgtatttctgcattttattcagtagacttacaccacactcaagtctaaggacaccttatggtgtgtataccattttgatcatgtgatctcccaacactcaagacaccttatcagccaggaagttgtttacatggcttcactgagaactgcatttcttctgagacctcaaattccaggatactcactctatagtacactcactcctcagctgcaacttctaaatattcatcgagaaccttctgccaccccaccctgcccagcagtctcctgacctttcttcctcacacacctcccccgtttcagatgcagaatcattggacacctttgccctcccaccccaacaaccccagaccccagcgccctcccatcttcctgttcctatgacacctccagggctgctggggaaatgggacttaccaggcaggcagcgtcaccacaaatggcactatctagctttgagcagttttcagtgctacgtgactgttcctgaacttgtcccgaaccttctccctttcccagtctcttcagcggccatgctaaatctccccctcccaggctctgtcccccccaccctgaagacttcacctcctgtctgcttcctagagaaaggaggagacatcagacacaccatcagctcctcctccccttctgggccgcctcctcatgggctccctagttccccaacactcaccattccctctataaaacatactgatcgggccgggactagggggagacaagggagccacttattttaggtgcacaatttaagggggtaccaaaaactccgtagtcagtataatattttgatgcaatatttttaaaaaatcaaagttactgaaaaaaatccacagtgaacaaaatgtcaaaacggtaaaccaagacaggctccaaccctgcacttatacagccctgcctcacctgactcccctaatccctgtcctgctgactggggcctgctgggggctgaatattgccaacttccatggacatgtctgcattcttagtatatgtatgtataccaacctaaagtatcataaaacaagactaacccttagtgtatataataaagtatcataaaacaagactaacccttagtgtatataataaagtatcataaaacaagactaacccttagtgtatataataaagtatcataaaacgatactaatccttgtattagtattatgatactttaatttggtatatatatatataatatatatgcattcctcattcctttatatcttttaaacttttattaataaatattcatatatatatatatatatgaatgcccaattctattcttttttttttttttttaatgctggacatgaaaacctcctaaaacggttgtctgaaccatgaatggattgtgttctacatagctgaaaaacaccaatctagaatggaatcaaacctctaccataaaatcatcctctcttacttcaattattgccaaaacaagaacaaacccagaaattctatataagaaggcagtataatttaatggaaagactaacagattagaagaaaactaagaaatttaatcattccattctagctctggttttttccttgcgggggaaataaaatactgtagtgaaacctacatagaaaacaagactgaactgataattttcttcatttaaaaaatcaatttaatacttggaatatccccatgcatcatgaaaatataatgatccctttaaaagtgatatgcttagaaagtagactatataaggctcctccggtgagtcacagtttttaaaaaaatttcctttatatcctcattcctttatatcttttacatttaaacttttattacttaataaagtcccacgtgggagagtttttagttcctgtccacacataactaaaggaaagaaagataaaatcttctgtaccatctttatgctgcattttgttctatattccaagtwttttttcctggcttcttctcgtcatctgtttcctgttaagtatagctaggaccaatcttcagaagccaaactgccttgttgagagagatcaggaataaaaagccccagatttactggaaaagctataatttgatcttcctagattttttcttaataaattacttacaataatcggtgttaagaaatataactagttactatttggtactaattgcctagtctgtttgctcaaggaggaaggaggcaatgtgaaatgtgaatttataactcacattttaaggtgaaayattagatatctttgcaactgttacatttccaatataagacctctaaaaaagaaaaraaattctacctaatggctgtcttcaagtgtttttgtgctggggctttagctatatggaactttatttcaagccatgggcaacaattagaagccatttggaattcttatcctcctgcagagaatacatttgtagagttagttcttgattcagtgttagtccaaagactttaaattccactatggcaatcatggctttgggatagaggggaaagctgggtaataaaacctacaatgtgaatccaggtacaagatctccacctatgtaaactcacttatatctctttataagttaaacatgggtgtagatctgtttcctggttatgggggaagtaaagacggggaatttcaaatgaacaaatgggtaaagacagaccctaagtctttattaacgggactggtggcatgggattatagattattcttagattttagggaagttatatgaactcaataattcccagtaaccagtttgattatgcaaaatttgaaacaaataaaaaagctgacatataaaggaggtctcagagaggtcaaacactcgcttttctgagcttggccctctgtgctcattcttgcaacacacttgtttgggctgacacggttgcttgctcttttaaatataactgttgtcagtttttttcttgcctacttaagaaacttctccttttacccagtctagcaacagttactaccatgggtatgtctactatataccaggccctgttccaaatgccttacgaatgtggtagctctttaagccttacaacaacctttgaggaagaaaggatctccctccacattttgcagaagatactgaggcatcgagataccgagttaaccatgtaatgtcaacaaattccagaccctgtggcagcttagagcagcttgtgagtcccagccccatccctgtgttcctcacctgccctttttccttggcatgggcacaggtgttcctgcagttctcatcgggaggggagggcaggggaggaggtgggcagggtcaagagaagcaacccaagatggatgagaatttgcttcactgccagaagtgtgaagtcatttctgttttgctgcattctgttagcactgttcttacttccttcactaacacactctttttcaaaccttccatttcagttttccctccttcttcttcttggtctcactagtactagacagtgggcagaagtgacctcatcagtctgtgtcctttgggtgtagtctttcaaccacaaaaaagattcagggactccaaggatggagatccaaagtcgcaggagggtgacaaaaagaggtggggtggaaggaaggagaggaggcaaaaaagtaccggactcagggaggatgttttaagcaagtattgggtaaaatgaaaggcgaggagtcagacacagacaccctggcctggaaaagctgccattctctaatgaaaaagctgtatcaaaaccgttttcatgtgtaaaggcagggaaaatctgaagatatattcaaagtcagctcataaaatgacacgtaagaagtaaacctgatgaagagatgtaaaccagttatccatcataaggtagatgaataaaaaatacaagttctcctatcaataagagtaagaattattgcctaaaatgcatacccagccctttaatgtgatataaaacatgctacaaacagccactactcctagccccacccctgccaccccactaggactcctcagacacaatgactgctttatttgagtcactagaagaacaacgttcactcaagctagaatttttcaaacattcttgagatttgttaggctggctttgccccagaaaaactgactaagatacatttgaaatgttgcattatgttgggtgggcttcatccacaaatctgttattagaaacccatatgcagttggtcgtgtacgttcatgggttccgcatcctcagattcaaccaactacagatcaaaaacatttgaaaaaaaaatttatggtcgtgtctgtactgaacatgcacatttttttcttgtcattatgcactaaacaataccgtgtaacaattgtttacatagcatttatattgcattagttattataagtaatctagagatgatttaaagtacatgggccaggtgtggtagctcatacttgtaatcccaactacttgggaggcggaggcaggaggatcatttgactcaggagctcaaggctacatgcctctgcactctagcctggacaacagagtgagacccatctctaaacacataaaaataaaaaaaaagagtacatgggaatattgcataggttataatataaatgctgtaccattttatataagggacttgagcatgcatggatatcaggggcgggggggtggtgtcctgggactaattccccaaggatactgagggacaacaaactatggaccccaaaccaggtgctctgtgaatgaagagctttcctctgagatgagggaagcagggagaagatggaaactggggaaggctttgtgggagaggtggcaaatgagcaggagctagaacagaattcaaatgtgggtttggggaggaaaggaggaagacacagctcagaaagagaagtctacagccataccccgctgaatgcacctgatcctggctgatctcagaagctaagcagggttgggcctggttagtacttggatgggagaaagaaaaggagaagggaggagtagggcaaggagcatttcaactggcttaaagggtgaagtgggccgggtgcggtggctcatgcctgtaatcccagcactttgggaggccgaggcgggcggatcaggaggtcgggagatcaagaccatcctggctaacatggtgaaaccccatctctactaaaaacacaaaaattagctgggtgtggtggagcatgcctgtaatcccagctactcgggaggctgaagcaggagaatcgcttgaacccaggaggcggaggttgcggtgagccgagatggcaccattgcactccagcctgggcaacagagcgagactccgtctcaaaaaaaaaaaaaaaaaaaaaaaaaaaagggtgaagtggagggagcaaggaataagacattccaagagagactacgcaggaattttttttaagcacataagagaaaaagttgtggcttgagtggggaaatgtcaaatcacttagtttggctagaagttagggtaaagggaaaaaacggaaaaaaggagatcagaaagtttagctgtggttgaataataataagaaaaaccaggattcagaaacaggatgacgatataacccagtgtctgcctgttgcccagtggcagttcctacgtcccattctgkacattgtctttagaagcaacacttgatagagggtttataacacagaggtacaaaaagtagaagatggtgtaaaacaagaggtatatgtaacatgtttctgtcttggtggatcaacatttagtctaagttaactaccatttattaagtgcctgccctattctaggcattacagcgggcagccctgaaagtaggttaatacgtatatttaactaattcaacaaacattaacttatcacatactgtgtagtaggccatgggcaggataggatgctaaaaagacttcagagatgtttcaggtgtagctcttctatcaaagggtcaataaatattccagtgcaagctggaatctggacctgatggtggtgaaagagagtaaaaaagccgagagtgtttaaatgccaacaaaagtagatgtatactgtgcctctccatttactagtcacatgagctcgacttgtctctaaaccatgtaccagtgttttctcaggatcatttgagataacttgttgacaatgtcagtccagattagatgttccatctgtgcaaatttcctttctctagaatctgtttgtgtagctttaccaggatgggttagttaatggatggctgatttttttttcaggtttttttctttttagaatactgagctatactcataatatgcttcttctcaaaaaacattaattaggtaggagtttttaaaaatactgatctgatggctaagggccatttaacacatcgcaaatactgttgaggcagaagtatcatccctaattgactgaatatggtccttctcatgttccccattattccattaatggaataacggtcttccgttattcttgttcccacaagcacttaaaatacatttcaattaggatgacacaggtataagattatatggtcctctaaagtaagagaaggaaacttgaggtgagtccatccttgaacttactttgcttagagcactatgaaaaagttataggaagttataggaaaggagcaaaagagtcaaatctgaaatattaggtggatcttaggctgtagaacagtattttgaacttgaacttttgggctttgttgcctacacacttggtagaacattctcttttgtagagaactggcttctagtgttaaagccttctatggaagagaaatctgaataagttacatatcaaagccagcaactgaatttgtagaattaaaatgtttctaaaaaatcgcttttttattcaaatcttgtatctcacctgatcaagtttcttatcctttaaatataaagattcttacatcccctatatatatgtaaactaatacataataattagatattgcataccgtaaggaaagtaattctagatttacactgttctggttacatcttcgctcacagagattcgatatcaaagggcagagctcttgtaatttactgtgcctcagtttctggaacacagatacaatgaattcctctccttacaaggttattctaacaatgcattaaaataatggctatggaaatatttcagaaaaggcataatgtattataaaaattcaaagctgagatctatttacttcagcatatataaaattccccctgaataggggacattttgttactctgagaagagacaatttccctctgaatttctcccagtttcttcctgatacctcctgtgttctgaaatgcagattctagtgcaattgggcctcaraaagaactggaccctttacaatgtgaaagtcaccaagtgcaatgattctagccaaagtgacccattttaaaagatgacccatttcaaaacccatgagttattattcaagctgttctatttttgagaattagaaagttttctttttctttttttttttttttacaatctcaccatttgaatgtcttttatgaaaagagaaaactgatcaccattttaatgaaatacaatgtttcattttttacttgatggggcctgcactttattttgaaaactcttctgcaccttctgagttttctctgggcagagcagttataagcatctctacctcctactcatcctcatctcccactttctcaggaacagctgctctgagctttggcttgggcctttcctgtgataacactggttctaccttagagccttgcagggccgggaagggtcagcctgagtcagcstcctcctcagagtgctcagtcaatgctcagagcgtgtgcgggaggataaggaagagtgagaaggacaagcaggttaagtacagaatggaaacctttctggtattgcgtttagcttgctttaaaagcaaagagttggccccaaaaagcagctttcacctcctcacttgtgaccagatagaaaatctaccataaatttattttgagaaagttataacgtctgctgctgatcactaatcaccctttcagaaagttcagggtggaatcatttcggtgccaccacttaatacaactaccttcaatcatccttttctgggtcaacttcggcttttcacattcctctcccatcccccacagggaacaggcaaggtttcccaaaataaaggcacagasgcacaaatccaattctgatggatgtactttcatcagataattaccataaatatgagcctcaggccaccatcggccactgtgcggttaccacatcggtgtacctttaacatgatccataacctaagaaaaccaacaccggccaagaatgtacagggtgtagtcaagagtcgagttgaaaactgttacttttacctatatggtatccaagcaagcaattgcctctgtcacatcaggattcaaaatgaaatgaggcagagtcaaaggaaagagtggccacgacctccccgccagggagatctgcggctgcagtctccccgcctgcccacttccctgtccccatttcccccgccagtaactcgccgaaagcgttctcaggttggcggtttcttctttccagcccgacacgggctttcgactcgaattcagccctccagccggaggcgggtggccgcaagcctggggcccccggccggcaaccgaattggtgggcgcggcgttcgcctcgcggctcccgcgcacgggcctgtcccgccaccgaggagccggagctcctcagggacggggacccgcaggccccgggaagccgccccaaccggagctgcccggcccccgagcctacctgccgcacctgggcggcggcccggcctgggtcccagccgctggccacccgcgcgggcaggccggagggaacaaaggcgttccggggaggggacgagcctccttctccgccgcgctttcagagggcgggctgccggggcccgcggtgggagaggcctccccggcttcccgacttcccggcgctgggccgtgcgcggtccgggccagggcggcgggccccgatccggtgtccacgccagccacgcgcccccggcccaagcgcgcgttcccacctgaagtcctggcgccacccgccgggcgagggccggcgtgccctcacctcctcgccactcttctcctccagagacctcgctcggcccggagtgggcagactcggagcctcccgcgccggagaccgcgagccgctcggccgaggaggcgcggcggggcgggggcggggcggaggggccggcccgcagcccccaatgccgggagcccgcgctggagacccagggagcccagctcggggccgcggcacggagaacgaaccatccgtggcctggagacgtatcccgccgagcggccagaactttccccatttagcgatccggaaaggaagccaacactcccacccagagaggcctcggccgcggaaagatgcggccgcggcacagccgtgttttcaccacgtaactgaccacagactaactccgcgcggaaccaccggcccagggcgctccgccaagaggcggactgtgctggcctcgcgggccctacgcccagggaacgccgcggttcctcccacacgggacaccggttccgcagcgccgcggattaggatggtcttttactttccgagcgggagctctaacgcaggctcaggcgggtcttgttaaaaggtttctggtcacaccacttatgcgtggagctctgggggcctcagtaacaaagtaaggaaacttacagcaaactagggctgcactgccgctgtccgtttctaaaatacgagaagagggggaaaccccgccccaggccagcttcccagtgactttacctccaagtccagcttcatttcaagggcagtttagagcgaaactcacgaagttcaagcccagctctttaaatgtccaaatcggaggtcggctttccttcccgcatcggagctaaagtcgctggtctcaagaacaaaacttgcgggctttaaatcttgggcgaggactggacgggcagcgctggactgggctcgcttccccggcgggatgcgggctgtatgcgggcgggatgggggcggctcttttttcccttcgctcccctgccctgttcccccgcctttcccccccgtccctcctgcccctcttttgcgtctttctcctccgcgcccctttctttccgtgtcggccgccccttccttcttcgccgctccctccgtgttcctttcccgttctttcgttcccgcctccgccccctttccgcccgccccgcctccccccttctccccgtcgcttggccgtctgtcccccgcccccggcccgcttcgtttgttctctcccgctcctgtcgcccccccctctgtgcgcttcccgtccgccgttccctcccgcccgtttcgccctcgcccgcctctccgtctctcttctcccgtttcccgccgctgtccgtcccttcctttccgctcgcgttcccgccctgcctcttccgctttcctccccccttgccccccttcccttctctcccccccccccaataaacaaaannnnnnnnnnnnnnnnnnnngggggagggggggcaggaggggccgcccgccaggccgccaccctcccggcgcgtaggtgaaggtgatgggccccgccccagtttgttcttgtctgtagatgagaattccaggaagtgtttccctgccgctcgtcagttaattgcgatcacttactcaaatggccaactggaagccagagtgcacatgaatgtcctctttgagctattttcctcctttagaatacttcatgcaggtaaccagacaatatcgagagatgcggacttctactcaacgagagagattataaatgaatcctggatgcgcttgatttcttgtttcccgcatgttgttagacctctccctaaagccacaaaacatttaacggagataatattttgagcgattctgttattgtacatatttcagaacatgacagaaaagcaaaagattaacccaaatactttagtaaaataaaagctttgagtttgtcgtaaaaggaacaagacaggtaatgagttaaatgtatgattgtcgaatcagggtttaaaacagtggggccagcagacacggtggctcacacctgtaatcccatcactttgggaggctgagccgcaggaggattgcttgatcccaggagttagagaccagcgtggccaacatagcaagaccccatctctaaaagaaaaaacacacacacaaaatgaaaactgttgttcattcaaactagatttttaggaagtttttaaattgctttccttaagctggtcagcatcttttaaatcatgcagttcttttcatatgctgcctacacagggcatggctcagcatctcccagactgtggcactgcatgttcatcagaccacagacagaaatatttacatgtgtgatttgcaaaggagtcattgacagtgacccacaaataagctgattcattgttaatacagcactaatgacataccttctctaataaaatgctgactgaaatcccacatgcatttcccccagccatcacatgtgtatgttgtatatctgtgcaaatattcaattacaattatattcctttcagatcatttggagctaggtccatgtgtcagtatacatatgttccacatacatgagcacatagaactgtacccacgagaaatacaaactgaccaaaacagtggtagacacacatacaaatcacatattcacatcatactagatacagataaacacaccagatagataaatggtttcaaaagtatgtctggagattggaaatacgatgcaagttttttggtggtaggagggagagatgagagggtgtgaaggagagataggcaaggtcaagtagtccagaatgcccactctgggatccacacaagctcagatcacacatgcgagaggacaggcaagtcccctttgcttgttagggaagatttcctagagcagcctggcttcctgtcccacccagagagaggggaagagaatgacagatttgatggtattgatggtgctatgctcagttacttttatcaagagggagtgcatgaagatattgagatgtgttagaaataaacttaggtaataataatgatgctgacttggccagcatgaagaaggaggaccgtgttggcatgctttccttatccaagtagcagctggtaagcagagagccctgtgattagatctatacatgactttggaatgaccaaaatctgcatgttagactcggcagggatagataaggcacagaaagagcagaggagtagcagatttaggagagatgatcagagagtaaggcacatgcatcattagtagtggggaggggagactaaaccctgagtacaagagaacctgggagatggtgggagcaacaggggcccaaggaagaggcctgtgttactaaaatcatgaaaggagaagcaggtctgataaccgagtggcttaacacagctgaagtgtagcagcagtatcaggcttgacctgtttagcgaaatttgtctttctggattctgttagaccagatttcctcacaggccctatagggaacctgtccagtgaatctgtgaattcaaacacatcacgggccatgtattctgaagcaggccggtgttcattcaaggcctgggctgttagagagactctggttgtttcctgacctggcttcctacacaggatctctggcaagttagcaaacttctctgtgcccacagtaatacctgcctgcaagggtgggtgaggattagtgcaatcgcagtgacgggtggagtgctgagctcagagcctgggctatcccaatgggcggatgaatggtcagcatccttgagcccatcacaggttgcagaaagctcctctcacctggcagaggtaggctcatgctgtgtcctgtcatcgtgctgtaaaggatctgctgtgtttcacacctctgggaatttcacatctgttgatacagcatcaccattcagacgatgccctatctccttggctccgccgcctctttctctgccccccggccacctcccaccacacgcagccttccttggtgttctcttctccgcacacatgctccttgctgatctcacccattgtctttaatcttgacttacatttctttcttttttttttttttctttttttgaaacgaagtatcgctctgtcacccaggctggagtgcagtggcacgatctcctttcactgtaacctctgcctcccgggttcaagtgactctcctgcctcagcctcccgagtagctgggattacagtcatgcaccaccacacctggctaattttttatatttttggtggagatggggtttcaccatgttggccaggcaggtcttgaactcctgacttcaagtgatccgcccgcctcggcctcccaaagtgctgggactacaggcgtgaaccaccgctcccagcccatcctgatttatatttctagcccagattctcagcttcaaccttaagtgtctttgggtatgtcacatcaatcttcagcttaatatgtctaaaatgggatgtataaatatgggattgggaaatggttaatggacaggacttgaatgccccaaaagcaagaatcctcctttttctcaccagtgacccagcccaggctgttatgtgtcagtaacagtcagtagtattttgtcactgtataagttatatgtcttttgcctcaactagctgtggggaggggaaaaaagttgtatgtctgttttcccaactactttgaaagtcttcagatctcttgtgggtggacaccatgccctgctcttctctgagtctctcagagactccccgtctccttgccaccctcacaataatgcctgtcacagaatgaatgcctggtaactgcaggttgaattgaatttttgcatagcacttccacactcatcaattattcaaacttttgttccaagaatcccatccgtagtacagtggccctgtgtacgtctcctttgatgccaccaaggcccaaaagctgacgctggagacacactagctctttgctgcagctcctgctactgcttctatggcctggcacccttcagcatcctccctcaattccagggcctcrgcagtttgatgaaaccacactaggtacacccagaactggaaggtgaagggaactgacagcacaaggcggcactcacccgcaggccactctgagaacccggtttcttccattttcttctcttctgcatgggggaggggcctcctggaactgatcatctccttcacaccaacgcataaggaaatctcttatgtgccatctgacactcagtggggcctctcagggacagggacagggacagtttcggaggggcaggccctgctggctgggaccctccctggtccagtagagctgtgctgtcaaccctccaacagcccctgtgaaaatggcctgataccagcccctggcagtgagtgtctcagcatttcttctccttttcccagcagcagatcagacacacactccacactcccggaagcatacagggttctgtgcaggtcccagagggctgcctctaactcagctctttctctcctactcaggagggcacatgcaaattgagtgagggagtgacatttttgtaggaacaatcttgagtgctgattaacacatattttaaaagacaattggcacttagtttagtcacagctatctaaactaagcaaaacaatttgtgtcctgtgatggggtggtacagggggaaggaagacaattacagcccctggaaatgattattgacagcaagatgggggctacatggctggcccagaggcgatcatttgtgttgggaattttgcacttaggtttggttgtactgatatttatggaacaactaaaatgtaattttctttttttaaaaatatacattttttttgagacagggtctcgctgtgttgctcaggctggaatacaatggccggtcactgctcactcaggcttgaccttctaggctcaagcaatcttcctgtctcagcctcctgagtagtggggactacaggtgcaccccatcacgcccaaataattttttttatttttagtagaaatggagttgctcactatgttgcccaggctggtcttgaactcctgggctcaagcgatccacctgcctccacctgccaaagtgttaggattacaggtatgagccactgcaccaggtctgaaatgtaattttctatttcccatttttaaatacttagtaattactaagtgataatttcctgctttacagagagtacacggttcaaatcccactcaaccaatttccaaaaggcagttaaaagtcttcctagggtttacattgagtactctttaatacaagtagactattagataaaacttgctatgctgagattttccttatagcagtacttctaaaaagccaattctaaagtctatgataaattaatgtgatctgaaaccatatacatttaatgaatcagtcttggtggtcagatggtccaaagttgtaaagcccaatattaatacctaattggctctgcagatttagggctaaggaatcctaggaagagagagcaacatctctgagagagatgtttgcatcatatttaataaataagtaaaccctcttgggaaaaacaggaatctattagaataatagaatatctgctggtagataaagacacaaatagatctgcaaaaaggggcacagggcagggaaagcagtgtgggtcttcccaacattttcggctctttgactatttcatagacatgctttttatctttgggaatttcctttttgcaatagatttccttttgttttgttttcarcttggtacagttgaccctcagtatccatggggaattggttccaggacccttgcagataacaaagtccacagatgcccaagtctcttatgtaaaatggtgtagtatttgcatataacctatgcacactctcccatatgttttaaataatctctggattacttataatacctaatacaatataaatactatgtaaatagttgttatgcttttaaaatttgcattattttaattgttatattgttattatttatttatttattaatattttcaatatgaggtgagttgaatccacagatgtggaacctacagagatggaggactgactataattgtttcacaatttcttttctttactgaagattaccgagttacttggatactcctgttgggattactaccagtagtactctttcttgggaattgaagtaatgaggttttcctatccgctgtattctaggaatctccttggtatgccagacatctctcataccatgtcttgttatatttgattgcagatgtgcttctgaaccagagtgttgagatttcagccacattcctcaaatgccaggcatacacggatgagccagccctttttctgtaacctgcttctctgtgtccttgctgtacaggccctgtctcttaaggagcakagtcagaaaagtgggcactgtttcaatggactgacattcatgctcgacacattggttcctctgtcactattagataaaacttgcaggcagtttgacctcagccaagtcacttagtgctcggagccctgacttgctcttctgtgaaatgaaaataacaattagtacctactctcgtccacagaattggcatgcatcctataaatctatcaaccatccattcaattaacacttattgagaattcacttgcttgcaagacactggggccaaggatgaataagacaggacatctgccctagaggagttcttgttagggatttaatggatcaagtaagataacgcacacattaaaaacaaaaaacaaaaacaaccttacttcatgcccattgggttagstattacgtttttttaaaaaaagaatgataatctaaatgttgaccagaaagtggagaaatcagagcctttgtgcactgttggcaatataaaagatgcggctgctgtagcgggtggtatggcaattcctcaaaaaagttaaaaatagaatgatcctatgatccagcaatcccacttctaggtatatgcccaaaattgaaagcagagactcagacaggtacttgcacatcagtgttcatagcagcattattcacaatagccaaaaggtgaaaacaacccaggtgttcatcaacagaagaatggataagcaaaatgtggtagacacataaaatggaagatattcagccttaaaaatgaatcaaattctgataaatgctacaacatgaatgaaccttgaaagcattaygctacgtgaaataagccagacaccaaaggatgaatattgtatgattccacttatatgagacacctagaataggaaaattcatacagaaagtagaatagaggttcccaggagctgtggggaggtggagaatgaggtcatgtttaataggtacagagattcagtttgggatgatgaaaaagtctggaaatggctagtggtgatggttacacaacattgtgaatgtacttaacactactgaactatacacttcaaaaaggtttaaatagtaaattttatgcatatcttaccacaattaaaaaaaactttataatacctaaaatgccatacaaatgcaagcattattaacttgaattaagattaataggattgtgtttatgatcaatctcttaaagtgctatatgcacaaagttacattgtcattatttattgtgtgatattgaagaacatctattcagataaactttaaaaataatttatatcccatcttcttccaaaaagaatttgaggtagtttaccataaaatcatcagggtaatgagaacaaatcctattaatgtaagacaaaatatagaaactgagatayaaagcagagaagaaggaagagaaggcagattacctgagcaaaactcaactgttatcctcctaggaaccagggaagtgttcatattcatcagatcttttattcttaaatgtcattggtttcaatatgatcctcgtatgggtctatagtgctttgtgttgttaccattaacagttctaggaatttattttataatcaggaaacacctaatcaaaacagaagaaggatgtaaaacttaagaacatgttttcctgagaccgagccctcaggactgtattgagaccgagccctcaggactgtattctgtgtttaatgaaacaggttcctggaagggtatctgccctgcttgccacagccccatcaatctcctatacctcccctggccagcactcrtccacactcgtggcctggcatgacaaccatctcctcagctagctcccccagcctcccagcccccatccaaactctgctctgggcagcctggatcctgtaaggccctgtgtgtggccatgactccagcccctgctggagtttactcctcatggcactcctgtcttcctggataaaccctgtacctcttgtagaggataggtcagacttcaccttctccaacccaatccattccccttctcctttctgtttctatgtggcactccagttacacattaactgttagttaatcagggttgcaaatgaataaaagtcttgtgacctttgtttcatttattgtgaaaagcaggggccattagacaaaagattacatcaaacagtctattagaaatgataacatatttatagaatgatacatgagggccaagaggggaagtcaagtttatctaatccagccctttgacatacaaagaaacagaatctgagaaaggaagtgacttaccctgtatcctagaggtagaaatagaactggaaccccagtttnnnnnnnnnnnnnnnnnnnnaaacagttctttagatgcaccccaaacataggccaagagcaactaggtaaagtagcagaaacagtacttgctttgcaaaagccatagaccttgggcaatgtttcagagccctgggcctctatttgaactgtttcctgattattaaataaaacacaaattagaatgaaattagcatggtattatgcaaacactgggtttcaagaaactggggttccaattctatttctacttctgtttttacatctgtaaaatgaagagatgagctggatcgtctttaagtttatatctgcttttagcattttatgaacctactagacgattggcttaaccccacggcattagtcagtgttctctaaaggtacagaactaataggatagatgaatatatgaaggggagtttattaggagagttgactcacacaatcacaagataccaagtcccacaataggcatctgcaagctgaggagtcaggaagccagtctgagtcccaaaacctcaaaaatagggaagctgatagtgcagcctgcagtctgtggccaagtgccaaagagcccctggcaaattactgttgtaagtccaagagtccaaaagctgaagaacttggagtctgatgttccagggcaggaagcatccagcactggagaaagatctagtccttccaccttcctctgcctgttttttttttttaatcagattttggtactgggaatggttctagaggaacagaattttaaggatggatttcttttttttctttttttttgtttttgagctggagtctcactctgtcacccgggctggagtgcagtggcgcaatctcagctcactgcaagctccgcctcctggattcatgccattctcctgcctcagcctcccgagtagctgggactacaggtgcccgccaccatgcctggctaattttttgtatttttagcagagatggggtttcactgtggtctcagtctcctgacctcgtgatccgcctgccttggcctcccaaagtgctgggattacagaaggatagatttctttagttggtttttgggtttctggagttggttgcttaatatgattagaccccaaaatgctaaggactctacttctaattgtgtggagaacactgatagtccttggcacgaactgttcaaacacttatgcaaaagaaatgcattcagtactcctgattcaccactcatgagaggcaaggagtttaatgactctatacataatacctttgaccatatatagaggaccaaggaatataacgaagttggttggttgctcctaagttcactggacaaactgatagaagaaaaccatgaacttagggattctaactcccagctccagaagcatacactgagcctcaaatcttctaagattgtccagagtgagagtcttatctcttgtagagaaagagytgaaattgtggaaaatcagatacaagctcttatcatgggagcggctgacctgcaatgaaaggtgcatgcacagcctcaccaggtgtctactgttaaaatgagggcattgattggaaaagaatgggaccctgcaacttagaatggggatgtgtgggaggatcctgatgaagctggggacacagagacaaaccatatcatttcaccccggcccctcccaaatctcatgtcctcacatttcaagacaaatcatgccttcccaacagtcccccaaagacttatttcagcattaactcaaaagtccacagttcaaagtctcatctgaaacaaggcaagtcccttccacctatgtgcctgtaaaatcaaaagcaagttagctatttcccagataaaatgtgggtgtagacattgggtaaaaatacctgttcaaaatgggagaaattgtccaaaacaaaggggctatcagccttatgcgagtctgaaatccaataaagcagtcaaaccttaaagttccaaaataatctcctttgactccatgtctcatagagattcaagaggtgggttcccaccacagccttgggcaactctgcccctgtggctttgcagggtacagccccccttgtggttgctttgatgggctggtgttgggtatctgcagcttttccaagcacatggtgcaaactgttggtggatccaccattctggagtctggaggatggtgtccctcttctcacagctccaccaagcagtgtcccagtgggcactctgtgtggggactccagccccacatttcccttccatactcccctagcagagattctccatgagggccccacccctgcagcaaacttctgcctggacatccaggcatttctgtacatccacctcaattcttgacttctgtgaacccacaggcccaacactacgtgtaagccaccaaggcttgaggcttgcatctctgaaccaatggcctgagctgtaccttggcccctttcagccatggctggagcaactggcatgcagggcaacaagtccctagactgcatagagcaggggtycccgggctgggcccacaaaaccactttttcctcctaggcctgagcctktgatgggaggggttgccacaaaggtccttgacatgccctgcagacattttcccctttgtcttggtgattaacatttggctccatcttacttatgcaaatgtctgcagcaggcttgaatttctcctcagaaaatgggtttttcttttctatcacatcatcaggctgccaattttctgaacttttatgctcttcttcccttttgagcataagttccaattccgaaccatatctttgtgaatacataaaactgaatgcttttaacagcactcaagtgacatcttgaatgctttgctgcttagaagtgtcttctgccaggtgccctgaatcatctctctcaagttcaaatttccacagatctctagggcaggggcaaaatgctgccaggctctttgctaaaacatagcaagagtctcctttgctccaattcccaacaagttcctcatctctatctgagaccacctcagcctggactttattgcccatatcactatcagcattttggtcaaagccattcaacaagtctctaggaagttccaaactttaccacatcttcctgtcttctgagccctccaaactgtttcaacctctgcctgttacccagttccaaagttgcttccacattttcagatactgcagcaccccactctaccagtaccaatttactgtattagtctattctcatgctcctaataaagacatagctgagactgggtaatttataaaggaaagaggtttaatggactcacagttccacatagctggggaggcctcaaaatcatggtggaaggcaaaggaggagcaaaagcatgtcttacatggtggcaggcaagagagcatgtgcaagggaaccgccctttataaaatcatcagatctcctgagacttattcactatcatgagaacagcacaggaaaaacctgccctcatgattcaattactttccactgggtccctcccatgacatgtggggattattacaattcaaggtgagatttgggtggggacacagagccaaaccatatcacccaccaaagaatttgccagtacacagaatagcatacactttcacctcctttcctcctccacactgttccccttagggacaaacctccttcttctattcccccttactttttaaaaaactttttatttaaaaaaactgattttttacttaaagaaaaacctctgcttaaacttcactcaacacagagttggcagtgtctcccccaacccctggtttaattagttgcccctcctctgcacctgacttttctgactagccttaccttatcacactcattggaatcattgattttttttatctcttccattagactctaaatttattaaggtcaggattatggtacatttctctatcccaagtgcctatcatggagccaggctcatagtagggcatcaatacatgtctggtcaattagtacaatagtttttgggtgggaaacaaggatgagagtgtggtactgatttcagctgaagctgttggagttttaaggatgattagaacttgaaagaaagtggaaaatagcgataacactggcttaacagaagtggggtctaaaaggagtgggtcagatgagtgctatttagttgaataggagaccatctgcagtagaatcatccagggcacttgtgaaaattacagattccatcttagctcccacccacctctccccattctgatgtgtaaatctggttttacctttaaagcaagctccttaagaagattcttaccacatgaacagagagtcttaaactcttagaaggaactctggcagctgtgggcaagttcttgaagagagaatgaagacaggataaaaatggagctttgggggactaggcgtggtttctcacacctgtaatcccagcactttgggaggcctaggtggcagatcacctgaggtcaggagttcgagaccagcctggccaacatggtaaaacccctaatacaaaatttagctgggtatggtggcaggcaactttaaccccagctactggggaggctgaggcacgagaaccatttgaacctgagaggtggcagttgcaatgagccgagatcatgccattgcactccagcctgggcaacaagagtgaaactccatctcaaaggagcttttggaagggcgtagcctggtggtctgcaaaatagactggtggaagagaaatctcagaaggatgagattctatgagtgcactaaagtgtttaaatgacaggaattgaaagcttgctctgtggggtgtcaccagaagtggagagtcagtagtcacccaggaagcatgttgagagatgatataaggagcctgggtgacagagagaatataagggatgttggaggggggagtttgaaacaacacctgtgttttagggaccctagaaaaatgtcagttccactgaaacacatgctacttctgtctaattagttctatttcaacttgatgtgactgaggtgtctgggaggcatccaggtgaaaatgatatagaccattggcaatgtgggctcaagagtgaccaaaggtctaggaggaagacaaagatgtgggagagtcaacagcatgaaacaggaagracagaagcctggaaatctgagttcgggttcttgaaaagtaaaaatctgtaatgctttctgacatgcataatgtgatgataggatagcaggagtaagtgaaaactcttgatggcaaattgtgttgacaataatgagcaaaaatagacctctggcagactggatccctattggagaactgagaaacggcggggaggcggggaagggggggtgacaggggcagtagttcaaagggggagcagaggagggcacatgaacaaagaagaaacttatcaggaaatccttaatgatctttcttgctaaaaaggattgcattttttttttttagcatattcctttcattcctgccccttggttgtggtgtcatttgaaacaagcatgaggtgtcatgtagaatggaaccagatatccaaagctctgttttcatgctaccctgaaatatggcttcagagaagaaacatccctttaaaacacattatacctccatttcccctttaatgagctaagggcggcgtctgttttgaaacgtaaagcaaagtgcccggatgtaaactaacgcagagtacattagtgcaggctgctcttgcatcctaagctccctttggtatcctaagtgcagtcctctagctctgagtagattgccatcaggacagaaatnnnnnnnnnnnnnnnnnnnnnnnnnnnnnnnnnnnnnnnnnnnnnnnnnnnnnnnnnnnnnnnnnnnnnnnnnnnnnnnnnnnnnnnnnnnnnnnnnnnnnnnnnnnnnnacatgctttggaacaggggtgtccaatcttttggctttcctgggccacgctggaagaagaagaattgtcttgggccacacataaaatacattaacactggccaggcgaggtggctcacgcctgtaatcccagcactttgggagaccaaggagggtggatcacgaggtcaggagatcaagaccatcctggccaacatggtaaaaccccatctctacaaaaatacaaaaagttagctgggcatggtggcgcacgcctgcagtcccagctactcgggagtctgaggcaggggaattgcttgaacctgggaggcagaggtggcagtgagccgagactgcaccactgcattccagcctggcaacaaagcaagactccgtctcaaaacaaaacaaaacaaaaaatacattaacactaacgatagctggtgagctaaaaaaaaaaaaaaaaaaaatcgcaaaaaaaatctcataacgttttaagaaagtttacaaatttgtgttgggccacaggccgcaggttggacaagcttgctttagaataataaagcagggaattccaaaattgaccacatagttggaagtaaagctctcctcagcaaatgtaaaagaacagaaattataacaaactatctctcagaccacagtgcaatcaaactagaactcaggattaagaatctcactcaaagccgctcaactacatggaaactgaacaacctgctcctgaatgactactgggtacataacgaaatgaaggcagaaataaagatgttctttgaaaccaacgagaacaaagacaccacataccagaatctctgggacgcattcaaagcagtgtgtagagggaaatttatagcactaaatgcctacaagagaaagcaggaaagatccaaaattgacaccctaacatcacaattaaaagaactagaaaagcaagagcaaacacattcaaaagctagcagaaggcaagaaataactaaaatcagagcagaactgaaggaaatagagacacaaaaaacccttcaaaaaatcaatgaatccaggagctggtttttcgaaaggatcaacaaaattgatagaccgctagcaagactaataaagaaaaaaagagagaagaatcaaatagacacaataaaaaatgataaaggggatatcaccaccgatcccacagaaatacaaactaccatcagagannnnnnnnnnnnnnnnnnnnnnnnnnnnnnnnnnnnnnnnnnnnnnnnnnnnnnnnnnnnnnnnnnnnnnnnnnnnnnnnnnnnnnnnnnnnnnnnnnnnnnnnnnnnnnnnnnnnnnnnnnnnnnnnnnnnnnnnnnnnnnnnnnnnnnnnnnnnnnnnnnnnnnnnnnnnnnnnnnnnnnnnnnnnnnnnnnnnnnnnnnnnnnnnnnnnnnnnnnnnnnnnnnnnnnnnnnnnnnnnnnnnnnnnnnnnnnnnnnnnnnnnnnnnnnnnnnnnnnnnnnnnnnnnnnnnnnnnnnnnnnnnnnnnnnnnnnnnnnnnnnnnnnnnnnnnnnnnnnnnnnnnnnnnnnnnnnnnnnnnnnnnnnnnnnnnnnnnnnnnnnnnnnnnnnnnnnnnnnnnnnnnnnnnnnnnnnnnnnnnnnnnnnnnnnnnnnnnnnnnnnnnnnnnnnnnnnnnnnnnnnnnnnnnnnnnnnnnnnnnnnaggtacaaggaggaactggtaccattccttctgaaactattccaatcaatagaaaaagagggaatcctccctaactcattttatgaggccagcatcattctgataccaaagccgggcagagacacaaccaaaaaagagaattttagaccaatatccttgatgaacattgatgcaaaaatcctcaataaaatactggcaaaccgaatccagcagcacatcaaaaagcttatccaccatgatcaagtgggcttcatccctgggatgcaaggctggttcaatatacgcaaatcaataaatgtaatccagcatataaacagagccaaagacaaaaaccacatgattatctcaatagatgcagaaaaagcctttgacaaaattcaacaacccttcatgctaaaaactctcaataaattaggtattgatgggacgtatttcaaaataataagagctatctatgacaaacccacagccaatatcatactgaatgggcaaaaactggaagcattccctttgaaaactggcacaagacagggatgccctctctcaccgctcctattcaacatagtgttggaagttctggccagggcaatcaggcaggagaaggaaataaaaggtattcaattaggaaaagaggaagtcaaattgtccctgtttgcagacgacatgattgtttatctagaaaaccccatcgtctcagcccaaaatctccttaagctgataagcaacttcagcaaagtctcaggatacaaaatcaatgtacaaaaatcacaagcattcttatacaccaacaacagacaaacagagagccaaatcatgggtgaactcccattcacaattgcttcaaagagaataaaatacctaggaatccaacttacaagggatgtgaaggacctcttcaaggagaactacaaaccactgctcaaggaaataaaagaggacacaaacaaatggaagaacattccatgctcatgggtaggaagaatcaatatcgtgaaaatggccatactgcccaaggtaatttacagattcaatgccatccccatcaagctaccaatgactttcttcacagaattggaaaaaactactttaaagttcatatggaaccaaaaaagagcccgcatcgccaagtcaatcctaagccaaaagaacaaagctggaggcatcacactacctgacttcaaactatactacaaggctacagtaaccaaaacagcatggtactggtaccaaaacagagatatagatcaatggaacagaacagagccctcagaaataatgccgcatatctacaactatctgatctttgacaaacctgagaaaaacaagcaatggggaaaggattccctatttaataaatggtgctgggaaaactggctagccatatgtagaaagctgaaactggatcccttccttacaccttatacaaaaatcaattcaagatggattaaagatttaaacgttaaacctaaaaccataaaaaccctagaagaaaacctaggcattaccattcaggacataggcgtgggcaaggacttcatgtccaaaacaccaaaagcaatggcaacaaaagacaaaattgacaaatgggatctaattaaactaaagagcttctgcacagcagaagaaactaccatcagagtgaacaggcaacytacaacatgggagaaaattttcgcaacctactcatctgacaaagggctaatatccagaatctacaatgaactcaaacaaatttacaagaaaaaaacaaacaaccccatcaaaaagtgggcgaaggacatgaacagacacttctcaaaagaagacatttatgcagccaaaaaacacatgaagaaatgctcatcatcactggccatcagagaaatgcaaatcaaaaccattatgagatatcatctcacaccagttagaatggcaatcattaaaaagtcaggaaacaacaggtgctggagaggatgyggagaaataggaacacttttacactgttggtgggactgtaaactagttcaaccattgtggaagtcagtgtggcgattcctcagggatctagaactagaaataccatttgacccagccatcccattactgggtatatacccaaaggattataaatcatgctgctataaagacacatgcacacgtatgtttattgtggcactattcacaatagcaaagacttggaaccaacccaaatgtccaacaatgatagactggattaagaaaatgtggcacatatacaccatggaatactatgcagccataaaaaatgatgagttcatatcctttgtagggacatggatgaaattggaaaccatcattctcagtaaactatcgcaagaacaaaaaaccaaacaccgcatattctcactcataggtgggaattgaacaatgagatcacatggacacaggaaggggaatatcacactctggggactgtggtgggggtcgggggagaggggagggatagcattgggagatatacctaatgctagatgacacattagtgggtgcagcgcaccagcatggcacatgtatacatatgtaactaacctgcacaatgtgcacatgtaccctaaaacttagagtataataaaaaaaaaaaaaaaaaaaaaagagtcatacattttctcctattttataaaggtatttgaaaggaaaacaagagaagcaaggaaaagcaatggcctaacactgatgtgagggctctttttaagtcatatattaatttgaatgtattkaatgaatattgatttgcctacattcttcagtggagttcctatccttggcattttatctcttgcactccaacaggtaaaatgaagcagttggatgagatttctagactttttttccaaactrtaatccagaatatgaccaagggatttcttttccttcagagatgtgaatattttcctgtattagagtcctaaaagctcctaagagtctcttaagttcatagatcatttttggataataaccttgacttctgyccacctcctggttatttctgccttctgacttcctttaattgtcaatgcatcctgaagccagcttgccaagttgcttaagcccagtgcttcatgaaggcataagaggctgattgtactcaggttttccatgaatgcttaactgttgctgtggtcccacttgatgccagggctcgtagaaacatattggtattgaggcctgtacttccttctgacatagaaaccgttgttgtttccgggtgatttataaaaggcataggaacctctttctcagtgacttagtaaagtatgatgtttaagtaactttttgggagttttagacttccggaaattacatcctctgtggtacatcttgtttatcagtcttgtcttatacaagtatttataaatagacacaaaaatgattataagaaagaataatgagctgtaaaatatgtgaattgtattatttatttatatctatcaaatagggtttacatatcattacctccagtaacattcattttaaaatattatgtaaaccctatttttccattataaaagcagtaaatgtttcactttaaaaaagattgtagaagggtatagagtaagatgtagaaattctcctttcccatactttagctttcagtaccactctccaaaagcaatcacttttaacaatgtgttaagtttctttgcataaattttctgagcatatacagttttacgtatatttctacatacacattcattttttacacaaatagtcatactatgcttacttgtctacgtcttgttttgttttttcactaaaaatacctggcctctgtcatatcagtgttttagtcagcctcattctttttaacaattgcatggtatttcatcattatatgtatgtaccatatatatgtatatatatatacacacacacacacatatatctatctatatctatatgtatgtatatatatattttttttttgagatggagtttcactcttgttgcccaggctggagtgcaatggtgtgatctcggctcactgcaatctccacctcctgggttcgagtaattatcctgcgtcaccctcccaagtagctgggattacaagcatgcgctaccacacccatctaattttttgtatttttagtagacacagggtttcaccatgttggccaggctggtctcgatttcctggcctcaagtgatccacctgcctcagcctcccagagtgctgggattacaggggtgaaccaccatgcccggcccatgtaccataattttttgatgagcatttaagtaaccagtttatatctggttgttgttgaagttatattgtcctaattataaacaatgaacattcctagaagtgaaattactgaaccaaggagcacgtgttttacatttgggtgagatgtttctaaattaccttccaaagagcttgcacaaatttacacattttaccaatattgtgtgagggtttttccacaccctcatttaccagtctttctatgaggtttgaaatgtttaatattctaatagatgaaaattgttgctcttttaaaatatgccttcgttgaatgtatgtactgagtattttttccacgagtctcatatccatttgaatatttgtgtgaatctcctattttgtgtcctttcccatttttttctattggatcatttgtcacatccatttttatgagagaaaaacaaatcattttctaggagaggctgccatttaatagataatccatcaatagttaacaagaataaatatatatattctacacaaggacacatgtataaacactcatctacttggactcctaaaagaaataataaatatggccacgtagcctgaggagagaaagaaagtctgtctgggatagatgtggggactggccttactctttctactggttttctattgctatataaaaactgaccacaaacttaggagacctacagtttccctgggacaggagtcccacaaggctaaagtcaaggtgttggctggctgtgttttcatgtggagctctggatcctcttctaagttcgcgtggttgtggcaggactcggttccttgcaactataggactgatttcccttccttgctgcctgtcagctgggagccactctcagttcctrcggctgcccacattccattccatctggccccctccatctcaaaagtcagcaaaggggaatctcctttgtgttgaatcttttttatgcttccagtctctgaccacttgacccakatagatctgagttcatatgattaggacaggcccaactggattacctatcaaatgaacagcaaaatccttccacagcatcccctaaattagtgtttgattggaagaggcgtatgtgcagtggggccagaagtcttggggaccgtcttaaattctgtccaccacatcttccacctgcattccttgacagaagcagacagaagtcatatcttttgccttaggaaatcacagtgaaacatccaatgccagaggaaggagctagcatacatctaaccccatgtacaacaaaatacatccatatgggtcaaagatctggatctggcctggcacagtgtctcacacctataatcccagcagtttgggaggcaaaggcaggaggattgcttgaaagtagcagtttgagaccascctgggtaacatagcaagacctcatctctaccaaaaaaaaaaaaaggcgttagctgggtgtgrtggtgcatatctgtagccctagctacttgggaggctgaggcaggagggttgctggagcccgggagttcaaggctacagtgagccatgatcatgccactgcactcattcctgggcaacagggcaagaccctttctcttaaaaggaaaagaaagcttgatgtgagcagaaagctggagagaaaatctaggaaaccacttatacaatgtatacaatatagggggtgggggtggggtcaggcagaccttccttgactaaggatccagacctggtatttctgactccaacatctcccttcttgacccccacactatatggcccacccagaggacaggtcattcactggctgcctaaaggattttgagttctctaaccttgctgtttcttcttgataccagtgtgatcacagtgtgcgtttgtgagatgctgaccttgggtgttcaatagaacagaatgaactgaccagaaactaagtaggtgagccactaaaagggaactgtattgatgagcattattctaacagaattctaaaagaacattctcctctccctgtctctctctctttcaccctcccacctgctgctgtgattcaggcgcattatacgtgacttgcttgagactgaagagatttacataaaagagattaaaagcataattgatgtaagtagatttggggagtggggtatcaagcatatattcaaactgcagatgttttgttgtacaaagagactcaaaatagttgccagaagtctccagaattcccaccaaggtttcaggtcttagaatattacaagtgtctccagtaggaataagaacatccctgtggtttcttgatccatgtagccaaatagtttccaaagaattaagccagttcacactgattccagcaaagcccaaataggtttaccatcttcttgccaacaaaggatattataagtgttcctgatactttaataagggaagattatttcttgtttttttaaagtagtctttttcttaagagtaaaaatgcatgttttccctattttcctaagggaataatcttaaggaaaaaattatatgtacgcgattatttataatcacatttttaccataaaatattagaagcaacccaaatgtccataaaaagggaatgtttagtaaactatgatatatatgctgagtaaacattattcagatattaaaaaataattattgggccggatgcagtggctcacgcctgtaatcccagcattttgggaggccgaggcgggtggatcgcctgaggtcagaagtttgagaccagcctggccaacatggtgaaaccctgtctctactaaaaatacgaaaattagccaggtgtggtggtgtgtgcctgtaattccagctacttgggagtctgaaacggaagaatcacttgaacccaggaggcggaggttgcagtgagccgagatcacgccattgcactccagcctgggaagaagagcaaaacttcgtctcaatattaataataatcataataataatagtaattgtattagttcataaaacagtgggtacattttcccttcttttagattaaacctgtgtaacataaacatttttaaatatatttgttcttcccacaaaaatgccattttatgatcattgccattaagccatctccttctgaaagtgggcacatgaggaaaatgatatcaaaagaaagtactcaatacgatagctttcaagaaacaagtgtgctatattcttcaatcatttcactaaagttttgggttttgcagtagctaattcagatgatctctggtatgttcctgtttgtaacacctaccttgtttgcacctctgcagggatatatcactccaatggattttatttggctaaagcatctaattccagatgttcttcagaataacaaggactttctctttgggaatattagagaactttacgaatttcacaacaggtatataataattcatgttatcagaaagaatggagagtaasagaagggtggaaatgagactgatggaattgagagatgaaaacacttagatgttttcaggtttaagcaagtggtttggagtcagtggattggattggggtgggttggagtgaaaggaggggagaagccccacaggatccctggagagaaagggaagagacatcaaaggaacagggacccagtgtcagacatccatgttgtatgcagttgagtgttcctttgtttatttattcatgcatcagcattttttgagcacctgttctgtgccaggcactgtgctcagcattgggaatacaaagatgaccaagatacacatctccatactactatcataaggggatgctgggaactagggtgttagaaaatgctgactgctcaaacaagttgtacttttaactcggggctgcttggatattgagttctagagaattgcaggaataagggactttggaaatcatcttcaaaccctttcatgttacacatatgggaatggtaacttgttaactctctttattcgctatgatgaccccaagattgcacacctaattcacagagggagaaaagctgcttggtgaattgaaccacagttgcttcctaaccccattcctcgtccgttggtcagacgcaaaactgaaatggaaacccatttctgttgatttccccagagaagttatgtagcctctttgagccccaggttttatatttataaaaccctatctttggttgaggattaaatgagatactatttgcggagcacttagcttatgcctggcttatagtaagctgtcaatgatattagtaatagcaacagcagcagcagcagttcttatgaacgttactttcatgtaagagagagcatcagtgaatgtatccagtctatctatgactagtgcttagaattacccgaacagctgtgttctgataattggagatgatcctgaccccctgtgccttctgagtagttctcatttctcctctctttcycaactagttcttctcattctctttcttatttttctttttgtgaacctaaggcaacagatcgaacaacttaaagttgtgagtgatttcagggtaattgtagtaatacctcagaatacagctttttttyctgaatcaatgtgtagdagataagagcaagaaggcctggagaacatttttctaggcacctcttgaaaccttatgtgattgtacttaaaaaattaattacctacatgtcaaaatcaaaacattattacttgtatacttttatttttctaggacttttctaaaagagttggaaaagtgtgctgagaaccctgaacttctggcacattgctttctcaagagagtaagtctgtactcccagtaaataatcatgttaaagtcagcccttacatttctgcgttaagtggcaaggacaaatggaaacaccaatggtctaaaaacatatctgcttccctccgactccaagctttactgaagtataattggtaaataaaaattgcatatattcaaactatacaacatgatggtttgatatacttacaccctgtgaaatgattactgcaatcaagttaatgaatacattcattaccattgtgtgtgtgtgtgtgtgtrtatgtatatatatataatccaaaaacagttgagctcattgaagtagaagggtggttgccaggggctggagtctagaggaagtagggagatgttggtcacagggtacaaacttgcagttatgagatgagtaagtcctggagatgtaacgcacagcatggcgactatcatggaataatactgtactgtacacttgcaatttgycaagacagtatatcttgtatctgccctttgaatggaaaacatgagttggcctcccaactttatctgactttatccaaggtgagaatgagtccaatttgactgagctcacactgatatgtgggagtaaccgcaagcctggcttcctgcaaagccccatgaaatggaaggctggccatccatggtccccaaagcagaggatcctcttctgaatgactcaactacgttttaaaacaagaatcatacagcgaggttagagtcccacaataaagctgtactaatgctctcaagaggagaagcactggtgttaaactaaaaacctcaggaaatacattttctttccattctattttttacaacatagaggatgattcgaaaattctaaatctacagcctcctttaggcttagtactcaatttatgaacatcttggcctacaacattatacctccaactaccccttcttcccacctcccagacttcttccctctttccctgtttctccaccctgttttaggtaacaaataggctatatgggccagtgggagctgccacagagaaatgttccacccaacatcaatccccaccaggtactttctaggacacgaccatggagatgatcctgaccccctgtgccttctaaatagttctcatttctcctctctttctcaactagtccttctcattctctttcttatttttatttttgtgaacccaaggcaacagatcaaacaacttaaagttgtaagcaactcatattatgactgaggctgagagcaatacttatgataactggaagcaaacaaagcctccaggtttcaagatatttgacattaatggagagaaggaatcttccatgctcagagccttttggtggccccatatggctttccatgtcaactcatcataggctttgtgtcaaagcaccagaattcaatgtacactgaaaactattttatactcattctgattcattaatttttttgaactattacattattagtgctttatatactattttgaatttttgcacttaacaaacgactaatgtgaaatctagtttcagagattagaagtattttatggttatgtatgtcattactgcaaagattatttaaattgctcaatgagaaatgggcaaagttcctgtgggaaagtggatattatcaaattgttcaaatatgaggaaattgtcagagaattattaactaaataccttttctgaattcctctcctaaattgtaaagttttacaaagttttttgatagcgccccgccatgttgggaggaacattgtaaatcattaacccagccagaaaacactgacttagccctatatgatttatgatgttagagacaaaatacaagtagtactttttttttttttcttgagacggagtctcgctctgtcaccaggctggagtgctgtggcgtgatctcggctcactgcaacctctgactccctgattcaagcgattctcctgcytcaccctccctcgtagctgggattacaggcatgtgccaccacgcccggctaatttttgtatttttagtagagacgaggtttcatcatgttggccaggatggtctccatctcctgacctcgtgatccgcccacctcggccttccaagataatgaattttgaaatagttttctgaccaagtgttttaatcagcctctttagcctgtatcttctgaaacaattctcctccagagaccatgttctatatagaataatatttgtccatagtgtactgtgggttccaagtactctgagatctcacatggtaaaatggaaagagcactggaatgggtgctcacactgatatgtgggagtaactggtaagtcaggaaacccgatttatcatgttggtcaagccacttgctatctgcatgacctccagtaaataacttaaactttggaatctcactttcctcctccacacaacaggctaatagtaccaatatgtacagttgttgtgggaaacaaaataatgtatgcagaggattccataaagtaaaaagtgctttgacaatagccaccattttttgagtactctatccattgggcatttgtggagaggtttctatacatcatctcatttaatctcacaacagtcacaggagttgactactgttatgggcccacttaacagatgaggaaactgaagtctaggaaggttaggtaacttactttaggccatatgatttgtatttggcaaagccaagaactgaacctggaccatccgccaccagagccccgcagtcttaatccgtaagcaagtatgtattcttgtgtgaatatgagtttctggtagcaattttatagcctcctgattcattctataaggagattaggagaattgggcacttttgtatgttgctggttagtggacatcctttctctgaggaattttggactgttagcctttagaagagcaatttaggtcaatactatattgttaagctctgagttattattctagctccttaaccagtctgaacatttttcaagggccatctgtcttaaatgtgtgtgccatttttttcctggagggaatagcaaaggacggttgctgtagttcctatgctgaaatgaccacttacaacctattgggagaaagaaagagctacagaaatggaagtcatccactatagcaatgtatttgggagtagaacaggcatcattgaagctgcgagggaagaaatcatctgtgttgacatgaaggaaatccagagttgggctgagcaggaggacagggacacagacttctgcaaggaggtggctacatgggcttctccaccagaatggcatgggatctgtggccagcacagccgctgtgggccaggctccctgatagagcgagtgaagctggcaagctgacgccagaggcttggagtgtgctttctctccgggagattggcagatatgtgcccacctctcagcrtctttgataccatgasaatacaggttgaacagcacgttgagtcctccttgctctctagctccraaacagtcacataacatttcctgtctcagagtcttgtgctgcaggttgaaagtgatgtttgaggcggagcctgtcactttgagggttgcccaaatgactgagctccgtattggttgcccgatctaccacatctcccctctggcatgtttccatcttttggttgtttcttgggcttctttgcagggttggtgtcacgatgaccacaaggagagggtggagagagaagagagggggaccatcaaacaccagcctcttttctgtcagttttactactcattgcagacctgttgtggggagatgtcgatgtcctggacaaagggcaggaaaagaatgataaagataaaaaccaattcctgtttgtgagtctacttatgtatttaccaatagcccttgtagatgctcccagagcactctgtgcctatctatgtctggtagttatggttgtttaaagccttctgtttatctctccatcacacacacatcccaacataagattacttactgtacacccccaattccttacacattagaatactctggcttgttgaatgaatgaataaactgtatcatcctgtccacttactgaaaaatgctgcctgattaatttattctaattttttcccacctagaaagaagatcttcagatatattttaaataccataagaatctgccccgagctagggcaatctggcaagagtgtcaagactgcgcctactttggggtaatgttgagaagacaaacttcttcctggaaaatgtttctatgcatcaagttgttaaagaaatcaaaagtgggactagggagaggaacttggcattgcgatttatgtttatttaaagtgtcccatactttgaaattacacatgaaaagttgtaatgggataggcctgtgaggagcacctatatctggtgagaaaaccagtgtcttcttctaagatgggttttaaaaatgaaactaagtaaaaaatgtcacactttgggctccctggaatgatgtctacaaaccgtctgtatccttcaggctccaaaaggcctgaatagactctggcagcccccaacttgaagataggtggcctctttttcagaaggacttgaaatgccccactgtcttctagtgaacttgctttctaaaagaaataaatggttctgcttccctagatgcctgtaaaaatattagccgagccgtcctctttcctctttctcttatttcacacactgttcctaggggaaagaacaaccccacagccttatggagctgctcgacacagctgcccctgttgtccaggaaaagcaattttgtgttttgtacctaaatgctgccacttttattctgtgtgtgttgtttgttttgctttatgttgtttctatttggcttttaaaggtatgccagcgccaactggatcacaatctccctctttttaagtatctcaaaggaccaagccagagacttataaaataccagatgctgttgaaggtaaaatcaatgagacagtgcttttccttggtgggaaaccagacgcctgcactgtggtgcccatgtcgttacacatgtagagctgtgccttggtcttctaaggctgaagatacgtctatcctgcaggctttttctttcctccaactctaaatcagccctcttcaatgtggagtaagaccaaagaatcatagagttggagggcacctgagggcctcactagtccaatgtctagctcagggcatgaatcactaaggagtctggcttaggggaagagagctctttgggagcgagagtgtgattttccccaaagttactgttttatgggcattttaacttgtggaagggagaagacaaaactgaagtcttctatccttttgcagcactgacctccattcttagatttaggatcttaccctgagagcagcctaacagaatgaactttgctatatctgaaccctgaacccctaagtggttttctctctctctctctgacctttacccctccttagtgataagtcattgacactagcacatctgcaggcaagcattctcagacactccaaacaggatatgagggcctatcatkgctggttttctaggtgtgagcttgagagaaaggtttgggccaccacgataagttgtctgttgaattaacctctataaggcatttaggtagctcttgcccagtggccactatttcttaataaaaaacaaaaacaaaaacaaaaacaagcacctactgtttactgggtacttccccacgtgtatttcttttttctttctttctttctttttttttgagacagagtgagactctgcctaggctggagtgcaatggcgcgatctcagttcactgcaacctctgcctcccaggttcaagcaattctcctgcctcagcctcccaagtagctgagattacaggcacgcgccgccatgcctggctaatttttgtatttttagtagagacggggtttcaccatgttggccaggctggtcttgaactcctgacctcgtgatctgcccacctcagcctcccaaagtgctgggattacagtatttcttatttaatctccacaatcagacataccagccatgctctggactgtgaagaaactgaggctcaggaaggttaagctcattgcccaacagtctcccctcagaaaaagttacccctttcaggccagacatgataacacacacctgtagtcccagcagctactcaggaggtggaggcaggaggcatcccttcagtccaggagttcaagactagcctgggcaacatagcaagacctcatctgtaaaaataattttaaaaacattttttcaaagttactcctttcaagctttccattagcagtttcagcctcggtgtactctgccatttgtcagttatgagaccttgmcctcttgggccttagttttcctctatgtaaaatgagggtactagaacctcctccataagatcgttatgaagcagatgattagcacatgcggagggcttggcacagcccaggaagctctgcatgatgtgtagctgttatcttagacattgagactgtcacaccaccatagaaatgaggataatgatctgcttctttcagcgagcagcacctcagagcatgtttgacccagcactcactcagggcctcatgctcctctgcatgtcccattgtcactgtcattcctattgtagaagtccaacctctgggcccagtgaggcatgagcaggacgaaagtgatggtccttcctccctcagcctaggttccagctttcccacagaggtgacatttacataggagctaggttcggtaccagacgcagagggctgtggggcatcgtcattggaaacacagactcgagagtttaacaacctgggtctgaatccaggctctgacccttccaggctgcgtgaactcaggcaagttacttaacctctctcagcctcagatttctcacctatagaaataagataataatagtactttcctggtatgcttgttgggagcattaaatgagataatacaggttaaaaggacttagaaggttttgttagctgcctttcactgaagaaacaagagatagaattactacaaaatattttgcggggggtctgtgaggagccgtgggagctacccaaggcagaccagagcagtgtccccacagctaagcttgctggtgcctgtgaaaccagctcaggccattacgtgcctgcaaagaaaggaacgaccttgtaatcctatctaggaccttctctatccccaggggcagagcttattttgcatctcgcacacatgtgctggcttgaaagagcatgaatgttggactgattgcctcatgctttagaaaggatcatgggatcttggggagagggtgatgagtgatagcttataccattaaagacagactcatgaaacattggggaaaatgtgaacaaaatatgtaacagatgatcagtatgcttaatgaatcatgtgctcttggaaattataataaaaagatgcgcaaaggacatagcaatttgcaaaagaataaacactagtagcaaacgtttttttaaaaaagttctacacctctagttatctaaggaagtcaaattaaaacaacagtgaggtaggatttctcttttcattcaattggtaaagatttttgattaaatggtactaccccttgtaggctaggggctggtgagacaggctttcctatacagctggcaggaagacagtccttctctgaagaacttggaaatatgcctcaaaactcttaacatttacaattccactctaggaatttagctttaagaaaaatgcacaaaagttattatcattattatagtaaaaaatattgttgaacctaaatgtttaatgataagggggactataattcgattatggtttatctataagatataacactctaccacaaccaaagcccatgttttaaaaaaatataatatcatgggaaaatattcatgagatattgttgaatgagaaaaatggtttatctctaagatataacactctaccacaatcaaagcccatattttagaaaaacataatatcatgggaaaatattcatgagatattgctgaatgagaaaaatggtttatctgtaagatataacactctaccacaatcaaagcccatattttagaaaaacataatatcatgggaaaatattcatgaggtatggttgaatgagaaaaagtagtctacaaaatagtgtgtacaatatgattctaggtttgtggaaaggaccctgtgccaaatacatcatttattctttccctcttacacatttacacacgttctcagtcagcttagcattggtggcagatagtttrcacagtagattttgttgacaatctacattttgatggcaatgtacattttaattttcaacaagacttttgggttaatgcagggtctgctggatytcgagtctcctgaagatatggagatagacccaggtgaactaggaggctcggctaaggtactcaatattaaatattacattttatataactaactattaatggtgtttgtctatggktcggaggatttatagcaattttayttggtggtctttattatctagattttctaaaatagtatgtatcctataactcacagtcaagaaaaaaaacaaaaaawttaaaggcaattttaaagtagggatttgcagcccaaatggaagtggtaatatattttcttccttccacataatttttttttttttagacaaagtctcactccattgcacaggctggagtgcaatggtgcaatcttggctcactgcaacctctgcctcccgggttcaagcgattctcctgcctcagcctcccaagtagctgggattacaggtgcccgccaccatgcacagctaatttttttatttttagtagagacggggtttcgccatgttggccaggctggtcttgaactcctgacctcagatgatccacctgcctcggcctcccaaagtgctggtattacaggcgtgagccactgcacccagccaaaaaaattttaatgggaacaaaattaagcaaatacgtaaaatgcatacataaaagactggaagtaaatagatatgataaaatgtctgctgtggctttcctgaatggtaggattatgttttcttctttgtacctcttagtatatctaatttctatatgttatgccttgttctcctctgtgtgtgtgtgtgcgtgtgtgtgaactctaagagtctgccaaagttcccttagaataaatggtgaccatgaccacaccaggttaggaagaaatctgtgktatagcagtgcggtttctcttccctttcctatagaatattctggttttagcaagaaacacttgagacatgtcttatggggcagtcatttgcatgccctttctgctcagaatggatgacaaggacctgttgaaaacagaagcagctcaggacacaggtcatatttttacagcctggagcaagaggagctagccctagttagaggagtttaataatgttttaaaggatttttctgaaccctacattatacagttcaaaaccctagccacctcgtgttttgtgaaggagggttagcggaaggaagggggatgggaagaggtgaggatctgaaaggaaactgagcattcagtgtttggtaaggaggaagatgcctggtataagaactttaaaaaaaaattatttcttatttttttatttttttgagacagagtctcgctctgtcacccagactggagtgcaatggcgcagtttcggctcactgcaactccgcctcccgggttcaagctattatcctgcctcagcctcctgagtagctgggattacaggcacccgccaccacgcccggctaatttttgtttttagtagagatggggtttcaccacgttggtcaggctggtctcgatctcgtgacctcgtgatccactccccccctcggcctcccaaagtgctgggattacaggcgtgagccactgcgccctgccaagaactcttaatcccttattgatgttgttaaaataaattcaggtgagagtctgttttcttttaccaggaagcgaagcttctttattatgaatgagaagctacgaatccatgatacgtttttcagaggcagcagcacgatctattccattcatcagccctgtcactcatgtctctcatccaaagatgcaaatacccagtgcttccgcatagattaagaaaatattaaaccctgtgactacattgtgctgtagaggacaaaaagagtcagggccagatgcggagcagcaaaggggctagctgttcttcactgcagaacttgagatgttaaaaaaatacattgaataaaccaaaatttttttatgtgtatttaccaggtaacagataaatacagcatgtaggtagcagggagataaaatacctcaagcccatgcaaaagcctttagagctgaaacaatcaccccaatcacatcctaaatgtcactgtggttgtaattggaacattggtctctttaattagttactgcttttcygctgaatgctgagtctttatgttcgggaggtgcagagcgctggcttatctctttggcatctttaatggtggtgcaatgtggggagggccagggacaagtggaggaaggaaggacagagttgggggagattcagtgtggaaatatgatgttatagcttttacatgtaaatcattagtaaatttccacttagcagcctctatggagttctttgtctctataggagtttacaaatgtcctcctctgggatgattttaagtataatttttcccacaggaataaggcttccacattaaatataggaatatgatactcagattgtattctttttctttttcttttttctttttttgtgagacaaggtctcactttgttgcccaggctggagtgcagtggcgcaatcttggctcactgcaaactccacctcccgtgttcaagcaatcctcctgcctcagcctcctgagtagctgggattacaggcacacaccaccacacccagctacttttttttttttttttttttttttttttgagacggggtttcactcttgttacccaggctggagtgcaatgacacaatctgggctcactgcaacctccgcctcctgggttcaagctgttctcctgcctcaacctcccaagtagctgggattacaggcgcccaccaccacactaagctaatttttgtatttttagtagagacggggtttcaccatgttagccaggctgggctcaaactcctgacctcaagtgctctgcctgtctcagcctcccaaagtgctgggattacaggcatgagccacccgcccggccatatggtattttttttttcagtaagccccagggaataggggtataaaaaagagagaagcctatttaaaaggagctaggtttttccatgctttaaaaaagctaaattctggccagnnnnnnnnnnnnnnnnnnnnnnnnnnnnnnnnnnnnnnnnnnnnnnnnnnnnnnnnnnnnnnnnnnnnnnnnnnnnnnnnnnnnnnnnnnnnnnnnnnnnnnnnnnnnnnnnnnnnnnnnnnnnnnnnnnnnnnnnnnnnnnnnnnnnnnnnnnnnnnnnnnncctctgcactccagcctgggtgacagagtgaaactctctctcgctctcaaaaaaaaaaaaaaaaaaaaaaaatatatatatatatatataatatatatacttatattttatataatatataatatataaatatttaatatatataattaatatataaacatataattatatattaatatataaatatttaatatactatataaatatttatataatatatatacacataagaaacatatagaattcagctatatagctgaattctatatgtttcttatgtagcaggaatataatttccatgatttatgaacttcattcgtcactagtacaatgcacagaggtagatgattttgcttgtctctatgccgtatacctaaatcagtaagcatctttagccaccatgctttgggagcagggagacagatcaatatccacccttctcagtcagggttggctggatccctggctcctcatctctgtcctgttttccttcttcactttgcagatggtatacttttgatttccaacaaggcatttgttttccacaggatgggccaaagagaaccaaagattcagcattctcaactgaactacaacaagctttggcagtgatagaggatttgatcaagtcctgtgagttggctgtggacctagcagcagtgactgaatgtccggtatgttccatagtagtgttagagcatctcacacaaaaggcaggtgcaatactacacagtgaggaaatgctctggcaaagtcagagagatcgtctatggtaaaggarttggactctgaggacagtcgcctaaattgctcagtaaacccgcactacaagattccaagctgtcccttggcatcttcaggaatcttgratttattcctcagggttctgaatgtgggactgacccactgtctggacaaaccagaaagtcaagggccagaacatatatgggcagaggaaaagtcctggaggagcaatttattttctaactcatggcactattaaaatagtaaaagatttgtcttcttgtttcagagtttctctaagaaaagtattttggaaacaggtcctatattcttgccccaattttatatcacagatcccagaagaggccccaaaagtatatagtgtacatgcattaatccaaatagtctaaagaaaacccaagagatgcagttagaggccaatgctggggagttgagctccagcgtcagtgttaatccggagcaggctggtcccaggcattccaggcaaaacatcccctatgatctctttgagactggagcatagttaatattcgacttgttttgttttttactttgaagtactctagatttttattcagatgtgtttgttttatttcactgtcataataaattaccataagcttggtggcttagagcagcacaaattcattattattattattttgaagttccaaggtcagaagttcaacacagtctcatgggctaaaatcaaggtgtttcctttcctttttggagtctagcatctgtctcctggaattttccagcttaaaaaggccacccacgctccatggctcatggcttctatgagcagaggtaataaagcacaaaccagcaatggcaggttgggttcttcttctttttgtttgtttgtttttgagacagagtcttgctctgtcgcccaggctggagtgtaatggcatgatctcagctcactgcaacctctgcccgccaggttcaagcgattctcctgtcccagcctcctgagtagctgggactacaggcacttgccaccacaccttgctaatttttttttttttttgtatttttagtagagacggggcttctccatgttggtcaggctggtctcgaactcctgacctcgtgatccacccatctccgcctcccaaagtgctgggattacaggtgagagccatcgtgcccggccaagtttttcttacatcacatctctgtgaccccctcttctgcgtttttgtcacttgtgattatattatactttttccttctctttttttttcttttcatttttatttggttttgaacataccatgtattgaggtcttggtagaggaaatgacttttctttccttgtcataaatcaaaccatgaaagttattaaggtccgaaaaatgagttatttttacttcccacgctggtatttcttgggcctggatctcagaaacttagccccatggggtttgctgtgatcccagccatgatgctgttactgtcccctgggactccaaggtgtctctgatgacaactgatgcatgattcaagaggatatgcataaactgcagagtagggttagggtgtgtataaggatcattttcttggtaataattcttctttcttcgcctgaggaaagtcaagggaacaatttgttaggtcaatccagggcatctttctgttcctttttaaatcttgaattacgtattagacatccctattaaatttcatttccctgaatctaatgaatgtcctggaaacaatacacagggcaggaaacagtgtaaataacataggaggaggaggctgtgagaaaagaatggttaaaacatgagcaaataacatyctgccctaatttcattcccagccagtttgcatgcaaataggatgaaccagcttacagaatttggagattttacacgcaaaaagcaaaggaccttttttgaccatgtgtcctcagaattgtgcctctgccagatgctttttggtaccttttctactaagacttaacttacttttacatctaatacatcagctaatttctcctgacagttttgtataatcctgttgaattatggaggagtagatattggaattttcaaccttctgattcaaaagaagatccatggaaagaagagttaactcactcaagattacatggctgtcaccttggactatttcttgttcattccctatcagggtgctattccactctttatctgtttctgattagaattgactgacaactgcctctaactcagctcaaatgattctgagattctttgtctccattttgtagagttttattacaggtgtttatgatcacctgtaataaattacagctatatgcatggctgagtccagtttaacctcttagtttctctgcttgaaatttaatattaacctggttttataaaggaaagaaattgaatgtgataattaaattatcacaattaaacaactagaaagcaactagaaaaaaatcccttctgatatttatattttcttgtttttctgtgtactcaattagtcctgggtctaatttaatcacagaagtttaaaattcttttccaaacaagtttgttttgtggaacactgagttataatttacttctatctatttgcaaaaaaaaaacaaaagtttttttttttttcaaatccaatgcatattagagatgcatttaaattctgacttgccagggataagttccaaagttgacttgtaaagattgaatgaaacagtcttcctttttggaacaaatttatataaaccactaaaggatgtacttgtattgtaagttcattgtgagctagggccaggattttatttctatttcagtttcctctttccttaccacagtgttagctgcagagatagggctaagtaaataatcctagtgacccaggcaaagtatctttttttattccccacccccccaccccccccacccccccacaatacctatattacaggcggttgccgggagtaagtgagaattaaatgatgggtaaggcaccaagcactgtgcctggcgcccaacagatgccgaataaacagccctagtggtacgttatatggggacctgctcaagctggaaaggaagatacctctttgcccctgactattgtaatcacaggctcccacagcttctgcttttcatttctggactcaggctctgtgtggacgcatttatacagatgtttcctgcttctttgtgcagtaagtttgtgacagtcatattaactcttactacctggaatggaaacacgggcacccaaaagaagctcttgctgaggccagcttccctagattcactctctcagccagactcttcatttggccaatgtagtcacatttgaaatccttgtatcggggctcttacctgcagaatgcccaggtgtgaaagtggtagcatttactaattgattttgctatcacttcttgtacagaggaggccatctaacttatcgctcgctcatttgaggtagccgctatgttccatctctgagttcacaaccatcaggttcttccacacaccgtgtgacatggccacacttctttgttactggtggaaaacagttggaagtatattcgtttcctagggctgatgtcgcaaggaaccacaaagtacgtgacttaaaacaacagaaatttattccctcacagttttgamggctagacgtccaaaggcaaggtgagagcaggcccacgttccctctgagggctctcaggaagaatccttccttacctcgtctgagcttctggtgactgccggcaattcttggagttccttggctgacagctgtgccactccaatttctgcctctgcctttgcatggctgttccctcagcgtgcgtctccatttctttgttttctttttttataaggataccagtcattggatttggacccatcctaacccagggcaaccccatcttaaccaattgtatctgcaaagaccctctttccgaataagatcatattttgagggtctcatagacatgagtttttgggggaacactattcaacccagtacaggggcgtcgctgaatgaactccttggataaatcaatattccctcacagtgatgagtattttgtttcctgtcccctactcccaagcaccactaaatgccaataaataaataaatactagggaatgccaataaataaataaatactggtgaacacgtatctgaaagaggttgtgcaacgtggtctccgaccttgagatcaactacagtctagttggaaagaaaaggtacacgtgacggaaaaggtcattcttgctcctgctcagggaatgtccctgcagcttcctgttggaggcggagcagctccacacagcacagtgaacagtgtgtgtgcctgcccttggtcagcaccgtgtagggcatgtgctcacccgctggagatcggaccttgggcgtggagatgggcaataccgtcatatgtgtggtcctgagaacatttgtgcaacatgacccagaggatatgtgcccatatgtttctgccagacttgaaagacccagcgactccccccgagtcacttccagtaataatgggcttactggaaagctgacctgcagcttctcaagaagtcacgatggcaaagccaagttcgcggagatgggaactgagcaaacccaggatccacagcacctctggggcctgggcctggggagggagccggggttcttacctgtgtgacccgcctgtatatgtcaagtgcacccacatgcctgctcgccccysctcttaccacctactgactgtttttttcccttccgtcagtttcttcctcttcctcataatttctaatgactcaccttcttcatagttctgtttccttctcgtttattccactgcctgctttcccctaaagcatctcacagccccrtctcctgctggtcaccacttcctcctgttttcttcagttcagggagagatcacattgccaacccccammcctggcacattgtttttatgctgggggccctatggtcagctgctggtacctctctggattcacatcctctgattacttgcctatgaaggtgcagcagcatggctgtggatggggtgatgaggaaagttcagaggtaataaagcacaaaccttgctgcctgaggctgcctcttcagcatttctggttggggctgtttcctctacaatagccttgtggatgccttaactcacgtcaccccatcttcacaagtcattagagagtgtacacctcgacttattcccccttcccctatcatcctagcctcttctagaattactttgacagctgagcctccacactgaccaaatgtgttcttacaagcagctttacctaaaacatgttcctctttctatcatagggcgtggttgaggatgttgctcagtgacaacatatcactgggagaaatgtttcttatgtcttagtaggaatagctgtgcttttcctgaacaaccggtttgtgtatgtcttcagacataataaatcgtaccactcaccatgtttccctctgtattgctattagaaagtcagagccaagtttacatcaagtttaaatggctttattatatgcattttacatataacctcttcatcttttcttttatcttctacaccttctggaacagttcatctgatttattgtctttatatttagggatggtgatctccctatgttgcccaggctggcctcaaactcctggactcaagtgatcctcctgcctcagcctcccaagtagttgcgactacaggcaggcgccaagctcccaacttctttattttttcttcaccttaattccctcggttattttctatctgtctatactgtatatatttctgtaagatgcgtcgaatgtttaaaatgaggtagagagtgaatacattgtaagatagaaactacaagtttgaatatcccttagccaaaatgcttgaggccaaaagtgttttggagtttttttttttttaggggaggattggagtatttgcatacgtactgagttatgttgcagatggaacccaagtgtaaacacgaaattcatttatgtttcatgacaccttatacacatagactgaaggtaattttacatattttaaataatttagtgcatgaaggccgggagcagtggcttatgcctgtaatcccagcactttgggaggctgaggtgggcagatcaccagaggtcaggagttcgagaccagcctggccaacatgctgaaaccctggctctactaaaaatacaaaaattagccgggcatggtaatgcacgcctgtaatccaagctactcgggaggatgaggcaggagagtcccttgaactcaggagacagaggttgcggtgagccaaggtcgtgccactctactgcagccttggcaacagagtaagactccgtctcaaaaaaataaaaaataaaaaataattttgtgcgtgaagcaaaattttgactgtgttttgactgccacccatcacatgtggtcaggtatggaatttttcacctccagtgtcatactggttctcagaaagttccagattttggaggatttcagattttttaaattatggatgctcaacctgtgctgataacatttgtttatgtggcaaatattaagtatctacttctaccagttgcctttactaaaacatatttcctgcactatttatgtcgatattgattatgaattgaatggatttaaaggaaaaagcagtcactaaggtctgtagtgattacatttgagtgggtccttgatggatgcagatagagtgaaaaaattctccagggtcctcatggacctatccacccttctgttttggaatgtggtgaactgttaacacagaacaggagcattggcttttaggaaagaaggcctcgtggctgggagtttgagggttttattcaccacagtctacatatgtaaattttccaaagaagaaaatagaaaattaacataggaaataacgccatagacaccatagaaatgactagagtttattgctcttgaagtttttcttttaatgtttcagaagtaaagtcaattcctttttaaaaaagatacctagagtttgcccaacatataaacaataaattataaaaatgcccaatcaattatgaatgaagtacatatttccagtattaactcagaaatcatagggattgatctcagctagaggtcacttagggagatttctttgtcttggtccccttcaaataatttgttccttttggtgtttttattcagggaaatgaattcttatctgctttaagcaatcgaagttttgaaaaataccagataaaatgcctcgctcccagctcatcttggtccactgtcttttgaagagagctcagagaaggcagggtcatctcatttggactttcaaccagacatatgacaaaggcagccttgctggtggagacaggggcatcacagtttatgcctagagtcaaacagacttcttaaaaatctgtcatttggtattatcttggcactgttgactcactctgaaaaactcagagttgaatgcagttactatttccattacaatgttgtgaagattagatcacagtaaactttctcttttcagaacaagcttcattttctcaggtcctcatatacctgaagcagaagttaggatgcagatggaacacacagatgctcatgggtccrcaatgcagccaaaattctatctctactggacataattgaaatgttaatttcttgtccctttgaaggagactgtcatgtatcaaacatagcacagaggaaattgaattctgctagttaaaattgagtcaaaaatatcacagtccccatatctctagctcaagcatttctaacattctttatgtatagcattacctttcatagctgaattgatttccttatataactaaacggcaccacgctcagtgaagctcaaaaaattgtcgttttgatttagtgacagaccagcctgaatagcacttttagaattgtaaacctcaaagaagcatgctttataaaatttgaaaacaggccacaaaggcttctttctctgtcaagtaattttacagcttcttttcctgtatgtgtgtttccaaaaggacgatattggaaaactaggcaagctgttgctgcacggccctttcagcgtctggacaattcacaaggatcgttataaaatgaaggatttgattcgatttaaacccagccagaggcaaatctacctatttgaaaggggaatagtgttctgtaagatacgaatggagcctggggaccagggattatctcctcattacagcttcaagaagrccatgaaggtaaagggagtcctattgcatctgggagtcrccctatgcagaaaagagagagatcgttttccttattttacagatgaggaagctgcagtgtagagaggtgaagttaacttgccaaataccacaccacagggctagaatccatagccgggtctgtctgactccmgggtcagagcttatgggccagggctggcataggagtgcctttgtactagagaaaaaagactatatggcagccagtctggacaaactaattagtaaaagtaccctctttcttccaggcaaagaggtaaaagagagttgaaagacttagtgatgagaacatgggctggatttcatcttagacttgcccttctcaacggtgtatctttgtgtctaagtgcaggcattgtcctgaccttggggtctaaggcacccaggcccacaccaagcattgttttctcacctgtttagaaactgtttcatagccagttagctctcaggctatgaaacacacacacccacatacaggagccacacccatatatatttatgctcttgtgattaaagctgttaatttgttcatagtagcctttgttttctttctccccttccttccttccttcctccctcccttccttccttccttccttccttccttcctttctttctttctgtctttctttcttgtctttctttctttcttttctttcgacagagttttgctcttgttgcccaggctggagtgcaatggcatgatcttggctaactgcaacctccacctcccgggttcaagcaattctgcctcagcctcccaggtagctgggattacaggcacgcaccagcatgcccagctaattttgtatttttagtagagacagggtttcaccatgttggtcaggctggtctcgaactcctgacctcaggtgatccgcccacctaggcctcccaaagtgctggaattacaggactgattacagaggcatgagccaccatacctggccttgttatttatgtttctgaatagatccttattcagttactattacgtagaaagttgtaaaatacaygttgaaggagaaatgatctcttcactgaaaggttgagggctgcagcgcctcctgcataaagatacagtagaaagttaacagtctgtgttaccttctgaaacagatgagacagaagacactgtaccagattgtgttttatgctgtcttggagtcattaagagaggaaagcaaaaacttgaaaggaagatgaaagaagagagctgtcaaggatagaaaggattagagtgattgacagggactattttaaaatcagaaaacgatggtatagaacatttctcttccctctttataatagctgatgacactttcaattcgccagcttggaagggggagccatagaaagtttgagattgccagtcgaaatggacttgagaaatacatcctgcaggtaacgctcatgccttccccatgggtctcctctactytttccttattgtgttcccatgacttgacaagtgttttctatctcattagtctaacggtcactgggagaataaaaactctgcaattaatactcatggtagtcttatagtgttttcttatgtgtgattgcaggcagcttcaaaagaaatcagagactgttggttttcagaaataagtaaattattgatggaacaacaaaataatatcaaaggtaggttacccctgctgactttygtctgtcgagttatactgatttcagctcagtgggggatgtgcaaattggggatattgtgaaagaaaatggtttgctgggaaaacaactgtggccacattttcacagtccctggaagcacctatgcttgatttccactgtggtggaggtggaggggttgtgtgattgtgtgtggttgtgttggtttgtcccttttggttgtgttccccccaccacttaattgccaaggtcacctttaatcaaaaatctgatggccacccaagaaaatgttaacagagattcaaatggccaatgctacctttcagacactgtactactttttttaaaacatcaagatataattaacatgccatcaaattcactgtctaaaatatacaattcagtgggttttagattattcacaaggctcaataaccatccccagtctaattctatttttttacttcttacttttgttttttgttttgttttgttttgagatggagtttttgctcttgtcgcccaggctggagtgcagtggcaccatctgggctcactgcaacctctgcctcccaggttcaagtgattctcctgcctcagcctcccgaatagctgggactacaggcgcgccaacacgcctggctaatttgtgtgtttgtagtagagacagggtgtcaccatgttgggcaggatggtcttgatctcctgaccttatgatctgcctgcctcggcctcccaaagtgctgggattacaggtgtgagccactgcgcccagctgttttttgttttaaagtatttaacagcctaattctaattatacttccaaaatattttcataactctcccaacaaaaaaattctgtaccaattagcaatcattctccatctctcacctttacccagcccctggcaatcactaatgtatttcctgtctctattggatgttttctctacacatcacatatatggccctttctgtctagcttctttcactttgcgtatttttttaagtttcatttatgttgtagtatctatcagtacttcatacctttttatggctgagtaacagtccattgtatggatataccatctttgtttatccattcattagttgatgaagatttgggktttttcccctttttggatactgtaagtaaagctgctgtagatatttttgtacagatttttgtatgaatctttatttccagttttctttggtgtatatatgtagaattgccagaccatatggtaacttttgttaactttctgaggaacttccaaatcatctttcaaaacagtaccaccatttcacattcacaccagcaatataatagttgggttcaattttctccatttccttactaacacttgtattgttcattataataacattattattattattattattatcattgccatcctagtgggcatgtactagtatctcattgtgattttgatttacatttccctcatggctagtgatgttgagcatcttttaacatgcatattggccattggtatatcttctttgtagaaatgtcagttaactcatttgtatgttttttaattggcttgtcattttatggttgaattgtaagagttatttatatattctggatactggacttttatcagatatattatttgcaagtattttttcccatactgtgcattgtctttttactctcttgatagtgttctttgcaaagagtttatagttttaactcttacagttaagcctttgactcattccgagttaatttttgtatatgatgtgaattaggggcccaagttcctttttttacatgtggatatccattgtcctagaaccattgattgaaaagactattctttccccrctttgaatggtcttggcatctttgttgaagataaattggctttaggtatagaattccttgttgaccctctttttctttaagcactttgaatatgtcatcccattgccttctcaactctgtgatttctgatagaaatcagctgttaatcttattgaagagtccttctatgtgcttgctgctttcaagataatttcattgtctttgttgacagtttgattatgttatctctaggtgtggatcttgatctctttgaatttatatttcttggagtttatagactttcttgaaggtatagattaatgttttcatcagatttgggaaatgttcagccattgcttctttaaatattattttagcccatttatccctctctccttctgagactgccattatgcgtcattagcgtgcttgaaggtatctcacagtctctgaggctctattcatttttccttcattcctctttctttctcttcctcagactggatagattcaattgacctatttctgagttctctaattctttcttctgcctgctcagatctgctattgagccagccactctagtgaatttctcattcaattattatacttttgaaatctagaatttctgtttcgtcctttaaaacaaatctttatattttctatttaatgaggatttgttcttgtgctttcctttagtctttatatatgatttcctttaactttttgaacatgtaaaaatagttaaagtattggtctagtaaagtcagtatcttggcttcctcaggaacagttttttcttttttctttttttttcttttttgagacagagtcttgctctgtagcccaggctggagtgcaatggcatgatctcagctcactgcaacctccgcctcctgggttcaagcaattcttctgcctcagcctcccgagtagctgggattacaggtgcacgccaccatgcctggctaaatttgtatttttcttttagtagagatggggtttcaacatgttggtcaggctggtctcaaactcctgacctctggtgatctgcctgccttggcctcccaaagtgctgggattacaggcatgagccactgcacctggcctaggaacagtttgtattgactggtttttctttttccctgggtatggactgcattttcttatttctttacatgtctcattattttctgttaaaattgcacattttaaataacataatgtagcaactctggaaattggaccttcccacctctactgtttgttggtgttgctgtttattgttgtttgttatagtgacttttctaaactaattctgtgaagtctgtatttatgtgcagccattgaagcctctgttcagttagcttagtgatctaaatactaatgacatgacagagatttctttaaacacctgaaagcagtaagtcttctagtctttgccaaggggctctgtgtgcacattagggcacaccttcacactcagcctggcacttgacagttctagcctagctttcactttctgtttgtgcagatcatcaagatcagccagaggtaagatcgtggggccttcgcagatctgtcctgaacatgttcacaggaaatgtgtgcatggtcttctagagtctcataaatattttggagcctttacaaccctctatgagcatcttattcctgagcatttcattttaaaccttctgattagcccatgtttgccccactgttagccaatacctcgagcaaccaagaagttaaacaattgcctgtaatcattttctacaaaggcctttggggaaaagacttttcacattgggcaagttctgagtcaggcctaataaagacagacttgcaggtcaggtattcctagaaacccgtggacagatcaaataatgataattctctaagaatgaggctccatagttcccccattcctgttctgcccctcccatggctgccagactgctgattttcactatcattgcaggctgttcatttctaaggctaccaccaaggaaggggaggatagaaatagggcaagttaaaaagctcattagtcatactgagacacagccattttccttgaataaatgctctccagattgctgcaagccatcatttaatttccagtgttctccgaagacaaaaaccacatgattatctcaatagatgcagtaaaggtcttcaacaaaattcaacagcccttcatgctaaaaactctcaataaactaggtattgatgggacgtatctcaaaataatgagaactatttatgacaaacccacagccaatatcatactgaatgggcaaaaactggaagtattccctttgaaacctggcagaagacagggatgccctctctcaccactcctactcaacatagtgttggaagttctggccagggcaatcaggcaggagaaagaaataaagggtattgaattaggaaaagagaaagtcaaattgtcaaattgcagatgacatgattgtatatttagaaaaccccatcgtctcagcccaaaatctccttaagctgataagcaacttcagcaaagtctcagtatacaaaatcaatgtgcaaaaattacaagcattcctatacaccaataacagacaaacagagagccaaatcatgagtgaactcccattcacaattgcttcaaagagaataaaatacctaggaatccaacttacaagggatgtgaaggacctcttcaaggagaactacaaaccactgctcaacaaaataaaagaggacacaaaccaatggaagaacattccatgctcatggataggaagaatcaatatcgtgaaaatggccatactgcccaaggtaatttatagattcaatgccatccccatcaagctaccaatgactttcttcacagaattggaaaaaaactactttaaagttcatatggaaccaaaaaagagcttgcattgtcaagataatcctaagccaaaagaacaaagctggaggcatcacgctacctgacttcaaactatactacaaggctacagtaatcaaaacagcatggtactggtaccaaaaacagagatatagaccaatggaacagaacagagccctcagaaataatatcatacatctacaaccatctgatctttgacaaacctgacaaaaacaagaaatagggaaaggattccctatttaataaatagtgctgggaaaactggctagccatatgtagaaagctgaaactggatcccttccttacaccttatacaaaaatgaattcaagatggattaaagacttaaatgttagacctaaaaccataaaaaccctagaagaaaacctaggcaataccattcaggccataggcatgggcaaggacttcatgactaaaacaccaaaagcaatggcaacaaaagccaaaattgacaagtgggatctaattaaactaaagagtttctgcgcagcaaaagaaactaccatcagagtgaacaggcaacttacagaatgggagaaaatgtttacaatctacccatctgacaaagggctaatatccagaatctacaaagaacttaaacaaatttacaagaaaaaaatcaaccccatcaaaaagtgggcaaaagatatgaacggtcacttctcaaaagaagacatttatgcagccaacagacacatgaaaaaatgctcatcatcactggccatcagagaaatgcaaatcaaaaccacaatgagataacatctcacaccagttagaaaggcaatcwttaaaaagtcaggaaacaacaggtgctggagaggatgtggagaaataggaacacttttacactgttggtgggactgtaaattagttcaaccattgtggaagacagtgtggcgattcctcaaagatctagaactacaaatatcgtttgacccagccatcccattactgggtatatacccaaaggattataaatcatgctgctataaagatacatgcacacgtatgtttattgcagcactattcacaatagcaaagacttggaaccaacccaaatgtccatcaatgatagactggattaagaaaatgtggcacatatacaccatggaatactatgcagccataaaaaacaatgagttcatgtcctttgtagggacatggtgaagctggaaaccatcattctgagcaaactatcgcaaggacagaaaaccaaacaccgtgtgttctcactcataggtgggaactgaacaatgagaacacttggtcacagggtagggaacatcacacaccagggcctgtgtgggggtgggggnnnnnnnnnnnnnnnnnnnnnnnnnnnnnnnnnnnnnnnnnnnnnnnnnnnnnnnnnnnnnnnnnnnnnnnnnnnnnnnnnnnnnnnnnnnnnnnnnnnnnnnnnnnnnnnnnnnnnnnnnnnnnnnnnnnnnnngaaaaaaaaatttcgatattctgaaaataaattttctaaccatttttggccagttttttccatgctttcacaaagaagagaatttggggacgggttttttctccaccattttcactgatgtcacacactgtactcctttcaacaattacaaatcatctttaagcaggctttatcctttcactttgtttgcagggatatttggtgggaaaatccacagcgagctttatcaattgagttctgaccttcccctcaggtaatgttactagggtgaagaaatgccagtttcatgtggaaagtctatcttccatcatttatactggcagtggtttgcattttgggtaagaaaaatcacataaaaatgaaaagataacttttttctttagagatagcaggaatgcaactggctcacactttttctaggtcttctatgatcatcagctgctcaggaacgtgcaaagctgggtgtgcatcataagataagggaaaaggtaaaccaagcagtgtaactggaaagccaccacatcagttttctgtcacaaaaaccaagcaacataagttcttgatttaaactgtaggtaactgccaggaactagtaacaatattatgtcattgattttactttgtatacagataagatgggaaaaaaactatggtttacttttgttttacaactattaatattatgttaaatatatgtcatggtaattgagtaggagtgtcctagaggcttaacacggaatgatatggcaactctagtagaaaaagtcacttgttccctgcagaaacaacattctagtcacaagcttgtttagaaatccttactcactaggtcagtgtttctcaaagggtggtttaaggaccacctgcattcaaattatttgaagggcttgctacaaatgcagatttctaggttccaccccagaactatagaatagctagggttagtcctggggacatacattttagcttattaaggtttctaggtagagaccttttactacaatttttaaaactcctttactgaggtataatgacacgataaaccacacatatttaaagtgtacaatctgataagttttgacatctgtatacatctgtaaggcatcaccacagtaaggataatgaacatgcctatcaccgccaaaggtttgttcacactgctttgcattccctttctcctgcccctccctcacccaccccaggtgaccaccartctcctttctgtcactataggttagtttgcattttctagaatttcataagagataatacactatgtacttttttttttggtctggcttctctcctctgcataattattctgagattcatctatttggattttgtaaacaatagtacatattttggttgttgctgagtagtatttcattgtttggctagaccccgttttctttatccatttacttgttaatgaacatccgatttgtttctgctttggggctattttgaataatgctgctatgaacatgcaagtacaagtctttgtgtggacatgtgttttcatttctcttgggtaaatacctaagagtgtaatggttaggccatatggtaggtgtatgtttaattttttaggaaatttctaaatastttccaaagtgattatagtatcttccattcccatagtaatgtatgagagttccacttgtgccatgtcctcaccaatacttggtattgtcagtcttttaaattttcagatttctaataggggcatagtggtatgtcattaggttttaatttgcttttccctagtaactaatggttgagcatctctttatgtgcttctttgccatctttatctcttctttggtgaagtktctgttcaaatcttttgctcattgttttcttattattgacttttgagagtttttatgtatatcctagatatatgtccttttaatgctttgtaaatattttcttctagtgtgtggcatctttttctcttaagagtgacttttgaagagcaaaagactttaattcttataatatttaattttaaaaactgtatgtatcatgttttcggtatcctgcctaagaaatcgttatctaaaagccataaagattttctccctgtgttttcttccagaagttttatagttttacatttaggtctctgatccattttgagtatttgtttgtttgtttgtttgtttctgtttttgatttgtatgtggtgtgaggtatggatcaaagttcagtcctttgcatactgatgttctagtttttccattgccagttgttaaaaacactattctttctccaattgatgatttatgtaagtgcatctatttctggatgcctgattcttttccattgatctatttgtctaccttgacatcagtccctcactatcttggttactgctgctttctaataagtcttaaaatgaggtagttagagtcctataattttgttcttcctttttaaagttgttttgattattctgtgtcctttatacttctatatatattttagaatctgcttgccaacttctcaaaaaaccttattgagattttgattaggattatgtaaaatctctagaacaatttggtgagaattgacttcttaacaatattaagcttaatctaaaatttatattttaactgactcccctgctgccttcctggccctgcaaaaaaagacaagtttgttatgaagatatgacacttattcagttgacaattcggaaagagatttctcaagccctccttaaggcctgaactgtgctttataggttgtgacaggaatgcaaaaatctagataagaagcaaaaccaggacccagcacgtggtttagataaaaagaaaacactactgaactgaaaggcccagaggtgttgtgccagccccttccttttacagatgtgcaagcagagggtcaattttacataacttatccgcagcagaactgagtctcctgagcctggtgcaccaagtaggctctgatgaaatgtctctgtgagtgatgcaaatggcaagggctttaagaatttagagagggcccacagtggatggtgagtgagcgggaaccagggccctgggctgaaccaggaacagaatgcaaactcaggctgtctggatacccttgagggtatccgggcaatgttgagaagatggtgtcccaggttccaagatcaggaatatcaggactgtcagtaccttacgcctgccgagcactttacaaagctctgacatataaacattaccacccagattcatttttacaccatcctacaacacctttcaacctttgtggattgttaagcataataaccctgtacactggccaaagaatacagtgaccttagggccatgggtgagaggaatgacactgggagccaatgagggatgtagagagagggcctctcggaggtaaccagacagaagaggacattgtatccaggtgttatggagtcagctagggcttgggcagggaagagaagagcrtcactgatgggtgagacacagcagcacaagaagccgaggagggaggcaggcactgaggtttgggacaagctcctcagctgtggcatgactgcctgtgatctaraggtgaagggagactgcggggaaagatcaggccccagccagaagagtgcaggggcaggcagcagggtgggtgggaaacaaggcaaagcctcagtcccggcagaaatcaaggccacggtcccatcctagcaactgggcaacatgtggcagtcacatcggtagtaaaaggtgggcccaggaaccttgaaaatcacagaggtgcctcgaagtgagcacattcagtgacgatctgagcctagcctgggagagtcaggtatagggtgaaaggaaaaagattgagatggcctcaaatatcgggccgaggaatttggcttttatgctgtggggaggcagtggggggcctctggaggttgagatctggtgttattctcatacctgggacaacactttagtaaagaatgtgattcttatcgctctcccagggactcatgattttttccctcatcaagtcacataatttgggctcacatggaaaaaatgagcatttgagcactgtttattccttaattcagtattaatggagctaacagtagaaacttggacagacccagaaccaatgcatgccagaaactcagcaggatggggtagagacgttggggaggatgccaggaccacgtgagcccagggactgtagcagcgttttctgaattcctgggaaaatatgatcaagacctacacacctttatatatttttatagtattctctttatgcatatatgtgtatttaaaaatcactatgtaaaatcaattcmaattagcttaaatttgagagtgctgttttttgttttttaaaattttagaccaaggaaatccacagtttgaaatgagcacgaggtgagtactgatttttttattttaaaggcatgtcaaatgctttggatgtttcatattgagtccatgtcattgcttttattgcttttcttcccccaacacttggcttattacaagggatttccaatttttaaaaaatattgkctgggcgcagtggctcacgcctgtaatctcagcactttgggaggccaaggcagatggatcgcttgagcccaggagtttgagaccagcctgggcaacatggtgaaaccctgtctctaacaaaaaaaaatacaaaaattagcctaggtggtggcgtgcttgtagtcccagctactcaggaggctgaggtgggaggatcacttgagcccaggaggtcaaagctgcagtgagcctagatcacatcactgcactctagcctctgtgacagagcgagagcctatctcaaaaataaataagtgcataaatacatgaatagatataaaaaattaaataataaatcagttcscaaccccactgctagcctaggatattaaatcagttcccaaccccactgctagctaggatatcttttctggtgcatgcttgctgtattgccagttgaggtagatctgccagttcgaaacctcccctaattgcccttgcttttggctgttttcttgagctttctattccattcctattttcacaaggctgccctgcctcctactttactgagtgggcaaacgcaccctctgatgttacctcctccrgcttcccctctggctgctgagttccacttagaactctcctgatcatcttcctttctttattcccccttgtctgggaggaagatgtgctcacacttctttcagggttaagtcctcactggtgctccttgcctcatctattactgcgacttacaatcttcgtctataattcctcttcctgtccaaagcactcagggatactcaatatatgtttgttgaaaacgcctgtctactgtgatccagttctgatacagtagtctgcttagtttttctaagctcatttagcctgatcctcatggaacccccgctagaccctaacccagaaagatgagagaagtggaaaaggtgagggctctagaaagcagctgtttctccccctcctctctgcccccacactcttacggagtactctattgcagcatttaataagctataattttatgatgtgtttacattttctccctatgagaccatgaattcctctagggcatggagtttgtcttattagttttagcttccctcaggcctcatctaccagggccaggcacttttgtaggtgctcagtaaatatttagtgaataaacaaatgaaagcactcattgaataatcagatgaggccagcaaaccactctgcaagcaaggccgggggtgatgaggtttagctcaggcatatcttattcctcttggacctccaatgcttagtaggtgtttattcactggattcgtctaacccaaaagagttactataatagttggcattttgggtcagtaaagaggaaggagggagctgtagtgagccagtgaaaacatttttgagaagacaaaggggattattcctcctcatctcttccccctttaagatttgtagccatgtaatcccagcactttgggaggccaaggcgggcggatcacaaggtcaagagatcaagaccatcctggccaacatggtgaaacctcgtctctactaaaaatacaaaaattagctgggtgtggtggcacacgcatgtagtcccagctacttgggaggctgaggcaggagaatggcgtcaacccaggtggcagagcttgcagtgagccaagattgcgccactgcactccagcctgggcaacagagcgagactctgtctcaaaaaaaaaaagaaagaaaaagaaaaaaagatttgcagccaattagatgtttgctgtgtaatccaacaagaagtgtcctttggacatttccttactgcgtatcacctactgacctgaggcaggtcttcaactacaggtgagggaggagcagcaggtcctcgagacctagaccagagatacactaggtgggccagcgttactccaactggtgggggagggatgcgtgtgtcattccttccagtgactcaatattcatgtttatttctctaaagcaaaggcagtggagcaggatccggaccatggattaaaaatatggaaagagctaccactagcaaggaagacccggcctccagcacaggagggattaaaggtagggagggtcccatgggagagtggagcacagaagcagtggggtgatgccagctgcttagatgctaaggaagacatcacctagggcccagcccttctttagttaaatgagggagaaaaaagaaagcattttaccaccatgtggtttaaaatcaatttcctgctattcatttgtgtagarctaatggggcagaattaacatgaagggcaaatgtctcacattgagaagtacaggagcacccccttatccactgtttcactttccaggttttagttactcttagtcaactgctgtccaaatatcaaatggaaaaattacagaaataaacaatcgatgagttttaaatgatatgccattctgagtagtgcgatgaaatctggcgccttccgctgtgtcttgcttggtacacgaattatccccttgtccagggtgtccctgctgtctgtgctccccaccccgccagccttagtcacttatagccatcttggtgattaaatcgactgttaggatcacagtgtttgtgttcaagtgactcttattttacttaataatggccccaaggccaagcacggtggctcacgcctataatcccagcactttgggaggccgaggtgggtggatcacctgaggtcaggagtttaagaccagcctggccaagatggtgaaaccttgtctctactaaaaatacaaaaatyagccgggcgtggtggtgtgcacctgtaattctagctactccrgagtttgaggcagagaattgcttgaacctgggaggcggaggttgcagtgagcgagatggtgccactgcactccagcctggccgacagagtgagactctgtctgaaaaaataaataaataaataaataaaatactcatgcctgtaatcccggcactttgggaggctgaggcgggaggatcacgaggtcaggagatcgagatcaccctggctaacacagtgaaaccccatctctactaaaaatacaaaaaaaaaaaaaaattagctgggcttggtggtgggcgcctgtagtcccagctactcgggaggctgaggcaggagaatggcgtcaacctgggaggcggagcttgcagtgagccgagatcacgccactgcactccagcctgggcaacagagcgagactctgtctcaaaaaaataaataaaataaataaataaataaacaaacaatggccccaaagcacagtcgtgatgctggaaattcagatatgccaaagagaagccgtcaaatgcttcctttaagtgaaaaggtgaaagttgatttaacaagaaagaaaaaaaatcacacaccgaggttgctaagatctatggtaagaaggaatcatctgtccatgacattgtgaagaaggagaaagaaatttgtactcattttgctgtcgcatctcaaactgccaaagttacggcagcagcactaagatgaaaaaggcgttaaaccggtggtggtggaaggcgaatagaaacatattcccactgatggcagtcaagtttggcactctctgcggtttcgggcatccactggggatcttggaagtagaccctgaggataaagggggactactgtacctgtcattataaawgtgtctagatccaaggaatgtacaacagccaaagtgaaccatgatgtgagctacagactttgggtgaatatgatatattcagtgtatacgttcatccattgtaacaaatgtgcctctctggtgggggatggtgatagtcagggaggccatgcatgtgtgagcacaggggatatatgggaaatctttgtaccttcctctcagtttttctgtgaacctaaaactgctctaaaaaaataaagtcagccgggtgcggtggctcacgcctgtaatcccagcactttgggaggccgaggtgggcggatcacctgaggtcaggagttgaagactagccaggccaacatgatgaaactaaaaatacaaaaaattagccgggcatggtggtacacgcctgtaatcccagctactcgggaggctgaggcaggagaattccttgaacccaggaggcagagattgtggtgagtcaagatcgcgccattgcactccagcctgggcaacaagggcgaaactccttctcaaaaaataaaataaaataaagccttctaaaaaagtttttaaaataaaccacatatacagtattacagtagagagtattgacagcctgcccagaccctctttataggctgttggccccatgtctctgctgctgtgaggttagctgacaatggctcaccgttgtgcccttcaggcagttgccctcagctgcccagggtcgtccagccaggaaatgcctgtgaggttatgtcctcccctaagggtggcttatggcccaccaatggcttactgattcagggtacagaagccagtccttctgtctcaagatggtaacctgtggtgccatccatgctccagtactgcccaggggatcaggctgatgctagacttctgctaagcccacgtctgtgcctggcttcttccctgccctagcttcggccttcactgtcttccaggtttcatctgaaagccgtttttcaataacacatttgcataatctgcttctggggaacctgactgaagaccgttagtagcaggaggggtcccagaatggatgggattctggtgttggctcactgcaggccaaatggccatgaggacctcattattggtgttaagtggcgtgytgagagtcctggtacctggcctgctgtagcagttcrattgctcagaccttcacctgtggtgacctgggatcagatacaggtggatggggacacrccagctggtgcaatgtctctagcatttgagagctttgaggaaaatattatctatcaggaaggtagagttgggaggctgttgctaagagcctcccgttgatgcactgaagggagaaagtaacagggtcrgactaattatcgatttaaaacacaggatcagaatcagggggcctccctgccaacatttagcctctcatctcctacagcagaggcagactgggctggtaaaagtggcagaatttgagagaaggaagaattctcagcctaggcgagtctgccatctggtcattttggactcctagtgccagtagatgagtcattagatcctgagagggaagataagggacccaaaaactgggaatgaggatgtctgggtaaatgcccttgacctcctgggctggcagcagtggcctacttcgccttgtactacaaagtacagccaaggaccaactgtagcagcaggcggcagccgtagatttagttaagtaggattcttgctgtgttccctagtggaagtgtctccctcaggtactgtcccttgaggagtacctccttctgatgaccaggacccatttctccttccagtatggtaactgctctctttgcctgctggtctcctggcatgaggacaaagagataggattcctcatgccagtagggctagggcctggctgggggaagggaagaaggtgagattcacttaagacggttcccagtcccctaagactatgcggaagcctcagatgaggcatacaaggcaatgtttgccctttycaagatctgtccccacctcccttcctgaaccctttcagaataataactaggatcaaatgacaacatgacctgactggagaaggggcacacaggcctgtgggggttaactcaaaatgtgagagtctttgaactgtgctttaatgccccctaaagaaggtgcatagcagaagtccagttagtgcacttcctcttaggcaccccagtgcctgcaccatgggctcggaaatggagaagccttggtagcagaattgaacccagcagtgctcggccccagcagtgagggctccatgtcttcaagactgctctagctgctaccacttttaaatgtccgacatgccagcagaggtcagtgctgagcccccagtttggtactgtcccttgagaagacaagttgattttaccagaccccttcaggttagaaagtacagtgtgtgatcaatcataagcgttgctttttttttttgcgatagagtttcacacttgtcgctcaggctggagtgcaacggcaccatcagggatcactgcaacctccacctcctgggtgcaagtgattctcctgcctcagccttctgagtagctgggattacaggctcatgccacacccagctaatttttgaatttttagtagaggagacagggtttcaccatgttgaccaggctggtcttgaactcctgacctctagtgatccatccccctctgcctcccagagtgctgggatcacaggcatgagccagcgcgccaggctgtataacactgctttgatcaggggactcagtatggcaaaagagaatcagccatagacgtgatcacaggacagagtcttaccactgcattcagaagctggtgcctgacagagtagtgggacagcctcttgagagtgaggcggggcagcagtttggacatggcactgcggggatggagtgctgtccctcaggatgcagcatacaactgaaccaatggctgtattatggtgaagtgcccccaagaggcagagtatatgaatctgggagccaagaagtcaaatgagttgtgaccttgcccatcatgactctagtgatgaacacggggacattgttttctccccatgtctccaactttaacctcagtgggtctcaacaagggagatgcttccactagggaacacagcaagaatcctacttaactcaatctgtggctgccacctgccactgcagttggtccttggctgtgctttgtcatcattccctcctactcattctagacatccctctccccatcaggcacttctactggtggcatgtatagtgggggtcctagactcttatcaggctatggttcttggacttggccatcatagttacagctgggcatgggagtattgcgagatgtcctagtggatcacctgagcatcagacatgtccctctcggcctytgttaagcagcagccctacctcctcaccacgactaggacccgtttctccttccactatggtaactgctctctttgcctgctggtctattgacatgaggagaaagggaaaggattccacgtgccagctgggatggggtctgggtaggggaagggaagaaggtaagattcagtaaggacctacacaacttccagatgggacagtcagcagacaggtgggtgtgctgtttactggcagcttacagtaaaaataaagggctgggcgcggtggctcacgcctgtaatcccagcactttgggaggccgaggcgggaggatcaggaggtcaagagattgagaccatcttggccaacatggtgaaaccccgtctctactaaaaatacaaaaattggctgggcgtggtggcgcatgcctgtcgtcccagctactcgggaggctgaggcaggagaatcacttggactcaggaagcggaggttgcagtgagccgagatgatgccactgcactccagcctggaaacagagcaagactccatccaaaaataaaaaaataataaaataataaaaaaaataaaggttataagctaagactgttttactgacttggatggtgctgaaaatttttaattctgaattcactttgcctctgatttgcaaagttctggccatgtgaaagacataaaaatgagaataactgttgtacctcagagctaacagaggaagaacctgtctgccagccttactacaggtccctcgtcgggtacctcagggtctccaagggggcctaggagctatccggtatagcacgtcatggttgtttctttgccaatttttgtggcatttccttttgggcctagataatttagttactttcattatctttttttttgtgttattcaaacttattggggcactctagtatttcaatgaagaaaataagttctagcaaacagccctctctggagagatggtgggttattttacatatctgaccaattggttttaactattttaagtttccttttctgattattaaaggagtacacatgtagaatgtcaggaatttagaaaatacaggaaagtacaaataaaaatacaaatccaacataaccagatataatcaccattaatatcttcttgcagacgttgtctatagaaatgcatgatttggtcagttgtggtggctcatgcctgtaatcccaacactttgggaagccaaagcaggaggatcacttgatatccaggagcttgagaccagcctgggcaatatcgcaagaccccatctccacaaaaacttttgagacggagtttcactcttgttgcccaggctggagtgcaatggcacgaacttggctcactgcaacctccacctcccaggttcaattgattctcctgcttcagtctcccgagtagctgggattacaggtgcccaccaccacacctcgctaatttttgtgtttttagtagagacggcagtttcaccattgtggccaggctggtctcaaactcctgacctcaggtgatccgcttgcctcggcctcccaaagtgctgagatttacaggcatgagccactgcactggacctacaaaaaatttttttwaaaaattagctgggcatggtggtgggtgtctgtaatcctagctatttggcaggccaaggtgaaaggattgcttgagctcaggaggttgaggctgccgtaagccatgattgtaccaccgcacctctcctgggcaagagtaaggccccattgcaaaacaaagatatgcatgattttttttaaatggagccatactaaaattggggtgaccttatattttaatcttattggaaattttccattaaaattctgatgaaatgggcaaggctttgactgaaccaaactagacgtattggcttgcccttccctcctgccactcatctttgggcttattccaatccagaacatttgagggcagctggtggctgagctgggaggtaaagctaggttataaagtttctttgacctacagcccctccctcccccaagcttccagcagctctgaaagtctaagacagccagctcagactgccttaggagctggcagggactttgacaacagaaatgcacgggaaaaaaaaaatgtgccctgagaatgtcaacatgtggaatctgaaagcaattaattagatgttctcaagaatgattcacttcctcttagccaaagataggcttgcaaatgaaatagacgtttcagctatagaccagcctaagatatccacgtttatactctgggccaccaagcaaaatattgtaaccgagcctagtacccctggaaacattttggaactctctcctgttgggagctctggagagctactgggatggatcagacagaatgtgacaccatgtattaaatcctagaagacagagaggggaaattggttagcagcacacacaacacaatgatgaagggctcaaactcaggtctcaaagacccagcctcaagtgcagctccatctctttggatggattctatagcctgtctgtgcttaagttctttttatcattcattttacaaaatggagataatactgtacagtcttgccatgaggattaaatgagatgaagcccttaggcttgcgcctagatctctgaaagcatggaattgttagcagttagttaccccctggttcttccaagtgaaaggaaggaaagcccagggggtttaggcattgcttttaagcagctcaccacttcccacycccaagtgaaaatgatatcctttagttcatgtgatagagatggtccttaaaaagttgtgcataattggccaagcgcggtggcttacgcctgtaatcccagcactttggaaggccaaggtgggcggatcacgtggtcaggagatcgagaccatcctggccaacatggtgaaaccctgtctctactratattacaaaaaaattagctgggcatggtggcatgcgcctgtagtccccagctactcaggaggctgaggcaggagaatcacttgaacccgggaggcggaggttgcagtgagccgagatcgtgtcactgcactccagcctggcaatagagcgagactccgtctcaaaaaaaaaaaagaaaaagaaaaaaaaagttgtgcattgagaaaaatctagtttgaaagacaataaaaatagaatttgcccatttaatatctatggattgagagctaccgctgaaccagcaggatctacaatggtctctttgtgccatccactggacagtaagggaaacaccatgattttgtcttcaaagtctataatttaccaaaaatatgtatgctggtgagaataatttcagctcattactaggttcacttgttaataaatttcattccatttgtttaagcaaaataaaaaagcttagaattctaagcactaaatgtgaacactagatttcctaaaccattcagcttatctgatatgcaccagaaagattgtcgactaagggtttcaaaagagaatactctcaccagtccttatctgcaggaattctcatcgcccacctttcccattcttgtccttctccaccaatactccttatgcttatctgatacatagactgagagtgccccagagactcagggtgtatctgctccaacacaccactagatcttggctgggacaaaagtcgttccattcattttccaagaatacaactatcacttagaattttgctataatcagctgggcatggtggctcacgcctgtaatctcacactttgggaggccaaggcaggtggatcacctgagatcaagagttcgagaccagcctgaccaatatggtgaaaccctgtctctactaaaaatacaaaaattagccaggcatagtggcatgtgcctgtagtcccagctactctggaggctgagacaggagaattgcttgaacccgggagamggaggttgctgtgagccaagatcacgccactgcactccagcctgggcgacagagcgagacccctgtctcaaaaacaaacaaaaaaacaaaacaaaacaaaacagttttgctataatcagattgaatatttgtcaagagcctgtgtgtttggcatggtttttctgaggggtgtgtgtgtgtgtgtgtttgctctgtttctttttaaagccatttattatccttataatgtttctttccctgagtgtttatgaggatgagacaatggcagacaaacctccctgaaatgtaagtaataatagcacacctggagtgcccagagctgttttgagaccctctctttagtattattgtaattgctatacacaataatcataacaggtactatttgttgaattcctatgatgtaccaggcatttttctttatcagaagatttgctaatcctcataccaagactgcaaaatcgatgttattatctccattttagagataaggaagctgatgctcaagaggttaagtgatgtatccaagatcacacagctagtgagtgacagagtgagaatcaggtctgactgccctcaggtctgactgactccagagcaccttctcctgccatggggcaatgggcctctcagttgttccctcacatgcctgtgactggccagatcctgagtctgagattttggggtcccctcagtgctgccagctccttagtgcctaagactcttagggcctcagagcccatgaccagtgaatccagcaggggattaaatatgcagatgatgtaagacagcaaaagtcagcccaggaggtgggcaygatggctcacatctgtaatcccagcactgtgggaggctgaggtgggcagatcagttgagctcaggagttcaagaccagcctggccaacatggtaaaaccccatctctaccaaaaaatacaaaaattagctgggtgtggtggcatgtgcctgtggtcccagctactcaggaggctgatgtgggaggatcagttcaacccaggaagtcaaggctgcagtgagccgtgatcacacaactgcactccaacctgggtgacaagccagactctgtctccaaaataaataaataaaagcccagggctgggactggaaggcctgggtgaggaagggaacatgatctctaggagtcaggacaccccggtcctggccctgactcagctcccacagggccttaagccagtccccacaaggcacacagcctggtrgtcaattaccatccctggcggggcaccctgtgagccgcactttcctccgcagagaaccaggggctttgcctgcaggatgctctctaaggttttctggttctgagaattctgagtttcttccaggagccctgggggatacctggtgaataggttactgtctctgctggcaggaacccggggcctggagggagacaggcgagggcacacccagagcagctgcagtttgtctcaggagagacgtgtcacccaagggcttggatgagactcccccacctccgcagccccccctcctgctttgyctcctaggatagaacaaagcatgataggatgaggtgggacagatgaggacttcacacactctaagggtaaatattgttccgtccgcttgtgtttgaattgtataaatgtgtttctgcgtgtatgctgtgttagggggtaaaatttgcatctccctgaggttgcactctaaggtgtatggaaaacctggctctagactaaaccaggccccccgtggtgctccaggcatccccaccctcacctgtggcacccggagctcctgctgtcactggcccaggtgggtcctgtgtctttctctgcgttgtcagggcctgcgctgacagtcccccacagggaggtggaatctggggttgacagcactgggaggatccttcctctttccacgttcaggcaaatcctcgcctggaggcagggaatgggctagaggaaacagttgactgtttcagatgaccctgaaacagttgagtccagggtctgagagcccctctgtgcccagcgctgtgcccccttcccttccccgcttccctgcagggcccgcgagagcagggaaagcagctgccagctccaggcagtcattttaccccaggtgccacttaccctgcagaggggctggaacmaactaatcattttacctggaggtaccacttaccctgcggaggggctagagcttgtcaggtttttcagttcctgtgtcgcctcccagccctgcccaccccaggctgtggctgcctatggctgacgaaggctcctgagccaggcccaaccgccagcctcccagtgggtggctctatggtccctagcagccctggcatcatccggggcacagaggccatggaccctggagacacagcccttcctattcatgcaggggatggtcaagggcatggctccctctgtccctctatccctccatcacagaactttcagcaagacaatcattcttccattctcactgcttgctcctggcataaggggaccccagggctggatgacttctctaaagaggagtcttgggtttccttagatgctcccaagtcctgtctggaggatgaaggcagggggcacatccctgaggcagtttctcctctgccctccaccccttgcccctcccacctcctgggactaggaactcaaccaggacttgcttcaacctgagaggagggtgtccagccccctcggagcctgccagagtcaggcaggatttcagaggggcctccagggaggtgctgcccagctgcccccccgcccccatgttactcacacagcccccactgatctgctctggggagggcctggggcccagaacgtggcttgttgggggcttggggcagcagcccaggagacgcyacttgtgctgcctgctcacccagataactgcagctccctccactgccgcctaccgccctctggccatgcctctgcccagaatgccctccctctccagtcctgtctgcccctcaagtcctgcccaaacctccctgaattctcgcctgagcagacactttcctagcacggctcccgccgcgtagactactcagctgaccctcggtctggggctgtcctgtgttgggacctttctgcagatgctctgctccctaccctggcttgtgagccatgtggggcagagactccatctcactcagagcgagggtaaagagcaggagtgctggagaagacagctgccctgccacaggccaagaggacttggccaagtgaccattgctgtctgtttccccaactgtaaagggggctgagacccttacagggttgtgaggcttaaactttgacaaatgcctaacataccaccaggcacagggcagttgttcagtatttggcagtggctgctgttccccacagtgtccaacaccgccccagggatgtaacatgtgcgccatagacaagactgatggattaattaatcagttcactgcagagagaggcaggatggatgcacttgcttgttcctctgattttcccttatggggagcagtgacacttggcagaggctgccagggagatgggaaatggacattaattaggggagagaaaaggaggcaaggaggggagggtgagaaagagacaggggaggaggaagggaaggaggcgtggttagaagactggcaaacacaaaaaacaatgactgttttcttggaggaacggggaggtagggccatgaacagcatgtggacgcgccttctcggtgaattacggcatctcggcgctggaaaagcagcctggagatcacagaccccctcacagcccagcgcagtgcaggcccttggagagcaggagttagagatggggaggaccgtgcctgcaacaggcactgcctgctacaccctgccatgggcagaggggatgtcctcccaccccacagaggccccatccttccctttctctccctaaggctgctccagcagggagtttagctccayggacacctttgaagactgtgaaggcgcagaagacatggaaaaggagagcagtgctctgagtgtaattacttcccttttgtttctttcatcttcttccctccttcctattcatcagctcctcctgcctcctgtccctagcctccatccctctccccctcctcaggattctcacccataaggacctggttaagccagggagccgaggtcaccagaccctcaaactggctctgaccctcctagtccagcatgtccccacgtggctgtctccttggcggtgcgctggtgtccggtcataactggggctcccgctgagagccccgtggcccaggtgggagggctggggtgggcctcagcctgccagcgggagtcaccaccttgcccggtctggccacagcctccagcaataactctgagggtgcacccgtcccctcccttccagctcgcgggccttttccagtcggacgacagtcacgaaacctgttcctccaaatctgctttcctggagaggggagaaagcagccagggagaaaaagaagaacgcgatgaggaggaaacgtgagtgtgagcgaggaaagactaagcgcctctttgggccacggcgtctctgactttcttctcggaattgcagggcgacccgcagcaccgaggaggagcgcgctggggcgtccacgggccggctggctcctgcgggggcgacggctggtttccaggcgagggcgctgcgcccgaggacctccgcccaggagagctgacctccctgcggacgcccccgctcctcggctccagagcgcccgcattcccgggagaggcggtgtgggggcccgggccctgcccagctacgcagaaagcagccggagcctcggcggcggcagaaaggggacaaccagggcctcctccgaggagcccgaggggtgtcctgggtgcgcgcctagctccgcacgggggacctcggagctgctctaaggcgcctgcagaggcgagcagagcccgcagcccacgccttctcgaccgcgcacttcgayattcggagccgggcaattctttgctgcgtgggcttctctgtgctcccacggtaggatgtttagtagcacccctggcctctacccactaggtgccaggaatgcgccaccccatcctccaccccgcccccaaatcgtgacaatcaaaaatgcctgcagacacgcccgcatttctccagggcggggtgggaatcggttgagagccgcttagcccgagccttggaggagccggagccgctcmaacccggcgggggccgcagactgggagctcccggtccgcctcccagcatccctgcgagcgttcatggggtgttcgtgttagtgccaagattgcttcgttgtagagagagttcgttccaagttactttctgaggtattttatgtatcgatttattagtttttaaatgagttttgttagtttcagttgtattttatttttagttttattagttgattttcatttctttgtagctttctggttatttaatyttatagtttcagttactggtttatagttactttattttcaaarttatttagttgttcattttcagttatttatatgtagttgttttgttttaggagttacagatgttcaaattaatttgcttggaatttatttatttatttatttwtttttcgagacggagtctcgctctgtcgcccaggctggagtgcagtggtgtgatctcggctcactgcaaaccgcctcccgggttcacgccattctcctgcctcagcctcctgagtagctgggactacaggcgcccgccaccacgcccggctaattttttatttggatttttagtagagacggggtttccccgtgttagccaggatggtctcgatctcctgacctcgtgatccccctgcctcggcctcccaaagtgctgggattacaggcgtgagccaccgcgcccagccggaatttatttttaattatctttacaattattatctgagttatttaccttcatagttatttcactttatcttattggagtttttgagttatttatttttacagtaacttatttgactattaaacactcactggaagttcatgaactactgtcaagttatttattttcagagtgaaatgttttaatgaagggtttcccctagttatctggttttcgagttgcttatgttcacaggtatttattttcagttattttatatttgagttgtttatttttatgttctttttttcaagttacttggtttttagttatttcattttcagcattacttcatatttgaacattatattttctgaatttttaaagagtttttgaggtatttagtttttgagctattttcagagttatttattctgttatttcttttcagctttgtatttgccattcaaattttttttctgttctttatttaattgtcagatttttttttctttttttttttttttgagatggagttttgctcttgtcacccaggctggagtgaagtgccgcaatcttggctcactgcaacctccgcctcccgggttcaagcaattctcctacctcagcctcccaagtagttgagattacaggcacctgccaccatgcccggctaatttgttgttgttgttgttgagacggagtctctctctgtcacccaggctggagtgcagtggtgcaatctcggctcactgcaagctccacctcccgggttcacgctattctcctgtctcagcctcctgaatagctgggactacaggcatctgccaccacgcctggctaattttgttttgtattttttttttttttttaagtaaagatgaggtttcaccatgttagccgggatggtctggatctcctgaccgggtttcgccatgtttgccaggttggtctccaactcctgacctcaggtgatccattcgcgttggcctcccaaagtgctgggattacaggtgtgagccaccacacccggccctcagaattatttagagttagaattcttagtctactagtcaagtttcaatcaagagacactgtatcagttatttcaagagagaatttaatataaataattgttatccagctagtagagatttaaaaaaaagtagtgataatgagatatcatgaagattttgactgcaagctcccagcccaaggactcatacaacaaagaaaagaggttgaaaatatcaaaactcggaaatatgaaggtggccctagggctgggggttagtcctctgaggaggaggcactattaatggtacacgtggcccaagggctcagagctcaaggtccaggagctggacgcagaattctggagaggggacatggccagcccgtgctgctgtctctgaatgggcatcagcaggctggttataggagtgctaggaaaatggcaagctggaaccaactcccgctactggaaccagctgtcactctcagggtggagacaggatgctgacagtgggggtggggtggggtgcacacaggaaggagcccatggtgaccctgcaccccagagctgggaagggtgggctggaagcttaattaccagcacactcagctttagagttacatagagttatgttaggattccgttagttttggaattgtcaggggtgatttgatttcacattttcatgggatatgggattgggatgagtcttcagtctcctggtttgtttctggaatagagtgggccacacctcccaggagtctcccccagggaactcaagacaatcactttagaattcaagaaaacaaaaataatgtgtctcacttcgttcataaagaaggcctttgacaacgtggccaaaaaggggcagagcctaagggacagactcttagaaagatgcccttggaacagggtcccgcagagtgttcctctcaaattctttagaactttacactgttttgtggggccaccctctcccacgccctttcctaacaacagtgtctttcttgatagagtatgtttcaaatttgtagactgtttgcacaataaaataaagttcctcccaaatcaagaatctgtaatcttaggttcttctacctgcattattcttcagcccacattgttccatttgaccatcagaatgtttacatatgtatatatgtctggatggatggaaggatggatggatggatggatggatggatggatggatggatggatggatacacttattttattcaatatctatttcctgagcattcccctgccctgaggatggttctggcaccaggtagagaccagggaggtatgaagatgagtgaggctctcattccagtgggggagacagatgtggaaaaataatcacaacacaatgtggcaaattctctgggagcataaaacaccatcagtgactcttcctgataccgtcaggaaggggtgacattagaactgggtcttactggcaagtgttcttctcctggtggagaaggagaagggcatcctggcagagggaatagcatgagctcaggtacaggggcacagaggagctgtgcatggcaggtaggacgagttgatggaggctgctgggtcacagggttcagaaaggcactaagcttaagagctggccctggtgcttgacagatcctgcttcatttggtcctgcagcaagtctgcaagatagtagggagcaacctcaggagtcccatgcttctcctgaccttacttttccaaacacagtttacatttctggatatcttaagctccttcttgattttatccatctcccacttttcacgtgtccatcggaggtgagttgccccctctccttcaccttttgattcctgctgcttacacatctgtagggatggaggagggttgagaccagaaagctgtgaagtgcagacttcctctgacaagggaggtggaggagagcagggcagagacctgcttgtgggaatggcatgcagaagttctgcagaccagcacagtggggaatgggctccggacatcaccagctgtgactgcctccagctgcattcagcaaccatggaaaggtcgtggggatgcctttccaaaagtgggaggctgctttagatccaacccaggcttatgaatgcaacagattgggattttttaaagcacgtagagccctttgcagcattaacagcaataaacatgcctcccaagtcaaaagaaaatatagtcctaagactatactttcagggatcatttctatagttcgtcactagagaagtttctctgaacgtgtagagcactgatgcagccaaaaaacacatgaaaaaatgctcatcatcactggccatcagagaaatgcaaatcaaaaccacagtgagataccatctcacaccagttagaatggcaatcattaaaaagtcaggaaacaacaggtgctggagaggatgtggagaaataggaacacttttacactgttggtgggactgtaaactagttcaaccattgtggaagtcagtgtggcgattcctcagggatctagaactagaaataccatttgacccagccatcccattactgggtatatacccaaaggactataaatcatgctgctataaagacacatgcacacatatgtttattgtggcactattcacaatagcaaagacttggaaccaacccaaatgtccaacaatgatagactggattaagaaaatgtggcacatatacaccatggaatactatgcagccataaaaaatggtgagttcatgtcctttgtagggacatggatgaaattggaaatcatcattctcagtaaactattgcaaggacaaaaaaccaaacaccgcatattctcactcatagatgggaattgaacaatgagaacacatggacacaggaaggggaacatcccattctggggactgttgtggggtgagggaaggggggagggatagaattaggagatatacctaatgctaaatgacgagttaatgggtgcagcacaccagcatggcacatgtatacatatgtaactaacctgcacattgtgcacatgtaccctaaaacttaaagtataataataataaaattaaatttaaaaaaagaaaatatagtcctacacaatctgttagaatggtggtgtatttttacgctttttataatacacatctatgcattcagtcttgacgtgtgtgtgtgtgtgtgtgtgtgtgtgtgtgtttctcagtcaacttctctgcttacagtgtctatcacaatatatccatttccctatgagaatccatttctctgtgagaacatgtaagaacttcacatggtctcacatcttagctgaacagaagagtctgttgggttctgaccacttgcctcaggaaacacatcacttgtatcctctcaaacatttgactgttgaatagccagccactcactatggaaacaccccccaaagcattctcaatcctttggatctcggcccttttctggatctatgaggatgtccatacttaataattctagcagaatgcaaattggccaaacctcacaagcctcataggaagaccctgtttgcaaatgtcttgccacaggtgggtgaccaggggagtcattccaataccagtcattgctggaggttcctggggtattgtcctccagtgacccaggatggtccaatatgacctttcactccagcctccttgtcaaagccccaagctgctgctctgcttgctggtgtcgtctgggaaaaagctaccctttggggctcagagactcagactccccactgagcccatggtgggctgcagggtgggacaggaatcatgggataattctcataaaattgtgccaggtacaccgtctgttcccagcagacacgacattccctattctacacctggacacactgctcattcaggaaatagttgtgcatttttagacttcttaaaaacaggggaaaaaagagtggcttttctgtgagtgacatttgtgtcaccttgtttaagtataaatggaaaagaatccaaaaccaccagataaaatcgctcagacttagaagttgttcagatcctccatggctatatgatgttgcctgttgtccaccagaggaacttagatttcaaaatactgctgacaattgggaatgctgtgacctcagattaaagtgccctggctgaagcattagaactaaaagcagacccagatctgtaaaatctgatgggagtctgagttcatgttaaacatcagccatgcattatgaaatattagaaaagttagagatcctctaaaccagccttcccagagtatactttgcagaatatgcagaagagtgtaagagcttttttttttttttttgaatgaagtctcgctctgttgccaggctggagtgcagtggcatgatcttggctcactgcaacctctgcctcctgggttcaagtgattcttctgcttcagcctccccggtagctgggattacaggcatgtaaggaagcatccttcctggcatagacctgggggtgaggaatatcagttgctacaagaaagacacaaaaccatgctcagatgctattggcccatctctcctacaaaggccttaaaagcctggaggaagggtaacaaatactgacgctcctagggggctggtaaatccaacacagatggagaaaaaggaacaaaaacttgaaaaacaaaacaacaacaacaaaaaaccctctgattctggggaaggggcaggaatatgtgctgagcccaaaactactgctgcggggagggacagagacgcttggtcatacccttcaagacccagggacacagtacctgcaggaatcagaactgagaatcacaaccaagcacctcacctctcagatcccaccaccccgctaataagcactgactaacaagtaacgatggaatactcctgggagagctacaagtgtatggagagagaaactgacagcagagaagacctaaagttgaaggtggagcagacattagggaagacctttgggcaaacaagcccatatcctaaacacaaggtaagatttgaagtgcctggtataactaaggtcaccatagcaacaaaaatcccaaggatctaaacaaaggaataaagactgcaagaaacggtaatcacatgagtaagtataaaagcttttttccccatatatatttatatatatta

SEQ ID NO: 97222 - DNA, 14224 bp, Homo sapiens
ctgctcctgccgtagccatgttcttcccaaccagtttttcccatatgatagattttgtttagaaccacattcactgtttacataattccgactttttaaaaagtcatttgctgctgagccatgagatgtgttatgacttcttttgccatgcagcttttttgtattttctagagttaattttttggtttatattcttagtttctatgtgcttctcactaatgaatcttcacactttatgccagttttgatgtgtctcggagcggatccattttcgttcattgtgctgggtatttagtgagcctttttgatccggaaactcattaccctatagaacagggacatttgggggtgggggcttgttgaattttatttcttctctattatcatcattccctttttctagatctcccattatgttgaaaatgggcttcctggactgatccttttgactttttttgttttttaagaatttttattttacttcactttattttattttattttattttatttttttgagacggagtcttgctctgttgcccaggctggagtgcagtggcatgatcttggctcactgcagcctctgcctcccaggttccagcgattctcctgcctcagcctcccgagtagactagctgggattacaagtgcacaccaccacgcccagctaatttttgtattttcagtagaggtggagtttcaccatgttggtcaggctggtctcgaactcctgacctcaggtgatctgcccacctcagcctcccaaagtgctgggattacaggcgtgagccactgcgcccggcctgactttttaattatattttttattttccatcttttttgctttatcttctgggaggaaacctcacctcaggtttccacccttctgttaagttttggttttcattttcgctaccatctttttaacttaagagctattattagtgaaagaattttttttttaagtttcttcttcaagcatcatcttttgtgtttccaagttttttttttcttcatttttggggtttcctgtctttatttttagaatatttccttaaaagtgttaattcttattcatacttaagagcgaggcactaaaaccatttgaagctctgggcacgtggctggtgtgctgactcggcctccatttactctaggctggccgttcactgaggaagctttgctgtgtctgcctttctgcctttcttcctttttccatcttccactttcctccatgaagtgtataaactggctgccagtttgagggctgatttcaagagaaaacctgagggaccacaacatttagctagtaaactttattccccatttcagcacagttttatcaatcgcatctgtgcctgttttcttccagtcaggagaccctgttttaccctttcctctgagtgagtctctggccttacgccacagcgcaggatgatctgtcacctgactgcagagtggaggaaggggacacctgggggctcttactgattgatgaacactttccagcacaatcttattttactctgcctttgcccctacctgttccagagatacctggttctacctagtagggacacttttggagaatctgcagtgtaattttgttacttggcttactattcattttgaactcagtattttggggttcattaacacagttgccaccatccagcttacgaaagttcgttgccattgcctgctctcatctcactgtccttgtggatttatgtccttacccttttaacccccgctatgcagttgttggggttcctgagggagcagaggcagtgtaagttttttccaggaataattttctacaacctctttcaagagactgcatggtttgcagttttacactttgcaagtagattcctggaagtattccgttgcttaaggccaattaccttttaaagatatttggtgttttgcctggattgaaacaattagtatccataacaaaataaaaatgtgcttgttgtccacacttatatgcttgaggtttagttttgctttgcctacaagctggtttcaggttggctcaactggaactttgaacttaaaattggatcctgacttgtgaattgctaattcatttccctctccagtgtgacttaaagtatttagccacaatgttcattttttttgttatttcaactcataatggtaaattttcccattgccaaacatggccatactggagatactatagagaatattaagagttacaagatgaacttctgttcctgattgatcgaaaatgatatgcttaagaatagagagagagaatgcaaattcaaacactgtatttaaaaattttgagcatttgatgtattctaatttttcttattaatcttactgtatttcttgttttcttccaaaatactggaaatacatcaaatgagtttaatgtgtgaaagaaatgaaaactagatgagtttcatggtttcagaaagttataaccaataacattccagagtttggtgattagcataagaaagtaaatgaattatgttggtattcttggaagcagtgatgtgaggcagctttgttcttacgtttttgtcgttcctgtggtgaagggctccttcagtgaacttcattgaaaatcttgtttttgttgagaatagcatacatagctcagtagcaaaatttggaatatcgagaacttattagagatgtggaataattgtctgcatatgttttcctagatataagttgaattataagatgatttttcaaaaattaaaaccacaaattgatgcatgtcaaaattcaaataatccaaatttataaatacatccagcttactcctaacttgtcttcttactcagagaaatttgttgttttcttttaaattattattattttttaactgatgaactttcaagaaaactggactgatagtttataagcacccttttaaatctctgcatatacttgtttaattctaaaaccctacaattgccaattttttactgaatttttttttcaggtgtccttgctggtcatgacaaccgtgtgagctgcttaggtgtaactgatgatggcatggctgtggcaacaggctcttgggacagttttcttagaatctggaattaacagtgtcatacatatttgttctccattgatatatctggagaaatcaatgctacagcctatagctgtgaaaaaattctaccttatatttgcaggtgaagatttttctattagattatctacaaaaacaagctttcagtaaactaccaaaaaaaaagtgggggtggaggaaaaaaggcaaaggcgccttctgagatcaaaaggaccagtgtattaatttgaggggttgggttattttaaccttggtgaattgttgtgtgtactcagagtgtattttctttgtgtagaacagaatgtacacattatagcagctcgccattgtgtttgcattttttaagaagtacatttttaactttgtatacacaagaaatgtcatatttttgagttttgtaatggaagaaccaggcacagaaacagacagaaatgatactgtatgtgtgtgtatttatgtctgaagaaagtccccttgaattctgatatctctttgaatctaagagatcctgatagcttcatgtttaagagcattgacaggtggggcacctctgaggggagttcattgtttctcatgcatcatttgccatatactattaatcaaagtgcttgctttcagtcctttgaggggacagataatctgaaggccagagattagagatttcactgatattttggacatacataagaaacatcattataattaataaaaagtaggtaatagcatataaatggttcttgacattttaaaagcctggttatgatcagttgacactttgagtacccccctaaatagctggactttccttttcatttcatatttggaactaagtttgtagcgtatactcatctttcagaagtttggtaaacattgggattgtccctgcatctgaacatctttcccagtgctatcagtatacatctagagaggaaatgcaatgtgacagtgttacatttggagagaagtgtgaaatctaaccaatcgctagcacatatttgttgtaatacggtggtttatttcatgtttgcatactataaaatctgaattgatgtgaaatatctgtgcctttaaatttcttaaacctttaagctttttgttctgttttgcaacattttgtagtatttcttcccttccttagcacaaaatactggtttctaagtggttttgcttcaaaggatgtctagatgtaagtgattccacttaaagccaaaataaaaattcctaaagcagttcttaaaggagttagagagctatattaaacagtttttctgtggtataataatgtgtctcttactagaagtcccccacgaccaagttaaagatacttttcctgttggattctcttttacaaataagtctaaatgactgataatagaagattgttagtcttgcttgatggtaaagtcttggattattctgatatatagacgtgcattgttttgtaacttagttacttttcagataggtctgtgttaacttttgaacatgtgtaacttaacctaaatactcccaaactttacctctaaatttttgtttttatgttgtgaatgtgctaatatgtgcatcaactgtaaagatgtatcagttttattaaaatcagttgacaattagaataataaagtggataaaggcaaattaagatataggaccaaaacagaatattgtagatggcagttatgaatgtatatttatattttgattaagatttctattaactttttggctgggcagagtggcttacacctataatcccagcaatttgggaggccaaggtgggcagatcacttgaggtcaggagttcgcgaccagcctacccaacatggtgaaaccccatctcttctaaaaatacaaacattagccgggcgtggtggcacattcctgtaatcccagctactcgggaggctgaggcaggagattcgcctgaacccgggaggcagaggttgcagtgagccgagattgtgccactgcactccagcctaggcgacagagtgagactccatctcaaattggaaaaaaaaaaaattatatgaacttttgctattaatgtttatttgtaggctatttatatcacttcataaagaacagttctttgagaaaagaataaaggaatgtattcatttccagaaaaagagggttggggaaagtttgccatgtaggttagtcagaagaaagcaattctattatgcataaaaataaccttaaatatgtaagagagtatctcctctacttaaaagttattatagtagtcacaggcatacagaccacaggaattctatggtcttaacatattttaaaattacatttattttaatgttcttaaagtttatgaagaggagtttaaagcaattcccataattaaatatttactcggcaactaaaaactatttaacacttgtggttaattatacacataaacaaatggcgacagagtagcctcactaccacaattacttcatggttacacctttgctttctaataataggggctccagttgctaaatatatttgtttacttacagtttaagttgagctgattgttgaattctgttattgttcctgaattcaatgagtatataatttgtagagatgttgaatagtttggatcttagtttttaaggctgaaaaatctggctggatttagtttttaaaaatttgcatcatcaagaatattgcagttaatgttcctttttttttttttttaaagacagagtctcactctgtcacccaggctggagtgtacagtggtgtgattttggctcattgcaacctcaacctctgcctcctgggttcaagcaattcttgtgcctcagcctcccaagtagctgggactataggcatgtgccaccatgcccggctaatttttgtatttttagtagagatggggtttcaccatcttggccagtctgatctcgtactcctggcctcaagtgatccaccagcctcagcctcccaragtgctgggattacagacgtgagccaccgtgcccagccaggtttccttctttaccttctaagaaacatttaaacataatgtgcctgagaaggttaatttgttgactctgtagcatgtcaagaagagtagttttttgagatctggcaagaatattttagagatacatattcttttctaagtatgttatcaccctgtggtgttgagcatatcgtcccaaaaacctgcttcagcaagcagttcttggccaggcatggtggctcacacctgtaatcccagcactttgggaggccgaggcaggtggatcacgaggtcaggagttcaagaccagcctggccaasatggtgaaaccccatctctactaaaaatacaaaaattagccgggcgtggaggtgggcgcctgtcagctactygtgaggctgaggcrgagarttacttgaactcaggaggtggaggttttggtgagctgagatggcgccactgcactccaacccgagcgacagagcaagattccgtcccaaaaagaaaaagcagtttttgccatcagcaaggatatctccwccactttaatggacaggcctcatttttggcagctatgctgtttgagatgtagactgaatatccaaggttcctccctagctcaagtttttacttgtgattacacacaccacattgaattccrtcttcagaggcaaagatttgggcttcatatctcaacagcaaaagggcctgttcagcaattcccttcattttagactcatatgacctcagcgattgcatgatagtagtaaactagtctcctggaaataatggatgtaggtgcttctagaatatgttacagaatttcagacttaacctattaatagataaatggatcttgacttaaggtgacaaaatgaaacttttattattgcttaaaaatgctgtgccaatattgtataactagctcctctaatacttttggtattttggatttaataataagaccttaagcattttaaatgtgaacatgttcagggaagtatgctttgatgtaaatgtctcagatctaagttgtaacacaattgaatacttgtggcttattcttggtttaacttaggaaaactggttaaacaatcccccatttgggcctgtcatcattttaatagtgacgatgttctttctgaaatcttcagggtcggagtcaggctgaatttttttaaaaattaaatattatgttcaaattctttcctttttgccattgtgaaaaagcaaaattttaaatgatttctcctgttagaatttttaaaaatacccacaggttggaccatctttcttatgggttgcacaatgaatttatattttaaattagattaagtagaatgtgaagtacatttcagatttactagttttctttccattgttcattttgggttgcctcagattcagtgtatattttaaaatattggttacataataggtactcaatgaaatggtttatagtagaatatctaagctagcactttattttaaaaagtaacttattaatcacacattgatggtacaccttgtatttagcaaatgtttgcatgttgataaaatctcctrtgtcttctttcttaaatccagttgctgattttgtaaaatacagttgtgataaagcagcattacgggggggaaaaagctatattccaactggtgttaaatgtattcaacaaaatcttacatcatacagtatttatttcttaattaatagaacttcagtgatatacttggtagatatctcaagccttttgtcttttacacaatggtgctctatcctattgttttcttttcaaagaagcatctgaacacttgcatttctattttcctatccaaaggcatccacatctaagtgtgtttttaaagttgattaaaattatttttctgttaaagcattctgaaagtgtttgtctttacctagaatgatttgtacacactcgtggtcaactgaacatgaatgtcagtagtagtctaattatgggaagggtaaacrtgttagattaaggctcttaaagctctaaaccatataaactatggacttgtatcatgatttaactgttcttagatctttcttacacagtgattcattcctctatttgtacagtggctttatgaaatgttgtgaattgatactgtaatcaataaagtgcttttaaccagatttcattgtatttttttatgccacaattttttttttttttgagagtgttactctcttgcccaggctggagtacagtggtgtcgtcatggtttactgcaacctcagcctcccgtgctcaagtgatcatcccacttcagcctctggagtagatgggactatgggtacgtgcatgccactatgcccagttaatttttatattttttgtagagacagggtctatgttgcccaggctggtcttgaactcctgggctcaagagatctgcctgccccagcctcctaaagtgctgggattataggcgtgaactaccatgcccagccaattttttataaaaagtttttattgagacaggggtcttgctttgttgcccaggcatgtctcgaactcctggctttaagggaccatcccaccctgatctcccaaactgctgggattgcaggcttgagccaacaagcctggcctctgtaatttttaaataagcgatgctgcctatggtgttgattaattaattatcttatctttactactttctttcaccaccacacccttgggggaggatgagggtggaaattaagataaaaagatgttatataatattaattatttacagattatcatcttaaatttacttcaaaatgtgggagatgataaaacacctttagccatgagttggtaattcttgaagctgggcaatggagtaatgaaggtttattatgctttcctggttatctctgtccttgtttaatattattctataataaaatgtttctttcccttaaacttatgagtccgtggaggggcacatagcactacaggttgaagcagagggcaagaataaactcccctttgacactaaattagttctattgtccagtgaagagtactaagtacctgtaaattgttatgtttaaggtagaaaacttcttgaaatgtgctcctctgacggtattgtatgacatcttatactaatgactggtgtatgtaactctgacttacttacttacccttttaatgcttgcccagaagaactaaacaaacagtaatgcagtcaaaagaggtctacttaagataacttacatatctaccataaaagtaattaagaatgaaagataaaaactcactaaatactagtataaatgctacatttgtcaactatcaggcaaacaggttttattttcatcttgcaagcttgcatactgaaaaaaaatttttgtaaaaagattatacaaagtttaatcctgcaaacatacaaagtaaacaagtgtatgtgcaataactttgaagtacatcactcataattacataattcctgtataattcatgggcttggtcataggtgcacatatttctaggcataagagttggctttcggccgggcgcggtggctcacgcctgtaatcccagcactttgggaggccgaggcgggtggatcacgaggtcaggagatcgagaccatcctggctaacacggtgaaaccccgtctctactaaaaatacaaaaaattagccgggcgtggtggtgggcgcctgtagtcccagctactcgggaggctgaggcaggagaatggcgtgaacccgggaggcggagcttgcagtgagccgagatcgcgccactgcactccagcctgggcgacagagcgagactccgtctcaaaaaaaaaaaaaaaaaaaaaaaaagttggctttcgttattttactgttccatttccaacattcattatgttttcacaattgatcagacaactacataaaacaagtgatgaaaaagttgccataccaaacctaataccagtggtaccccaatttcactgtgcatcagaaacacctggatggcttgttaaaccatagattgctgggcctcaaacctactgtctgactccataggtctgggttcagacccaaggatccacactttttataagtttgaaggttgattatagctgtgtgtggtggcttacacctgttatcccaacagtttgggaggctgaggtaaaaggatcacttgagtctgtgagttcaagaccagcctgcacaacatggggaaacctcgtctttacaaaaactagccaggcatggtggcgtgtgcctgtagtcccagccacccaggaggctgatgtgggaggatcacctgaacccgagaggttgaggctgcagtgagccatgatcacgccactgcactccatcctgggtgacagactgagaccctgtctcagaaagaaaaagaagtaatgtcgatgacccaggaccaaactttgagaaccactgtactatactaatgaggtgataccaaactattatgaactttcaagcttaagtactttcatataaaggttacagccttgagttttgtaacctaaattagcagtacgtgatcttagacactgtttttccatgttgtagttgttacctaatcccacttactgtggtctgtaccatttcttgggttataaatgagcaataaaagctaaacaccaaaattaatttgcattagtatactgcactcgtgtcaatttgcataaaaatatatttttgaaaggcttcaatggcctagtgttatcttctaagataccttgaaaaatagagttgcacctgctgtaaaaaggctgaatagcatctagaagccttaaaaggcatagaaaaggaaggactgtattcaaagaaaaaaaaagctttaaattttatccctcccatgaaaaggaaacataaactacatgtggccaaatgtactgcgttccccgggattgtgcatttctaacaagtgtctaggagatactgatctggtagtcctacattttgtctagcaaattcctagaatggtgtcatttttgtacatttccattccatctgagtttcaatcaattttttttaacatcagttaaagattttatttgattcattaaagaggaaactggtgaggcatttccaccagctcaaggaagaattttgtaaatgttatatttatggatcagaaataactgaaatgaatgtgcaaatggaggcaaaactggcctcttccacagtggggaagaaagtcaacagaacctccactaggcataatttacatatgtacagactcaatcagcttttaatatagaaagatatttgaacccaaaatctttcattaaggtaaaaaatacaataataatttttaatgaaatcctggaaaattcatacaaataaaattaaaagcctccaatggggtataatccagcaatatcctaggcaaatgcctcctgaagaacaacagcttttttaaaacatcactgtttatcattcaaaattcagacgtctcctatctttggctatttttatctcttcaaactttactcctaaaattgcactaggaaagcgttccttattggaatcataatgggagcaaagctgaaaatgtttctttagaaacatctaaggaaattacttagacccagatacttataagtgactataacaagcctttatcctgttttacatcagttttaacgggaataaaaagtaaaaacacatttattagtgtttcacatagctgccatgatggcaacgtgactgtgacttgcataaataatacactcaaggacattccacactccttggtggttccagcaatgcgatttactaaataaaaaagtgactattcccatgaaagaaagcatcaaaaactagttttgagaaagaagatgaaaggctcaatctctaactcctggatgccaggaagcagagtttttcagaatcaaaaacaaattaagagctcacagccccacccctcaggggtcacataagttggtactgttgcttgtaactaattcatgattttagccttttctttactcaaaattaaaactaaggacataacactcttcaaaaatacacataccctgagacagatcattaccagaatctacacagggctttgctatttaggtacagttagtacaattcatatttaaagtaatttcataaaaataacaactgttccaatcttacaagtttcgtttcctcctatcatggtcaccaaagcaatctctattgttaggattcttcattgcttgaaggtagaaactgcttagtaaaattctccagctcattttcaagttgaacagctttatttctaattaaaaaaataaaacaccaatctaattaccataaaggtcaaggagaaaaatgcattccatccattattaaaagacaaaaactttaataataaacaatgaagagcataacagacagtggaatcataccttacacgggatatcctaagttacctagagtcatgattatgcttgcaaattccctttaaataatgcacaaagtacacagtgtttcttatggacatacaaggaaagtagcagatgttacagcggcaatggcataccaaaaatatttcctttaaacactagattcatccttgatgcagccaaatgcccacaagagaggaaaactggaactaaaactgacagaaaaacagatttgtttcccactctcacactatgccagggcacatattcattgagtgggctctctctctccattatggacggggagggtcttgttttactttattcctgtgtgcatatgcttcaggtcatacaagtatacatcagctctgaactctactgtatatatttcttgaggtagctctcctgcagcgttagcacattaaattctatccaaatggctgagcctaatctagtaaaaaatggaaattccaaatattatggtatttgttttttttaacttttttctattagaaaaatgattagcagaccaaaaatattcatacttattcaagccagtcttgcccaaatcagaaagctacatgactaatgccaataatctattttatcatttattataacaaaatgaaatactatttaaaaacttacctagtattcctctttcaaaagctgaataaatcaaaaccaaaaaaccataaaaacttacctaggttaagacaaaaaaacaatttctactgcacagtttcaccacatttgaaaggtatatatgggatgagctgacttaaaataggagcaatctaatacatacaattcacatgggtgggtgaggttggaaatatctaagtgataggcagtcatcttttccagagattttgaaactaaggtacaatgaacacgtgttgttggtcagatgaagacactatggatggataatcactactatggatgttttaagtacatgccccaaaatccaggtcacaaagacagtccctccaatttgtaaacattgactactaagctgttcttacacaggcaattttgtgtagcatgtgtcctagaagtaacagcagggactaaatgaggtttaatggttcttccaagacattctgacaagccagctaatgggtaagcaaaagtaagaaagctgaaagttaagttcttaagcactgagtaagaatttccaactacagaccgaatggtgacactttcagtcttgtccccaaaagcaaattttattagaccctaaataatatataatgaatcatatcaaaccagaaatccacattttatcaggacatcttacttttatgatttaagtatacataatcaatagtcccccatgaaaacagaagttatgggtcttggacatacacaactaaaaattcacttttaattatacaacttctgttctgaaaagggaataatatagcctaatgaagagtaaatttcgatctataaagtccctttcaattcagatttgttttcttgttgcaattagccttcagtgaaactgcaaaccacatggaattaaatatggaagattttcatttaaaccttcggtgaaactgcaaaccacatggaattaaatatggaagattttcatttaaaccaacacaaaaagctattaggaatgaatacaaattcattaataattttacatattttgtaatgagaccagtaaatgttcaaattattgagaagaaaggtttaaataccttaagagctttgaattgttttgtattttctccaactgatctatttctttgggtaat

SEQ ID NO: 97223 - DNA, 53104 bp, Homo sapiens
ctaaccctgaggcccttccgagttaggagagcagcacaaccctctcctcttgacaccgacactcttccctctctctttaaaggaactctgcgaccttcaagtcgtttgaggaccgagttgggaccataaaggtaattgtacctggactgtttgatggtcttggcaaggtgtgacctgttacagcaacttgtttattattagtcatttagttatggtagactcacatacagttgtgggaagtaatgcagagaggttccttgtgccttttacacagttctctcctgtgacgacatcttggaaaatcctgtagtgcagcctccccaccaggacattggcactgactcaggacacagaacgcctccacactgcccttcctggtccccactgcccttcctggtccccactgcccttcctggtaccttcttggccatgctgaccttcctcccgccctacccccggcaacccctagtccactctccctttgtataattgtgtcatttcaagaatgtcacgtaaatggaacgatacagtgtgcagctttttggcattcactgtcttcatttggcatcgttctctggagacctgttggggctggtgcccgtccgtgatttgctccctgtccctgctgagcagtgttcgtgttacataagcttttgtagagcattgagcatgggcctgggatctgccttgtgttgtgtgctctgtctcaggtttttctgtcttcatcttttctctcctgtagtctaaggttgtgggtgacagagagaacggcagtgacaacctcccttcctcagcggggagtggtgacaagcccctgtcggatcccgcacctttctaagcctgtggttgcttcacccgctgcagagcacacgcaacccagcctcagcatcacagccgcagctctgttcagcggagcagccagccagggcggatgagcagagccggccctgaggacagtcctgcccatccacgcggagatgtggctgccgcgtttgcatgaatttgaagaacacaggcttgtacacagatgttttacactcacgtttgtagatgaaacagatcactgtgctgtccttcctaggggtgcaggaagtggacagggcggagggtttgaaagaatattgagccaaagcccaggctccctttgggaatcatgttagcccatcagaatgttgaaggattgaagagttctaagcataaaataagtggcattttctgacttcttcctcctcctccttccctgactcacagaaggaatgcaatcacccagcaagtcctacctgttacgcaattttttatctcaaaatgccgaacgagaaaactgtccattttctgagacccccagaaaggaaactgaccctcagcagctgcctgattgttacgcgaatctagctttaacggaagcaaattcattattttttaaatgcagtggacttttcaaaaagtttaaattaggcaaagcagctttagcctcatagaatattatttctttggactcaagctgaaatacaagccttacattgccttatgctttatttctttctaatttttatatgtatatagatgagggttccttaatggttgtgagcattgtgtggaattttacacctggcctgcgtggcagcctcttccagttgaggtgttttatgtcacgcacactccatcccagtgtacaaaacctgcttctcttctcaaccgtggcagctcccgctggctcctatgccctgccctaaagggctcttgagcctctgggaatgggaggggccaagagaaggaaaaccctgtctttagcaccctttaaaagaactgtgccccccttctcagtgctgcctttgcatgggcctggcccggctcgcattcgtcagtgactccaaccctcctgcttgctgtacttgggatgaaacgaccccacaggtcaggtggagggtggggcgtgggcatcagccaggattgccgttacagtctttttctcaggagctacaaagatctcttcctgttactaaatagtcgcaccccagcagcctctctcgcacaccggggccctgcatgtcagatggcgtggtctgcagggggagctctgtgccttagtggctcttggcaggacactgagggcctgcctgtggtgtgcccggctctgccactcccgggaggggaagggctgctcagctcaaggtgtcctgttcggtagagcaagtgtcctctgacagccgtgtccccggacagttcagacacccttggggatggcactccacacacgacagagatgcaggggccagggaagcccagcgctcggtgcccttcgtccagggttaaaatcggcctgtggggtgtggtgagaaggcaggttgtgcgggtgttgaccgatgtatcttttccttaaagttattataataatgggtaatttgtcaataaagcattcctttgggggaaagtccgcctcggcttgtgtgatgtatcgttcgggaccatgataagagtggtaaatgaactggcacacggtacctgccctaatgagtccgcacccttgggagaggcaggcaggggacagtgctaaagacaaagggcaggtcctcaatgctgggacaaggggagccagctgtgaggggagaatggtatatggccaacctgtgaggtcagacccagcgtcttgggaagaggagttgaaactgagccccaggaggcggaggaggagctcaccaggctccaggttgggccgggagctccagaggcttcgccagctgcccctgcaagcactgagctgctgctgagcacacctgtagtccccgccattctggagggtgaggcagatcacctgagcccaggagttcaggaccagcctgggcagcataccgggattccatctcaactaaaaacagtaggctgggtgtggtggctcatgtctgtaagctcaggactttggaaggccaagatgggaggatcacttgagcctgggagtttgacaccagcttgagcatcgtagccaggccctgactctacaaaaaagtgaaataattagccgagtgtggtggttcacacctgtaatcccagctgctcaggaggctgaggtaggagaatcatttgaacccgggaggtggaggttgcagttagccgagatcacgccattgcactccggcctgggcgataaagcgagactctgtctcaaaaaaaaaaaaaaaaaagaaaaagaaaaaggaaaagacccttgagggggaacctccactctgcccctggtctggcgctttgcatgtatccattcctagtctttggagttcccactggaaaactagtgggagcaccagtcttcctttggaggtcagaggtagctgggctcaccccagatgtaagagcagggaaagttaggtgacctcgaattgtatggtacataagccccaatacagcagggagctggtaccaataaagggtgaaatgcactattgccgcctgcagtcaagatttacactaatttattttggaatgagttcatgtgttcttcatttattgaacagatactgtaactgccctgcgggtaagagtctgctaggttttgtggggtacaagggtgaatctgatgtggacccagtgctcaaggactttgcaacccgtttgttggggaagacagattcccctaagtcactggcttgtgtttgacgaggtgaagcgattggagagcttcgaggatggagcaagtggagtaagtggacctgaggagcgggcagcaatgcctgaaggctcagtcccctcttctcagagtgagggtaatggtatctgcctcatcatattgaaaggcttaaccttataaagcacttagcacagggcctgatgtatcagaggtaaacatcagactcttcccaactgtagccactgtcaactttcctgtcttcttttttttttttgagacagggtctcactctgtcgctcaggctggagtgcagtggtgcaatctcagctcactgcaacctccacctcctgggctcaagcgatgctcctgcctcagcctcgcgagcagatgggatttacaggggcatgccaccacgcccagctaatttttgtatttttagtagagacagggttttgccatgttggccaggctggtcttgaacgcctgacctcaggtgatccgcccaccccggcctcccaaagtgctgggattacaggtgtgagccactgtgcccgggcgtaccttcctgtcttattttctccaagcaggctggaatgttcatggatagatatatgtgtgataatatactttttacatatcatgcatcgtgctcattttagtttcaggagttctttgctcctgtgtagcctttctacacattatctttctttttttcttctttttaaataagagatggggtcttgctctgtcacccaggcaggaatgcagtggcacaatcatggctcactacagccttgacttcccacccgatccagcctcctgagtagctgggactacaggggcatgcatgccactgtggccgggccaattaaaaaaatttttttttatagagatggtggtctcactatgttgtccaggcaggtctcaaactcctgggctccagtgatcttcctgccttggtctaccaaagtgctgagattccaggcgtgagccatgggtcccgttgtatacatttcagtaactatattattccatttgagtgctcacttgtgcagttgggcaggtttccattctcgctattaaaaatagtgccttcatgaatatttcagtgcatatacctttttctgtatttaggaatattttctttggaagaatgtccctaaagtggaactgctaggtctcagagggactcacttaaggctggttcattcattcttgcagctcccagcacaagtggaatatagcttcaatctgagatcggtaccaggcccatttcattctctcatccctccaattctggcctgaaatatttcattctcttggaatctatagttgtagatatgaacctggcctttctgcttcttgggttccataggccttttcttgctgcctgcttgatgttgcgcagcttaatgactgctaggaggcttcccaagctctgacacttccaggctgtgagactggaacaagcttggcaattcaagaccggcattatggcagtgagttatgagggcagaggaaggaggccagagcgtgttgagagagaatttgggtttcacgcagtgtgtcacgggaagccttggatgctactgggtttgttttaaaaagatgaccgcactgaactcaggtaaacgggcaagggtggaagcgaggaggcaggagcaccggccgcagaggtctgggagcttctaggatgggaagtggcccaggcagcctacgcggggcaggccgtcagtgagtggcggagcgcctgcagttacagggacagggaagggtggccgacgggatgggcaagggcagagggaggtggagtggacgttcgtggtcctgcctctccacgctgctgtttggagatgattccgggagggtgggagggcgctggcgacggcatttcagtggttggacaggaaggaaggaaggacgtcccatctcggcgctccagggttgagcaaatgtcagtcccaggacggtggctccgggtgggggcgggggcgacggtccgcagccgtctcccaccagctccctgttcagttctttgatgagaacgattacgttttctcagtcttacttaaagcgctgagtaaactcacctgcaagaccagcaagccctgcgcttctctttctgcgcggttccccgcagcacatggcgtgtccacccgggacccacctgcggccacctgaagactgggaggactggctccgcccccgcgcttcgtccccgcccactcatgggcggagcctccacagggcgcctcggccccgggctgtcactcgggactccgccccttcatggacggagcctccgctcggctctctgagcgcatgcgcagccggtcccacccgcggctccgacacgccggagcccacgtccttccgggagcgcgcgcgccggtgcgggtgcgtgcgtgagcgtgctcgtctccgctgccgctgccgctgccgctgccggtgccgcacccgcgccctctgccgccgccgccgccgccgcccggggtctccaggctgaggagtgcgtcggccgctgcccagcagcgccgcgaatcggggagcggagccgcggagccggcgggagggcgggcgggcgggcggacgggcaggtgagctcgctgcgggtcgggcgggcggatcggcccacgtcaggcccgggcaggcgggcgggcgggcgcgggtggggggcgggggcggcactccagagccggaaatggcggcgacccccgggccggggctgcgcgggcgctcggggccggagctgctgcgacgccgcggcctgggccggggcgggggcgcgggaaggtcggcgccggggcctgcgggagccgggccgggccgggccgggggtctgagcaccgtggtgggggctggggcggcgctctccgcgggtctcttcgggcccggacgccccctccgctcccccaggtccccgcggccgcccccaaccccccggggtctcctctcctgcggggggactggagaagctgggccatcgctggtcttagggaggcagataatttagtccctgggtcgttgtgtttatagctcggggaattgaaaattgttctgtaacgcatcgtaaattaatctttccgacgttgtaaattccaaaaagcatttggtttgttagaaaaaacctgttttctccgctttataaaaacatttgaagccatgctttatattgaactcttaaggagagtattaggaactcgtccgttcaggttctaacttgttggtgttaagtgtctggattaaagactctctttttcgtgtgccgaagccatgatttctcaaattcattcagttgtgtcatacaggaaaaggaagcaaaaatttcagctttatttttgttttccggcttaggcttggttgggaagatttgatggtggttagacacgtctgcccttatttgcctgtttagaaaaacctattctaatgacaaaaacagttacattgctcccactattgtcatggttacctgaaggcaaaagtttactcaaagcttctgagattttatgttcgtttatttgcttctctttttaaaaaaatgtcagctgagtttcaggaatgagtagtctgtcaaacaagagatgaaattagaagcctggatctaagggctttggggaagtttcggttgagttcccctttcacttgtgtcggtgctgtaggactcggggtggctccagctggcgtctggcccagcagagagctgtaggggcccgctctggttgctggctgtgtggactctgagggacacccctggcgagggtgttaatgagcctgcagcgtctgagtccacccaccctcagactggcccctgactcactctgcacctgccatatcagcctccttgctagttctgaacagagccacatgctctgtccttggatcttcctggaatgcctggttccttaaccccctagcctggcgactgcctgcctgccttgccacccagttcccttcctcgcttaattttcccacagcgctgaatcctcctagtgtcctgcttaatgcatttatcatacttaatattttactgtgagttagtaaggtccgtggagagaatgttttgtgaaaaaaacagttgctggcacatgatcggggcccagtaaatatttgttcagtgaatgaacgtgaggagcttagcagcagctgtgcgtggtgctggccttgtcacccggaagtccttgtcggtgaggactgagcatgtagaggtaagggttcctggagtgttggccctcaggacagagagccaccatctctcacctgcccaatgaggaaagacagccaggtaaggggtggcttggaagggtgcatgggacccttgtaaatcttttcgcaactttgaatctataattattytgaagttaaaacgtttctaaaaagtcagatctgttgggggcacagtggctcatgcctgtaatctcagcactttaggaggctgaggcggacggatcacttggagtcaggagttcgagactagcctggccaacatggtgaaaccccatctctactaaaaatacaaaattagctgggtgtggtggcgtgtgcctgtaatcccagctactagggaggctgaggcaggagaatcacttgaacccaggaggcggaggttgcagtgagccgagatcgcgccactgcactccagcctgggcaaaaagagcaaaactccatcttataaaaaaaataaaaataaaaattagctggttgtggtggtgggcgtccgtaatcccagctactcaggaggctgaggcaggagaatcccttgaacctgggaggtggaggttgcagtgagcaaaggtcacgccacactgcactccagcctgggtggtagagcaagactcagtctcaaataaataaaaataaataaaaagtcagatctgccagtggtaataatgcttttagaaattttgtctttgattaccaggaaaaaccctacatgctagtccttatactccgtcgtgacatttggtaattaagtagagtgaggtggaatgatctccctggctcttaattcaggaggactgcctgagagtgactgtggctgatccccttagcatgaggcccttcagctgtggtgctgtgacagagccacagaggctgcttggtgacttgcagactctggagtcctttccacagcctccacctcatgcctacattaactcagagtgagtgggcttcagggccttcctgcatccctgaagatggttgtattaacgtggttcagagattgaacagacgctgcacgtttctcaggcatttttcctcagttccccttgcttggagggtggataccactgagcctggttgtacagctgcctccgtgaccagcacctttgcccaaggtctccctgttaacartcgtcagagctggaacttgaactcgagtcttctctagaccaggtttcttctaagtatttggcatcaccaggaagagccctgtacaaggtgctggtggttttatccttagagcccagatgtgaggtgctcacgtgtgtgcctggggttagcagttggtgtttgttgaatgaatgactaaaatgcagtggggcggggagtcatgataaggtagaattttatctgaggtggagtttgcttctgaaatcaggcagtaaggtgaatgtgatacccagttaggagtatgtaatgctgcaggtaaactgtaacagcaaatgaaagcagtatttttccaggaaggaaacagacccctgggtcctcgggctgggttggaaaaagccatttgtagagaaatggaacatggtggctagccctgcacaagacatagagaagagacccttaacactccagttatctccaagtgggcagttagaatgagtgcttctaggccgggcgcggtggctcacaccagtaatcccagcactttgggaggccgaggcgggcagatcttgagatcaagagatcgagaccatcctggccaacatggtgaaaccctgtctctactaaaaatacaaaaatagctgggtgtggtggcgggcacctgtaattccagctactagggaggctgaggcaggagaattgcttgaacccgggaggcagaggttgcagtgagctgagatagcaccactgcactccagcctgggcgacagagcgagactccctctcacaacaaacaaacaaacaaactgcagtgcttctaaggtgagactcatcgtgatgttctgattagaacgttctcgtgccacaaagtcctgagatgtgtccaagaagcaccgtcttctgtcagacacacctcctgccccgccataggccttcccactgtggcagcagaatctgtgctaggccttccttcgtgaaagaggacaagatcagggctcacgtgactggggccgctgtgactctgagcctctgcgttctgtcagatgagggtagtggtgcttcccctgcgtcctgctgggagaaaaaaggaggcagtaaatgaaaggtgtctcatcacctgcttcctaaatagaagggacaaagaggctgaaaaacagtaatagtcttgttttatgaaaatgccacccctaatctaggagctgggactgccatgccaggacccctcagataatgacatccctgaagaggattagcagctagtctgttatcagtcacaggcagttcaacccagaagatttaaggattagattacccaacaaccttgagtgtagattttgtytctcatcaccctttgcattaactttgggtgcatgtgtgttaatgaggaagtgtgttctgctttattcttggtacatcacagacatttaatagatacaggtcattagaaataaaaattgttttaacttgtatgagttttgcaagcattgatatttcaaattgaaattgcagaaattaggacagcatttcattttcttttgtttttttgagacggagtctcattctctcacccaggctggagtgcggtggcgtgaccttggctcactgcaacctctgcctcctgggttcaagtgattcttctgcctcagcctcccgagtagctgggactacaggcggtcgccaccacgccaggctaattttttgtatttttagtagagacagggtttcgcggtgttagccaggatggtctcgatctcctgaccttgtgatccgcccatcttggcctcccaaagtgctgggattgcaggtgtgagccactgcgcctggscttttttttttttttttttttggttgggggacggagtctcactctgtcacccaggcttgagtacaacggtacggtttccgctcatggcaacctctgcctcctaggttcaagtgattctcctgcctcagcctcctgggttgctgggattacaggcgcctgccatgacacccggctaatttttgtatttttagtagagatggggttttgccatgttggccaggctggtcttgaactcctgacctcaggtgatccacccactttggcctcccaaagtgctgggattataggcgtgagccactgagcccagccccaagttggtcttgagctcctggactcaagtgatcgtccaaccagcatctcattttctaaagaaagaagtacttagaccaggtttgggacatgtctctgaaaattctgggctggtgcagtggctcatgcctgtaatcccagcactttgagaggccgaggcaggcggattgctagagtccagaagtgaagaccaggctgggcaacatagcaaaaccccatctgtactaaaactagaaacaattagccgggtatggtgacatgcagctgtagtcccagctactcggaggctgaggtggtaggatcacctgagcctgggaggctgaggctgcagcaagccatgattgctccactgcactccagcctgggcgacagagcaagacactgtctcaaaaaaaaaaaaaaaaaaaaaaaggaagttctgtattgatcaataatttcctcctcaggacagacctgcatatgccacaatttaactttgttgcaacatcattctacattttgcatgaatggtttcaaaaaacttatttctatgacagagaactttgtcatttattcttgacatattaaacctgagtgacatttttaaatttttgtgttgtgttgtgagtgcttagtgaagattccttgaatatggatgtgaatgaatcttatttttcatgggtttataattgtattgtccctttaaatattctacattgaacatgtatcaccagcagaaataatcatttacgaggtgaagtgtccagagccatgtagtgtctgcattgctgtgtccagggattctttgtttgtttgagacggagtctcgctctgtcatccaggctggagtgcagtggcacgatcgtgtctcactgccgcttccacctcccgggttcaagtgattcttctgcctcagcctcttgagtaactggaattacaggcgtgtgccaccacgcccagctaatttttgtatttttagtagagatggggtttcaccatgttgtccaggctggtctcaaactcctgaactcaagtaatcaacccaccttggcctcccaaggtgctgggtttacaggcatgagccactgtgctcaatctgcgttctgaggcattctgtgcctgttatgaaatcatgatgctggcaggtcggaagatggaatcgacttcccagccccatcggctgtgccctgccctccttgctgtctctagagcgcggctgacttcggggagagctctccctgccctgtgcctctattttttcaccaggtagggtggaaatgtgttctagtgaaactgcagaacgaaaatatcccgtcttactcttgacccttgaagaagcaggagctgaattcaggtgccagaggctgcgtccgcgcgctccacatcagtctcagagtggaggcgagcccaggccagaggcctctaccccggacgaggctgcaggtgcctgacgggaggagtsactgcagctcagcagagggagtgtgtggagtgtgcggccctgcctggcttttattttgctcctcctgttattgggagggattagcagcagagcgaatgtttggatctttgctgagcagtcccatcggatttttctttattaaatagsattgtgttttattgtaagaaggtttccctaagacaaataacgaaggaaattctgggtccargagtacagactgtagcttctgtcatctcttgccaagttcgtagccctcagatggtgtctgtctttcccctttgcttgcggggccttttaccacagcactttggtgttcttttagctgctgcgataggactagctgttaaaatctgagattttacatttttgccagtcgcaataaattttgttagttctttcttgatgtgttctttaaaataataatgctttttttttttgggtgggggacagagkcttgtgctgtcgcccaggctggagtgcagtgacgcgatctcggctcactgcaagctccgcctcccgggttcacgccattcccctgcctcagcctcccgagtagctgggactacaggcgcccgccaccacgcccggctaatttttcgtatttttagtagagatggggtttcaccgtgttagccaggatggtctcgatctcctgaccttgtgatccgcccagctcggcctccgaaagtgctgggattacaggcgtgagccactgctcctggcctcatcctttttttttttttttttttttttgagacggagtttcactcttgtttcccaggctggtggagtgcaacggtgtgatcttggctcaccgcaacctctgccttcygggttcaagtgattctccagcctcagcctcctgagtagctgggattacaggcgtgtgccaccacacccagctaattttgtatttttagtagagatggggtttctccatgttggtcaggctggtctcgacctcccaacctcaggtgatccactcacctcggcctcccaaagtgctgggattacaggcgtgagccaacgcacctggcctcatcttgttttttttttttttttttgagacagagtcttgctctgtcgcccaggctggagtgcagtgactcagtctcggctcactgcaagctctgccacctgggttcatgccattctcctgcctcagcctcccgagtagctgggactacaggcacccgccgccacgcccagctaatgttttttgtatttttagtagagacgggatttcatcgtgttagccaggatggtctcgatctcctgacctcgtgatctgcccacctcggcctcccaaagtgctgggattagaggcgtgagccaccgcgccctgccacatcctgttttttttacaacagggtgtcactctgtctctcacccaagttagagaggagtgacacagtcttagctcactgcattctcccaggcccaagcaatcctcctatctcagcctcccaagtagctgggactttaggtatgtgtcaccacagttgactaatgttttaatttttgtagagatggggcctccacatgttgcccaggttggccttcctgggctcgatcctcctgcctcagcctcccaaggtggtgcatgcctacagtctcagtagattagaatcaccctaaccctcagtaactgagattgtaggcacgcaccacctcactgactcacctcaaactctcttttttgagatggagtctctgtcaccagactggagagcagtggtgcgatcttggcacactgcaacctccgcctcctgggttcaagcgattctcctgcctcagcctctgtagcagctgggactacaggcatgcgccactacgcccggctgatttttgtattttttagtagagacggggtttcaccatgttggccaggatgatctcgatctcttgacctcatggtctgcgcaccttggcctcccaaagtgctgggattacaggtgtgagccactgcgctcggcccatctcaaacttttaataaggctcttcgtatagaaatttttaaaaaattaaaaacatttttggccaggcttagtggtttaagcctgtaatcccagtgctttgggaggccaaggcaagcagattacatgaggccaggagtttgagactagcctggccaacatggcgaaaccacgtctctactaaaaatacaaaaatttgggcaggtgcagtggctgacacctgtaaycccaacactttgggaggctgaggtggatagatctctcgagttcaggaatttgagaccagcctgggtaacatgaggaaaccccatctctgcagaaaatacaaaagttagctgggcgtggtggtgcatgcctgtggtcccagctactcgagaggctgaggtcaggctgaggtgggaggatccctggagcctgggaagcggaggttgcagtgggggatgaaaaagaataccccgtgtccaaatagcaaaacactctgaaatgaggcaaaccgtggtttgttgaacaggtgttctgggacaaggttgccgaatatgcattagccgtaatccccaggacagccatgcagggtgggtcttaaacagttttttagattctcgagtataaaggtataatattgaagaataagcacamataatgtcatcatacatgttaaagtgacaacacaggatttacaaaattacccttttttccccaaaattacctcttacgatgtggtttctgttggtgctgttttctcttgcatcatcccgccaggttgggtaaccctaactgattgtcaccagcagaccaacagacagactcacagcatccttctccctggtgtgagcactgcttaattcacatttatgaaaatactttaagacaagggcactgtaactcacatagaatctgaagtggccttgaacagggagctggtccagctgcctcttagtgtgtctgacctccaggtgggcggactgagatgcgtgcaggtgttcatggtataggcatccttgtaaacctgctctggttaaggataaataggcaaagttgtgctaatgctgttcctacagcagcctttgccctggactgactccagaacagctggctgactgacagctgcctcccagtaaagccttaaacaggcttatcttatatttttaaaaggcaaaggacaataaggcagattaataaactgtgggggtttttttgtttgtttttgtttttcttgagacaaagtctcgctgttgtaccccaggctggagtgcaacggcgcgatctcggctcactgcaacctctgcctctcgggttcaagcgattctcctgcctcagcctccagagtagctgggattacaggtgcccgccaccacgcccggctaatttttgtatttttagtctagacgggggtttcaccatgttggccaggctggtctcgaactcctgacatcaggtgatccgcctgcctcggcctcccaaagtgtcaggattatagggtgagccaccgtgcctggcttttttttttttttcctgtcttttgtgtatgtgatggggtctcgctcttgtcgcccaggctggagtgccatggcacgatctcggctcactgcaacctctgcttcccgggttcaagtgactctcctgcctcagcctcctgagtagctggaactgcaggtgtgcaccaccatgcccggctaatttttgtatttttactagagatggggtttcaccatgttggccaggccgatctcgacctcctgacctcaagtgattgacccacctcagccttccaaagtactgggattgcaggtgtgagccaccacacccggggctggatttttttgttttaagagacaaggtctcacactcttgcccaggctggtttacagtggtgcagtcactgcagccttcacctctgggctcgagtgatcctcccacctcaggttacaggtgtgagccaccacacatgaccgcacatggcagattttttttttttttttttcacggagtctggctcttgtcacccaggctggagtgcaatgatgtgatctcagctctcactgcaacctccgcctcctgggttcaagcaattctcctgcctcagcctcccgagtagctgggattataggggcgtgccaccctgcccagctaatttttttttttttctggagacaaagtcttgctctgtcacccagactggagtgcaatggcaccatcttggctcactgcaacctccgcctcctgggttcaagcgattctcctgcctcagcctcccgagtagctgggattacaggcacgtgccacctcacctggctaatttttatatttttagtagagacggggtttcaccrtgttggccaggctggtcttgaactcactgacctcaggtgatccgcctcagcctcccaaagtgctgggattacaggcgtgagccactatgcccggcccaggattttttttttaattaaggaaaatactttttacatctaaaattctacgcgacaataattaatgtgtcttcaagctgagaattaattaaaatatagccaataaaacatgtattaagctttgtaaactttgtctatatatgtacttattttacttttatttaaaaatatggggccaggcacggtggctcacacctgtaatcccaccacttcgggaggccaagacgggtggatcacttggggtcaggagtttgagaccagcctggccaacatggcgaaaccccttccatctctactaaaaatatgaaaattagccaggtgtggtgcaggcacctgtaattccagctactcaggaggctgaggcaggacaattgcttaaacccagaaggcggaggttgcagtgagccgacattgctccactgcactccagcttgagcaatagaaagactctgtcttaataaataaattaatagccgagcacgctggctcacgcctgtaatcccagcattttgggaggccgagacgggcagatcatgaggtcaggagatcgagaccatcctggctaacacgatgaaaccccgtctctactaaaaatacaaaaaaagccgggtgtgatggtgggcgcctgtatatagtcccagctactcgggaggctgaggcaggagaatggcgtgaacctgggaggtggagcttgcagtgagccgagatcgcgccactgcactccagcctgggtgagtgatcgagactctgtctcaaaaaaaattaattaattaattaaaatatgacagtggcctgggtgccatcgctcgcacctgtaatcccagcacattgggagtctaaggtgggaggatcacttgagctcaggagtttgcctagcctgggcaacttagggagatcctgcctctacaaaaaataaaaaattatccaagtgtggtggttgcacacctgtagtcccaactacttcggagggttgcaggagtccaggaggtcaaggctgccgtgaggtgtgattgagccactgcactcctacctgggtgatatagtgagactctgtctctaaaataaaataaaataaaayaaatgacagtggtccatatagtaccttattcagaaaaggcttgatgtacaagaaaataagttatttgtgatcaggacagagaagaattactgccttttgtgaaatggatgctgagaatcagttacgatgtacggtgcttgggaggctgactttgatttcagttacagccctgctgatccttagcacggtgactgcaaataggttactccaccttcctgagtctcagtcttcttagccgaaaagcacagatcatcatcataatagctaacattaactgtgtgcctggcatagggtctgaccgctttattcaagccagctcccagacataccttgctggactgtttaatgcccattcgacaaagaggagatcgacatggggaggtgttgagtaacttgcctggccactgagtccctgtcaatggcagctcagacaggtgaccccagagctaccctcccaccccctgaccaggcccgtctcacaggcctcttaggaagggctctgttcagtagatggcaggcacgtggtaagtgtttcctaagctgcagctgctgtgtagataaaactcaaagcagatatcacaagttttgtcagatcatactgtctcaattttgaggtgaatgcatgtgttttactacttaactacctctgaaatttaggggttttttgtttgttttgagacggagtctcgctctgtcgacaggctggagtgcagtggcgcgatctcggctcattgcatcctctgcctcccggcttcaagtgattctcctgtctcagcttccccagtagctgggmctacgggcatgtgcaccatcacgcctggctaatttttgtatttttagtagagtcggggtttcaccaggttggcgaggctagtctcgaactcctgagctcgtgatccccccaccttggcctcccgaagtgctgggattacaggcgtgagccactgcgcctggccctgaaatttcgcatgttttacggttggcttgttagggttaaattggtgcaccttatacttggttgcatactagactcactggaatgatttgactttcgtcatagttgcagaggcactctgaaaccctaygtatgtgcttcaccagggacagccccacgcatgggaggtggtggccagccatcaccccagggtgaatttctctaagagcagtcctaggccagggggtgagtgtgggaaagtcagggccgtttccatcagttaacgtttcagagcgggttcccgctggaagtgctggaaatacccagatgccatctgtagcattttatgaactgtggcggatccactctctgtgtcttgagcttctgctctgtggtctgctcagtggaagcatcctgtcagtccactgtacagtggggtggagccgcagccagggtgggtgtgccgtttgattggtcacggaatgaacagggcaaaggtcactaagtagatatgatactgcaagtaggattgtggtcataggtatttttatgaatttgtgttatgtgaagttgaggatttgaatgttgtgattattatatccagataaagttctagcctggcacagtgcaggcacgtgcctgtggtcccagctgcttgaagtgggaggagagcttcagctcaggatttccaggctatagggagctgtggtcccaccattgcaccccagcctgggtgacagagtgagaccccatctcaaaaagaaaagaaaagaggctaggcgcagtggctcaggcctgtaattcaagcactttgggaggctgaggcaggcggatcacttgaagtctggagttcgagaccagcctggccaacatggtgaaacccccccatctctattaaaaatacaaaaatcatacttacccggcaggggagataccatgatcgcgaaggtggttttcccagggcaaggcttagccattgcactccggatgtgctgagccctgcgttttccccaaatgtgggaaacttgactgcgtaatttgtggtagtggagggactgtgttcrcactgtccccccygcccaaaaaaataaaaatacaaaaatcagtcgggcgtggtggctcacgcctgtcatcccagcactttgggaagccgaggtgggtggatcacctgaggtcaggagtttgagaccagcctggccaacatggtgaaaattgggaggccgaggcgggcggatcccaaggtcaggagatcgakacatcctggctaacacagtgaaaccccgtctctactaaaaataaaaaaaaaaaaattagccgggcgtggtggcgggcgcctgtagtcccagctactcgggaggctgaggcaggagaatggcgtgaaccagggaggcggagcttgcagtgagccgagatggcgccactgcactgcagcctgggcgacagagcgagattccgtctcaaaaacaacaacaagaacaacaacaaaaaattagccgggagcagtgatgcgtgccgtagtcccagctactctggaggctgaggcaggagaatcacttgagcctgggaggcagaggctgcagtgagccgagattgtgccactgcactccagcctgggcgacagagcaagactccgtctcaaagaaagaaaaagaaagaaaaaagtcttccccgtgagagtagatttctactgaatcgattgctggttttatgccttttcttccgtgataggaagtatgtccagactcatctggctggggatcctcaggagagcctgcggggggcagcagaggcccrcctgggccagggcgtgcaccagaccagaatcctgcggatttagtattgtgagggtagaagaccagcaagcagcatgmcctcgtggttactgatcttatgaagaacacttgtctttcatatttgggactgtgttaaggttttctggaatatttttggtygtagtaacgattctgctttaggagctttcttctctagtgttgcacagacctgagtgatttgaccagcagygctgcggtaacggaagaccactcgtgtcttcagactcgttctgttcctgggggtgcttgcttgttctaggccccctttgtatggagaggttcaaaccttgattgaatagtcgctacccaggtgtcataacctgtggcctcattggtgtcacctggactttttgtctgctgtttgcaccatcgaaagtgatgtgcgctggccgggcgcggtggctcacgcctgtggtcccagcactttgggaggcgggggtgggcagatcacaaggtcaggagatggagaccatcctggctaacacggtgaaaccccatctctactaaaaatacaaaaattagctgggcatggttgcgagtgcctgtagtcccagctactcgggaggctgaggcaggagaatggcgtgaacctgggaggcagagcttgcagtgagtggagatcgcgccactgcactccagcctgggcaacagagcgagactccctctcgaaaaaaaaaagtgatgtgcgcttgggactgggagggcgaggcccgaggtacctgggtgcccgatgcccaggagggcatgagtgtcrtgttggataacctgctctccaagtaatagggttttgagaatgtttttttttttttttaattgagacagagtctgactctgtcgcccaggctggagtgccatggtatgatctcggctcagtgcaacctctgcctcccaggttcaagcgattctcctgcctcagcctcccaagtagctgggactacaggtgcccgccaccacacccggctaatttttgtatttttagtagagacgggggttcaccatgttggccaggctggtctatctcctgacctcatgatccgcctgccttggcctcccaaagtactgggattataggcctgagccaccatgcccggcctgttcaattctttgtattcaaatgtatatctggagttattttgttcaacttctgatctgcttttctttttgaattactgtattctaagcatcagtttacaagaaaaaaaatctttattaggtttccagacccaagtcaataccaataaaattaatgcagcaaacattcactgaatgctctattaggacctggggcagtagatgagtctgtgaattaaaagggcttcagcatgtggggtttggttttgtttctctgtagctaatcatacctttggaatggttttatagtttcaggaaaccgtggttctgggcagggtggcagctatgggttgaggcagttgatccttcctcaggtgtggccgctggtcttgttgcttcttgacattaactttgtgactcacgagggcaggcgttcgttttctgtggcactctgtgtgtgagcgagcatggggcttgttactgtgtgaaaagggccagctgccctgcctgtctgctcctccctggctcggccgggcgctgccatggctccagctcagattcacttcctctcgtacttggatgcttggtgatggtcgtggaagcagttttattttctcttgctgttctcgtgttgcgttaagctcagcatcactgttgctttttattcttagaattaaggaggaaagctgaaatcttttggggatttctgtgtttccagggactttaggaattcttttttttttttgagacagggtcttgctctgtcaatcaggctggagtgcggtggcgcgatctcggctccctgcagccttgacctcctgggctcgagtgatcctcccatcccaaccacctgagtaactgggaccacaggtgtgcaccatcacgcctggcgagtttttgtatttttttttttaatagagatggggtttcaccatgttgcccagaatgatcaaacttctaggttcaagcagtctccccacctcagccttccaaagtgttgggattacaggcatgaactgccatggcyggctggaaagtctttacatttgaaattcattttaagttaggaggaaaggcctagcacactggctcatatctgtaatcccatcactttgggaggctgaggtgggcggatcacttgaggccgggagtttgagtccaacctggccaatatagcaaaacctcatctctgctaacaatacaaaaattatctgggcatggcggcagatgcctgtgatcccagctactcgggaagctgaggcaggagaatcgcttgaacccgggaggcggaggttgcagtgagctgaaagtgcactactgcactccagcgtgggcgacagagtgagaatcggtctccaaaaaaaaaaaaaaaagagtaaaggtgagggacacctgtgatgtggcacacagcgtcttttctctagcttgctttgttgactcttgtttataatttcttcaaatgtatttacagagttaattgggttttttttggaatagataatatctattccaaataaaaatccagaaatacacattcaaactgtggggcttttacccttttaactgtgttccaagtccctgtccctagcatgctctgattgtcagtccttcccttgcctgacctacctgtctgagtatcctttggcagtcaggtttttgtttgtttgtttttgagacggagtctcgctctgtcgcccaggctgcaggctggagtgcagtggcgtgatctcagctcactgcaacctccaactcccgggttcaagcgattcttgtgactcagcctcacgagtagctgggactacaggcgcctgccaccacgtccagctaatttttgtattttttagttgagacggggtttcaccatgttggccaggatggtcttgatctcctgacctcgtgatctggccaccttggcctcccaaagtgctgggatgacaggtttggccaccgtgcccggccggcagtcagtttttacatggttcatcacagattttaaattaagattccccagcaggataaaagaaatgccagttgtattttatttttcgtatttgtatttttagcaattttttttttttgtatagaatgagccaagggcatctagagcaaagaggtagttccctgccccgtctccatctccctgtctgcactgtctctcccagaggtgtttgctggtgccttctttgcagttccctgtgctgtgtcatgcccgtttgctgacccagcccctgctgtgtcttccccatcccagtgtgactgtcgctcttggtagttcctccgtgtttcctttgtttccttaggtgacttgtctttgccccactccctgcagtccgcagcacctgttgtctccttccctctcctcccgcttctcctcagacgtcatctgttctttctagagttgttccccttgccccagggtccagggttcctaacagcctgttttttttctttctttttttttttttagtgagacagagtctcgctctgttgcccaggctggagtgcagtggtgcggtctcagctcactgcagcctctgcctcctgggttcaagtgattctccygcctcagtcttctgagtagctgggactataggcgtgcactaccatacctggctgatttttgtatttttattttttatttattgttgagacagggtctctttgttgcccaagctggagtgcagtggtgccatcttggctcactgcaacctccacctcctgggttcaagtgattctcctgcctcagcctcccaagtagcttacagtagggattgcgggcacctacsaccacgcccrgctaattttgtatttttagtacagatagggtttcaccatgttgaccacctggtctcaaactcctgacctcaggggatccgcccaccttggcctcccaaagtgctgggattgcaggcgtgagccaccgcgccaggccctaacagccaccttcttagcatctgtatattcagaccgtccattgcaggatgtgtgatctttgtggcctggaatgtctctctctgagcactccatcctcccacccctcaggcagtgtctcttgaggccacctgcccagccaccatcttggggggaccacaggaggctggggagagagcgaggcagtagtgagaagccgggacgctcaccgttggccgagtaccttagagcagccctgacgcctgcttctgtctcttggtgaaagtggcgcccagacttcagtccttacagcccagaactcagaaccgtggaggtgctgtgacccacagggtttaccttgtaattgttgttaaaacccttctgggcttcataatggaatgcttatgttgaaatattattttaagtactattatctatgatgtggttagaaatgccaaagaatttttagcttttttgagacggagtcttgctctgttgcccaggctggagtgtagtggcgcgatctccgctcactgcaagctccccctcctgggttcacgcgattctcccgcctcagtcttccgagtcgctgggactacaggcgcctaccaccatacctggctaattttttttggtattttttgtagagacggggtttcacgacgttacccaggatggtctcgatctcctgacctcgtgatccacccgcctcggcctcccaaagtgctgggattacaggcatgaaccaccgtgcccggcctttttttttttttttkgtagatggagtctcgctctgtcgcccaggctggagtgtggtggcgtgatcttggctcactgcagcctccacctccckagttcaaacgattcttctgcttcagcctgctgagtagctgggattacaggcacctgccaccacgccctgctaatttctgtatttttagcagagatggggtttcactgtgttgcccaggctggtctcaaactcctgacctcaggtgatctgccctcctcggcctaccaaaatgttgggattacaggtgtgaaccaccacgcccggccagagtgtgtagcttttgtaaaagttttggaaatggcctcagataatttcagaggtttttaaataaagaacgctcaaaatggarcaaaatggagagcccctgataggcctcctgcgtggaggtttgcagtaagccagaggcacctgtgggtcccagggagagacgggctgctccatggatgctcctgggacctggggcactgggtgggcctcaggcagataggagctggtccgtatctcttgccaagcccaggccaactcctgatgaagcagattcctgtgggtgacaagtgtcagaagatagaataggaccttagggtcaggaaggatttcttgaacaaaaaaggggraaaacagattgagagattcagaaagctgtaatatattctgtgacctcaaaggtgacttggaggagggctgttgttcagcgacgggcgtgtagtgaacactggggcatttaaacggttcagatgctgaatttaatgttatatgttttttactacaattggtaaaaaaaaaaaaaaaagcttgtgctcatcaaaagacacaccataataagtaaaaaaagaactgtgaactggaagatacttgtaacatttttaaccagtgaagggtcggtgtcctggatatgtccactgggcaccacagacagaacggccttgaaggtaggctggagacgcctacccttatcaggccaggcaagcactggggagcctggccgtaccagtcattgttgaggctgcaggaatggcagggagccctaagytccagtggccactggtgcagtcctcagagagcagttggcacacckcctcaggctgagcctgcccrttcttgggcacccagaagttccactcttaggtatacaccagaagaattcttcctcgactgtttgtgctgaaggacaaggtttaagtttttaaaatttccagtgtcacagactgatgatatttttgtaaactacaacaaaagtgactagctagtaaaggaaatcacagaacataaaatacaaacccatgtcattattattaatattttgaggcagagtctcrctttgtcactcagactggagggcagtggtgygatctcggctcactgcaacctctgcctcctgggttcaagcgattttcctgcctcagcctyccaagtagctgggattacaggcgtgcaccaccatgcctggctaattatgcctggctaatttttgtatttttagtagagatggggttttgccgtgttggtcaggctggtctcaaactcctggcctcaagcaatctgcattcctcagcctccaaaagtgctaggattmcgggcatgagccatcatgcctggttatcgggggaacccgcccccartatttcaatgtaggttctttctattttccataagtgtcrgccagctgagaaataaagagaaagagtacaaagagaggaattttacagctgggccccccgggtgacatcacatatcggtagggccgcgatgcccgcctgagccacaaaacaagcaagttttattaaggatttcagaaggggagggggtgcaagaacagggagtaggtcacaagatcacatgcttcaaagggcaaaaaggagaacaaagatcacaaggcaaagggcaaaagtggaactcctgataagggtctgtgttcagcggtgcatgtattgtcttgataaacatcttaaacaacagaaaacagggttccagagcagagaaccagtctgaccaaaaatttaccagggtggggtttcccaatcctagtaagcctgagggtactgcaggagaccagggcgtatttcagtccttatctcaaccacataagacaggcactcccagagcagccttctgtagacctccccccaggaatgcattcctttcccagagtattaattcttgctaggaaaagaatttagtgatatcttccctacttgcacgtccgcttataggctctctgcaagaagaaaaatatggctgtattttgcctgaccacacaggcagtcagaccttatggttgtcttcccttgttccctgaaaatcacgattattctgttctttttcaaggtgtactgatttcatattgttcaaacgcacgttttacagtttgtacagttaacacaattatagtggccctgaggtgatgtacatcctcagtttatgaagataacaggattaagagattaaagtaagacaggcttaagaaattatcaaagtattatttggaaactggtaaatgtccatgaaatcttcacaatttatgttcctttgccacagctccagccggtccmtctgttcagggtccctgacttcccacaacacctggcttctattacttttttaaaattagcttttttctttttttcgagatggagtctcactctgttgcccaggctggaatacagtggtgtgatcttggctcactgcagccgccgcctcctgggttcaagcgattctcttgcctcagcctctcgagtaactgggactgcaggtgcaatacaaaaaatgcagaacttttgtattttctgtagagatggggtttcgctgtgttgtccaggctggtctcaaactcctgagctcaagtgacatgcccaccttggcctctcaaagttctgggattataggcatgagccactgcatccagccttattattattatttttttttgagatggagtcttgctctgtcgcccaggctggagtgcagtggcgcgatctcggctcactgcaacctctgcctcccggattcaagcgattttcctgcctcagcctcctgagtagctgggactacaggcatgcgccatcacaccgaggtaatttttgtattttttggcagagacagggtttcaccatgttgaccaggctggtcttgaactcctgacctcaagccatctgcccaccttggcctcccaaagttctgggattattttttaagcagttttgataggtgtgtacmtagtagtgctttgtggtttaatttgcatttcccagggagtgggggcactgcctgtcttctcacgcctcagttgcttgttgctgtgacggtcgcccactcctcctgccagtgtctgtgctgctcacggtagctgcatcagcctcacgctgtccgcccttcgccacccaccgcgcctgctgctcaggaatgttccaagcaacttggtggtaacagaagctgagaacagcccagatgtccttcggtgcaagagtggatggatcagttgtggtctattcacagaatagaatgtgaccacactggagatgaatgaattgtagctacaatctgcagtgtagacgaatcttaggaacrtaggcgtttcagaagcagatcaagccaggcacgatgctgtgtgcctatagtcccagctactcagagcctgaaggtgggagatcacttcagcctgggagtttgaggccagcctgggcaacatagcaagaccctgtctcaaaggaaaaaaaaagcagattacagaaaagtaaatccagtgctaggccgtatttttaagctcaaaaaattaaaactaawtagcgtttagggataaacatgaggtaattttttagaagcaagagaatagcattgaatttaaggtatatatggggaaaatgaaacttccaagttattgataattttccagtttttaaattagagacgggatcatggtgtttatgcgtcataatttatatgttccatatattttttgttgtttttttgagacggagtctcgctctgtcacccatgctggagtgcagtggcgcgatctcggctcacggcaagctctacctcccaggtttacaccattctccgcctcagcctcccgagtagctgggactacaggcgcccaccaccatgcctggctaatgtttttgtatttttgtagagacggggtttcactgtgttagccaggatggtctcgatctcctgaccttgtgacccgcccgccttggcctcccaaagtgctgggattacaggcgtgagccaccacgcccggctgatatgttccatatatttctttctgtatttcacataatacatagtaaaatatttaaaacagaacaaaaatagacttccttttaagatgttttcatatctgttcttacaaagttggccacagtttttccccaacagtagtttgagttcagcagcagctcttttataaaacgtttgctgcacacactgagattgcacctggaagtacagaaataagaacacacgtattttattttatttttttacccctgaagatctttaagtcttctgaggagcatggacctgctagactgcaagctgctgcattctgaggagcagggacctgctaaactgcaagctgccgcaggcggagatttttgcctgtttggtttattttgttaccactgagtccccagctctgagaacagagcgaggcatgtgatcgatgcatcgtaactgttgagcaaatgaatgctgagctgtgatggcaccgaygtgtccggggagaggacgcacccggctgtgtggacatgtgcccagggcccaggacagcgccayggaagaggacacacccggctgtgtggacatgtgcccagggcccrggacagcgccacggaagaggacgcacccggctgtgtgcacatgtgcccagggcccgggacagcgccacggaagaggacgcacccggctgtgtgcacatgtgcccagggcccgggacagcgccacggaagaggacgcacccggctgtgtgcacatgtgcccagggcccgggacagcgccacggaagaggacgcacccggctgtrtgsacatgtgcccagggcccgggacagcgccacggaagaggacgcacaggacagcgccacggaagaggacgcacccggctgtgtgcacatgtgcccagggcccgggacagcgccacggaagaggacgcacccggctgtgtgcacatgtgcccagggcccgggacagcgccacggaagaggacgcacccggctgtgtggacatgtgcccagggcccgggacagcgccacggaagaggacgcacccggctgtgtggacatgtgcccagggcccgggacagcgccacggaagaggacgcacccggctgtgtggacatgtgcccagggcccgggacagcgccacggaagaggacgcacccggctgtgtggacatgtgcccagggcccgggacagcgccacggaagaggacgcacccggctgtgtggacatgtgcccagggcccgggacagcgccacggaagaggacgcacaggacagcgccacggaagaggacgcacccggctgtgtggcaggggaggttcccaagagcaggctcagggctctggggtctgagtgagggctctccagccagcagggagcagggcagggtgttgaagagacggcaggtgcgtcaggggctgacgtgggacccggcactctgtgctctgtgtctgcccgggaacaggtagtcctgcgtcggaccgggaagtgtggtgggtgtggtgggggaaggggctggcgtcagcagggctctcgtccgccaacgtctggtggggatgcccgccatgcgggggcctcaggctacagccagggctgtgaaggagccgaggtcatagagtggctgccctggcgtagggagggaggacacgggtccccgccatttcagaagctcagcrtccctgcacgtgtgcggtcttgtctgcctaggcatgtgtgcgggccctggggctgctgccagcagaacggactgggatacgctggatttktaaaacgtgaccctttttgtttgcttttaatttttaatttttatttatttatttatttttgagactgagtctgactctgtcacccaggctggagtgcagtggtgagatctcggctcactgcaacctccccctcgagggttcaagcgattctcctgcctcagcctcctgagtagctgggattacaggtgtgtgccaccacacccagttaattttgtatttttagtagagacagggtttctccatgttggtcaggctggtctcgaactcctggccacaagaagcaatccacctgcctcagcctcccaaagccttgtttgcttttttttattttgttttgttttgagacggagtttcactattgttacgcagactggagtgcaacggcacggtctcagctcgctgcaaactccacctcccgggttcaagtgattcttctacctcagcctcctgagtaggtgggattacaggcatgtgccatcacgcccggctaattttgcatttttagtagagatggggtttctccatgttggtcaggctggcctcaaactcctgacctcaggtgatccgccctcctcagcctcccaaagttttgggattacaagcttgagccaccgtgcccggccaccttgtttgctttttaaagataatgatgtcactaaaagagttctgactgaggccgggcctggtggctcacacctgtaatcccagcactttgggaggccgaggctggtggatcacgaggtgtggtgatcaagaccatcctggctaacacggtgaaaccccgtctctactaaaactgcaaaaaattagccgggcgtggtggcgggtgcctgtagtcccagctactcaggaggctgaggcagaagaatggcgtgaacccgggaggcggagcttgcagcaagccgagatagtgccactgcactccagcctgggagacagagcgagactccgtctcaaaaaaaaaaaaaaagagttctgactgaaggttggaacttagccctccagaaatgaagactgcgaataacgctgatggcagctcgtcacttgcagcaggttgcagcacgtgctgctcgtgtagctgcggctgcacaccaggcctctcctttaactgtgttataacctttctgttgacatgggatccccttgaaagttttttttttggagacagggtctcactctgtcacccaggctgacgtccagtggtgcaatttcagttcactgcaacctcctcctcccgggttcaagccatcctcctgcctcagcctcccaactagctgggattacagatgcacaccgtcacacccagctaatttttgtatttgtagtagagatgaggtttcaccacgttggccaggctggtctcaaactcttgatctcaggtgattcaaccacctcagcctcccaaagtgctggaattacaggcgtgagccaccactcccggcccccttgaaatttaaaccaagtttaggaagaatgaagttgtgaggtgctacttcaaacatcaggtggcaaactcccggactcattaccccaaggaaataggcagtccaggttggtggctcacgcctgtaatcccagcacttcgagaggccgaggcaggcgggtcacctgaggtcaggagttcaagactatcctggccaacatggtgaagcccatctgtactaaaaatacaaaaaaattagctgggtgtggtggcgcgcgcctgtaatcccagccacttggcaggctgaggcaggagaatcgcttgaacctgggtggtggagggtgcatggagccaagattgcaccattgcactccatccagtttgggtgacagagtgagactctgtctcaaaaaaaaaaaaaaaatagacatcagaaagggttggctcctgtgatctcggcactttggtgaccatgacccaaggcaggaggatcacttgagccaaggaattcaagatcagcctgagcaacatagaccccgtctctgcaaaaaatttctaaaaacttagctggcatggtggctcacgcctgtagtcccacctattcaggaggctgtgttgggaggatcacttgagtctgagaggttgaggctgccatgatcccttatcacaccactgcattccagcctgggtgacagagcaagaccctgtctccaaacaaacaaaaaagcaaaaaatggtgttttacctaggtatttaccatttccagtggtcttcattcctttctaaaaatctaggttttagccggacatggtggctcatgcctgtaatccccagcactttgggaggctgaggcgggtggctcacctgaggtcaggagttccagaccagcctagccaacatggcaaaacccaatctctactaaaaatacaaaaattagccaggcgtggtggtacgtgcctgtagtcccagctattcaggaggctacggcaggagaatcgcttgagcctggaaggtggaggttgcagtgagctgagattgcaccactgcactccagcctgggcaacagagtgagactctgtctcaaaaaagaaaaaaaaaagaataagtcacattttggtgaggagcagtggcttgcacctataatcctggcactttgggaggctgaggcaggaggatcacttgagaccagcctgggcaacaaagccagaccgtgtctctatagaaaattttaaagttagctgggcatggtggcacattcctgtagtcttagctgcttgggatgctgagaagggaggctytcttgagtccaggatttcaaggctgcagtgagccaagatcgcaccactgcactccagcctgggcaacagagaaaaaccttgtttctaaaaaaaaaaattaggctgggtagggtggctcacacctgtgatcccagcactttgggaggctgtagcaggcggattgcttgagtctgggagtttgagaccracaagatcctgactctataaaaattttaaaaaatagctgggcgtggtattgcacacctgtagtcccagctactcaggaggctgaggtggggggatcagctgagcccaggaggtcaaggttgcagtgagctgaaatgtgaccactgcactccagcccgggcaataaagtcaggcggggaaaagaaagaatgagttaacattttctcagctttatgtgttgagtgattttggattctatcctgaaatggtaagaatgaaaagaaaatctgccaagtccatccgttcctacactctcactgcctccaagtcattctgcgctcttgagccagaacgacctggccgtttttaaaaatggagttttttgccttagtaattgacttgtgtaagagttctttattccacttgtgaattgttttttatacgtacataatgtaaatattttctccccttctgtgcctttcagtatgaatctatctgaactcgattctgctgttgtgtgtgtgtcttttcctcagtaccagatggtcttgattactgtagatatatagtatatgtcttgaaatcaatagggtaaattctctaacttttgttmtttttattaatgttgctgtggctaatctgtctgctacatttccttatacatttaaaaaaatcagtatcagtttctgcaaaaaaaaatcctcttggattagggttaggcttctgtcaagtctacagatcagtttggggagaactgacttctttatatcgaggcttctaatccgtgaacatgaggaatctttttcttatctttagtatcttagcaatttgtggttttcaacgtacagatttcataggtcttgttatttctttttctttttttgaaacaaggtctcactgtgtcacccaggctacagtgtggtggcacgatcatggctcactgcagcctcgagcttctgggctcagccatcctcttatctcaacctcctgtgtcactaggaccacagacatgagccaccatgcctatttaacttaaaaacaaaaacaaaaaaccgggcacggtggctcatgcctgtaatcgcagcactttgggaggccragggggggattgactgaggccaggagtccgtgaccagcctggacaacatggcaaaaccctgtctctaaaaatacaaaaattagctgggtgcagtggtgcgtgcctgtagtcccgtgcctgcggcatgggaatgggttgagcctgggaggcggaggttgcagtgagttgatgacttargatttttcttctcggtcactttgcaagccggggacccctggccagtgatgccccacctgggccctgcttggccacactggcgtgccccaactcacctgtgttayagcttgtactgtgttcggccattcccgagctcatgtaccgcactcaagatcaaggatacactggacattgaagggtgaggagggcggagaagaactttattgagcagtgaaacagctttcagcggaccaggggatgcaggggtggttcccctacctgaaggcaggaaagtccgcctgtgtggctgggtctggggctttttatggactcaggatgcggagtgcttgcagagcttgctgatgggtttgtgagtatgcagaaaaggttaaagtgggcatgacagtgtagaaaaccaattataagaggccgggcacggtggctcacgcctgtaatcccagcactttaggaggctgaggcagacggatcacaaggtcaggagttcaagaccatcctggtcaatgtggtgaaaccccatctctactaaaaatacaaaaattacctgggcgtggttcgcgtgcctgtagtcccagtgacttgggaggctgaagcagaagaatcgcttgaacccgggaggcagagattgcagtgaactgaggtcacaccactgcactccagcctgggyaaacagagcgagactccacctcaaaaataaaaattaggaaagggtaggtatgtgtaaaataggtgaaggatggggatcaatcagaggaaagtgtggcaaacaggaaggcaagttcttcatctagtctgaggatttaacttgtagctcagctgtcaggctttaaactgtctttggcttggaggtgggtttcaccgggaacccgccccatctgcctggcattcagctgcctcctgccagtatcaccgagatcgcgtcaccgcactccagcctgggcaacaaagcgagactatctcaaaaccccatattgatgtcatttcctaaatatttggttaaaaaaaaaatctgggcctggaattttatctggttttttttttttttttttttgagacggagtctcgctgtgtcgcccaggctggagtgcagtggtgcgatctctgctcactgcaagctccgccttccgggttaacgtcattctcctgcctcagcctcccgagtagctgggactacaggtgcctgccaccacttccggctaatttttttgtatttttattagagatggggtttcactgtgttagccaggatggtctcaatctcctgatctcgtgatctgcccgccttggcctcccaaagtgctgggattacaggcgtgagccacggcgcctggccttctggggattttttattacaaatataactttattaacagatgcaggcctattcagattttctatttcatgtcagtcttggtaaattgtaattttcaagatatttgtccatttcatctaatttttctaatttcttggcatgaagttgttcgtattttatccttttcacgcctctaggatctgtagtgatgtctttcctcatgttgctcaaagaaccaactcttttggctttgttgaagttatctgtttgttttcatggatttctgttccttatgatttccttgcttgcatttatgttgggtttatcctgttactttgtagcttcctgaggcggagccttaggccttgattaacgtgttgtactagtcagcattctgcagaggaacgttgccattatctgtgtctctttctaaaggagatttgttatgaggaattggcccacgtcattatggagacggaatctcatgctctgccatttgctgaagattgaggaaagcagtgggataataacagtccaaggacaggaggagacacgtggccccgctcaggctggcaggcgagaaggaaaacccaggccaactcctcctcccacccctttctattcgggacccccgtggactgggacgacactcacctgcacagggcagygcagttggcttcatggagcccccagctcaggtgctgctcttaccaagaaacaccctcccaggcacaccctgaagtcatgtttcatctgggtgccccacgatgcagcaaaggagacatgaaattaaccgtcaygtacactgtatttattattcaattcaaaacattttctaagttcccctgggatttcttctttgagctacatgttagccggaggtgtgttgttgaatatcaagagtatcttcctcctgggtttccagtttgtagctaagtcagggatagtgctgtgtgtgacctcattccattacgtttattgaaaccagcttgaagccctaacatgtggcttgtcttagtgtacagcattcagttaaaaacaatgtgtgttctctagatgttgggtgttctgtgactgtcacgtcatggtggttgattagttagaaacaatgtagaaacaatgtgtatttgccaggcgctgtggctcacacctataaccccagcactgtgggaggctgaggcaggcggatcacctgaggtcgggagttcagcctgaggtcgggaattcaagaccagcctggccaacatggagaaaccccatctctactaaaaataccaaaattagctgggtgtggtggcacatgcctgtaatcccagctactcctgtgtgaggctgaggcaggagcattgcttgaaccggggaggcggaggttgtggtgagccgagatcgtgccattgcactccagcctgggcaacaagagcaaaactgtccccccccccaaaaaagaaagaaagaaactgtgtgttctctagatgttgggtgttctgtgaagatcaggtcatggtggttgatagtgttgttcagaacatcgatgtttttcctgatttttggtctgttctgtcratttstgagaaagtattaaaattaaagttgggtcttgcatttttatccattctgtcagtcccttactttaattggagttttttgtccactaacattgaatttaattgttgatatgtttggatttagatcttccaactaattttctatttgtttcctgtgttgagttactttttcatttttcttgtaactttttagcttatacctctttgcattttttatgcagaggttgctgtaaggattacaatatgcatgtttattttaattaattaatttattttgtttatttatatatttgtttttaaggaacagggtccctgtctcctgggctccagtgcagtggagtgatcatagctcactgcagcctcaaactcctgggctcaagcggtcctcccgcctcagcctcccaaaatgctgggactacaggtgtgagcccctgtgccggcccacagtacacagctgcagttcttcaggatctcttggggtggccgtattctgccgtctcacacttctccatgccatggcgtctgtctgtgcacgtggcaaactccacaaggcagtgttggattcttttgctttgaacggtcttatggaataaagtccatcagctctgcccttggtactttcatctatactttgtgatactttctttttattttttcttctagaatagcctaacatggcagaccagagacagcgctcactgtctacctctggggagtcattgtaccacgtccttgggttggacaagaacgcaacctcagatgacattaaaaagtcctatcggtaagtggacaagtgtggcccccacatccccccaggaagacacacatgccccgtgtggtttagtctgcattttaccaagaaccattgcacatactttatcctggccgactcagcgttgaactggtcacagctcggtaacacctttgtatgtgtaatgtrctccttatagcttaaagttatggtattcatgttctcttgccaacaaaaaatagcacttagtagaaactgacacactgtccacagttccatagggagtcagggtctgaacctgtttgaggcctcacaggagccgcagagcgctggcatggtcctgtggtctccttgttttagcacagtgatgacagagacccctcactctgttgtggccttctgattgagcttgaagaactgcactcttgggtacagtttcattgagtaacctgtaagagacaccatcactaatccagacaattcagatagtcctcctctcgtgtgctagcatcgtgtagttcataaaacacttcttaaagtgccatcattacgccccgccgtgcttaccgttcacttggcacttgtgcagttagcggctgggacaccagggctggccttggtgccgctgaacttagatgtgccgtggcactcacagcccttggggctccctcctctgaggctgggtcagggtgaggaggtttacctgaaacaaccgcggagcttgcttttgtcyctggcccctgcagccctggagagtcggacagtgaggtggcctgggtggacctgccttccactgcacccggcagtgcgtgcgggtgggatggacgcggcggcgggtgcgggtggaacaaagtccagggtagagccaggacatggttttggtttgcaggaagcttgccttgaaatatcaccccgacaagaaccccgacaacccggaggccgcggacaagtttaaggagatcaacaacgcgcacgccatcctcacggacgccacaaaaaggaacatctacgacaagtacggctcgctgggtctctacgtggccgagcagtttggggaagagaacgtgaacacctacttcgtgctgtccagctggtgggccaaggtgagggcgagctgcctgcygtgcgggcacccgagtcactcctgccgtgcgggcacccgagtctctcctgccrtgcgggcacccgagtcactcctgccgtgcgggcacccgagtctctcctgccgtgcgggcrcccgagtcwctcctgccgtgcgggcrcccgagtcactcctgccgtgcgggcgcccgagtcactcctgccgtgcgggcaccygagtctctcctgccatgtgggcacccgggtcactccacgcctgcagggttcccagcattgcagagcccatgcgttgatgccagcaactctacactcctgagaaaaggcttctgggcatatggagcctttctcctcacctgtgtgatgggcgaagctctgtcactggcttggtgtcctgcctggaacaagccatagcgtacagattgtcccagggaagagccgtgcggagccgccagggtttcttctgtaaatggctcccagtccttcgtgagacaggaggaaataagcctcgatgttacatccgcatttcttcgtttcctcgttttgttccaaatgtcatatatgaggccagagggttggaatcactgcatggcatttgtgagaagcctgtatttggctttgactggtcggcctcctcactagaatccttataaagtactttttatttagttaatgttagacagagtctcgctctgttgcccagactggagtgctgtggtgagatcctggctcactttaactttgaattcctgggttcaagtgatcctcccacttcagctccagaactgcaggagttgaggcgtgaaccactgtgcccagcctggaggctgctttgttttttttttgagacggagtctcgctctgtttcccaggctggagtgcagtggcgcgatcttggctcactgcaagctccacctcccgggttcacgccattctcctgcctctgcctcccgagtggctgggactacaggtgcccgccaccacgtccagctaattttttgtatttttagtagagacagggtttcaccgtgttagccaggatggtctcgatctcctgacctcgtgatccgccagcctcggcctcctggagtgctgggatgacaggcatgggccaccacgcccgtcttggaggctgcttttctttaagctgcgggtttctttctgtctctcctcctcccttcttcagttctttccttctgcttcctgtctggaaggcagtatccccacctggaacgcaccccctgccttctgctgagggcatttgggagtcctgcgcctccctctccaggggcctcggaggccatgcaacaccaccttcttctccccccaggccctgtttgtcttctgcggcctcctcacgtgctgctactgctgctgctgtctgtgctgctgcttcaactgctgctgcgggaagtgtaagcccaaggcgcctgaaggcgaggagacggagttctacgtgtcccccgaggatctggaggcacagctgcagtctgacgagaggggtgagtgcccgccccagggccygtgtgtgtgtgtggggcagagccagaatgggccctgaatggtgtcaacctgtcttgtcaaacaggagggcactgacactgtgccgcgagtgtttgtggtggcagctgggactgttgaggtgtgaacgtggaccctgaggtaaagcaggcgcatagagctgtccccgccgtgacctgcggtagccgtagatcccagggactgcgaggcggggcagggcggcaggcagttggggcggggctgagggccgagggctggcggtgacccaaggcgacggaggaaagccgtgtggggtggaggtcagcgagtagcctctcccggtggagagtttgtccaggtgcccgaaagtcgctccacaggaccagcgttgggtgcgcgccaggctgtggccctcgtgcagtgccctgtgtgcttgcttttcagaggccacagacacgccgatcgtcatacagccggcatccgccaccgagaccacccagctcacagccgactcccaccccagctaccacactgacgggttcaactaaatccaggaggagctgtggtcagaggaggagccggcgcctggccacgccaaccttagaatcatgaactgtagtcacagagatgggaaggcagcctcctgcctgccctggccttgctggggcccctcctgcctccacgcccacccagcgtcgacccttgacccacgaagtgcgtagcatgcagtatttaaagcagtgtagctacggtcttctgtttttttcccttttttaatagcatgtatggggttctgttccatgtctgtgttgtggacattccgcggcatgaccgcgtgaactgcacggtggagctgcctcagggctgtcggtcaggttggtccagtgaggggtgactgcagccggtcaggtgggcgaggagaaggggggctgcccctttcctacctgtgcttgaggggccggaggcaggtgctgcctggcagagctgtgttaccgtcttggcctcggggtctggtccacactctgtgctcccagccttgaggctgcagtaggactctgatctcacctgccagaagagaggcggggccgcgtcctcctggcgtcaccggcgtcactgtcattccttggtgtctgtgctgggcatggttggcttgggggtctgtggtttcctgggccttgtggcagggtttctcccgtgggagaatttggtgtggaaagcataggaggccccttccgaggttgacaccgtgtcctccgcggtgtttctcgcctggtcgtctcgtcgtgtggacgctgccgttctggttctcggaggtgtgtccttcgccgtgttggggttatttgtctgtgttcctgcacttttcccgggctctgagctggattgatggggccagtctcccccctcccatcttgaggtcgttctccacattccttccagcacacstgtcctttccatagccctttttggacctttagaaccrcagatgataggaccagcccaatgagccacagtcagagagtagattgtgcatgtgtgagcacccagctactggggacgggggctctcccacgacccctcctcctgtgtttgccagagctcccatctgccccactcgcctttgccccgtcatcgatgattcaggcagagccagattcgttaggtccctggaggaaggactgactggaccagagggaccctctggctcaggagggttgggtccctgggaggccggcagccaggccacagaatccacacgtggaccattgtgggtccctgggaggccggcagccaggccacggaatccacacgtggaccattgtgggtcccttgggaggccagcagccagactayggaatccacatgtggaccatgggaagtcagtctcttgcgtgtcctagaccttgtgggtggygccctgcataggggagcagggggaacgggtctgatgtccctgtgctggctgagggctcagagctgcccgcactccgtrgctcatgggatgtgctgggcctgcctttggcgccatgctgcagactccagtgggcctggtttctgcagaatgtccatggtggccgctgcagagttgcagaggtccctgtagagataaagctgaggaggaggctgtgtgtgatggctctggctcrgaccaaccagatgagcctcctgaagcccccttccctgcctgcctgctgaccygtggccccagctcactcattgccctcagcagccacccgaggctgtgcagaagggtaggttcaggttgaccaggaagctgccaaaagggacatggatatgaggatacatctggacgtgcttaggaacagggtgctggttgagggcccccagctgacccctactgcagatccgcatgtggaccatgagccggctgccagcactaggtcctgggcagctttgtttgtcccacttttctttgtttcttctcactaaaatgatcacgaagacctttgacaagaggagrgatatgcactgtgatattaaattagaaataatttatcaaaatcagacctctcctaaaagaataagaaattcattgtttggcccatcctgaaaggtgaggtggcgagacagtggggtgcctccgtgccgcttcgtgcagcagcaagttcagcctgagatgctggctgtactcagcctttgcaatttttgtagatgtagcttaggacgtgagttatttttccgcagactggccaagagccaggttctaagcttggacctaaggtagaaagctgcccatcgggggccctagctcagccccaccaggccctctgttgggcctgcacacagctctgtggctagaacactccaaggcccttcggtacccatcagagtgggccccttgccaggtggcttttcagttacagagtccagtggaccattttgtagaaccatgcagctccctgcggaaggtggggtagggtgggaaagaggagcaggtctggaggtttgtggaacccagtcccctgcagaatctgtaaaacctaataaatcatggttgtggccattctcacggtggtgattgtgattagacgacccccgggaagcccagacactcggggcctggagttcctccccctgcctgacctagaagcagaacckttttcagcgctctgccctgttggctttaaggctttgtcttaatttaaggaaaaagatcctcccgggttttatttctctctttcttgagtggactgtttccctataattaaaagaggtggtgagtcctggggyagcttccgcgcctccctgtccacgtgctaacagatcaggacgcccccagcacccctgcctgcttttgctggtggcagtgacgggaccccgactcctcactctcgggccgcagacaatgctgtgagcaagtgtggccatgggcacagaatgtccctttggacgccgctgctgggggcygccaggggccctctggggtcgtgctttgaggccygtccggttcacgagggggtccgggcagcactgactgcttccgacctgcaggaggcgtaggagcggccctgcgggccctttcacggcagctgctgctgtatagatttgtctccactcagtgacgtgggatttttttgtcttccttttggctttatttttaaactgctttagatattactgctcagtgtttgtgaactttcctagttctctatgttgttagtgcagccagcacccagtggggacctactagaaaaaggaactggcatgcacacgtgcccagcaggaaaagcttcgtcttcacgtcggctgctgccatccagaagaggccctggagcctcacgccgtcgaggctgctctcaggcgttctgttccgggcgaggcttgtgctgcaaggaagggcaccagcatgcaggctgccactggagggtccgggtgctgcgggcagagttcagcgcttgtccaccctcccttagctctgactcagtgcatcctactgtggggacatctcgtgaggggacacraaatgactgatctcaccctttcccagtattcagagctgtgaacccctgtggcgcaggactggcctgtgtctgttattttggttgtaaatcattctcctgtggaattggcaaaagctacatttttactgtccttaccagcaacagtttgcgtcgtcacatgctgtgagtgtgggctgtggtgtgtccgtgtgtgtacatatgtgtatatgtatatatcacgcagcaggagtgtcattcatgctgctgtcccctggtgaagtgacaagtacaattaaaggtggctctgaaatggcctctggtttcttgggagtcgggcagggacctgcaggaggctttcccagcaggtgcacagaaggaagcgctgagcccactgtgtgcagagggtgtgtgcccagggcactgccacggcccccaccagcattggcctctgctctgcagggtggggtgcccatcctgggggctgtgtgtcatgctcacctgacccaggtgtgtgtcccggtgtgaaatcgaggaggggactggaagcccttccctgccttgaaacatgaaagctgattttctgagcagcagatacggtcagtggcaaagctgcatctgaagggcggcctgggaaggggccctgtgctggccccgggtcsgccccagaggagtccacacagcaccacctccagaaggggctgggcccggggtcctgcaggcggcaccttttggtaragtttgtttccctggaaaatggggaaaatgtttcaagccaggtgaggggggaagttaacactgaaatatgtattgtttttaaaaatcaaatgcacacgcatggaagctgcttgtccatgcactggttttgtcactggcgtcctggaatccgaccgtgttggggtgcaggcgctgtcagactccggctgatcctggctcgagcacacacatctaagggccaggctggttccgcatggtgatctccgtcttgtatgtctgaatgttggcctaaaataaagattactgttgtaaaataaatgttttcactgcggaccccacgtatgtcttactcgctagtcccgcagatccctggttttggagagcagcagctgatctcagccctccacaccccttgcggctggaaccttgcttccctcctgcctggtccagatgtggataaatgccccctcctcttgattgtgttttcacctccgttttctaaataccaagactggagcaaagaggccaagcgtggtggctcatgcctataatcccagcactttgggaggccagtgtgggaggattgctttgagcccaggagttcaagaccaacctgggcaacagtgagatcgtgtctctacaaaaaagagtttaaaattatctgggtgtagccgtgcctgaggtcccagctcgtcaggagggaaatcacttgagcatgggaagtccacgctacagtgagctgtggtcacaccaccgaactccagcctgggtgacagagggagatcctgtcaacaaactaacaaaaactcagaataacgtaacaaacatcttgaaatcctctattctgacttaagaaaaacgaaggaagggccaggcatggtggctcacgcttgtaatccccagcactttgggaggccgaggtgggtggatcatgaggtcaggagatctgagaccatcctggccaacatggtgaaaccccgtctttactgaaaatacaaaaaaaattagctgagcgtggtggtgcgtgcctgtagtcccagctactcaagaggcttaggcaggagaatcgctagaacccgggaggtggaggttgcaacgcaccgagatcgtgccaccgctctccagcctgggtgggagagcgagactccgtctcaaaaaaaaaaaaaaatttgagtcagattttccattttaaaaaaatggcagcatccaagaccgttttgcgtctctccccatttccatcctctgcttccatagctttaaactctgtctaccactgtcaggtccagtaagacgtactattggtttatacctttttacataaattgtactacaccatagtactgagtacaccacctgccttacgagtttgtttgtttgttttttgagatggagtctcgctctgtcacccaggctggagtgcagtggcgcgatcttggctcactgcaacctccgcctcctgggttcacgccatttaggaaaacgcatgcctcaccctcccgagtagctgggactacaggcgcccgccaccacgcctggctaattttttgtatttttagtggagatggggtttcaccgtgttagccaggatggtctcggatctcctgaccttgtgatctgcccacctcggcctcccaaagtgctgggattacaggcatgagccaccgcgcccggcctgtttttgtttttgagacggagtctttgtggcccaggctggagtgcagtggcacaatctcggctcactacaaccttcatctcctgggttgaagtgattcttgtgcctcagcctcctgagtagctgggattacaggcatgtgccaccacgcctggctaactttttgtatttagtagacggggtttcaccatgttggccagcctgatcttgaactccggacctcaggtaatccgcccgcctcggcctcccagggtgctgggattacaggcgtgagccactgcaccaggcctaagtttttcatttgatacagtagtagttaagaaatcaagccgtgtggttatattaggtctggttcattttagcttctgtacagaacagtcacgaattaatcacagtcggtcctgggcaaactgaccacaggtttttagtttctcactgtggaaacaaagctgcctgaatgtcgctgctgagttgtctcgggtgggatcgctgggagcgggatctggaagccttcccttgactggtggccccacactgccctgcaaagaggctccccatcttctcgctgccccttctagccttagcgttgtcagacgtttttttctggcttggtctttgaattttcttaattaagtagaatccacgtttattaagttcagttttttttttctttttcctttgagacagagtcttgctctgtcatccaggctggtgtgcaatggcgcgatctcggttcactgcagcttccgcctcctgcgttcaagcgattcttgtacctcagcctcccgagtagctgggactaaaggcgcgccaccacgcccagctaattttttgtatttttagtagagacgggggtttcaccatgttggccaggctggtctcgaacctatgtaggcctcccaaagtgctgggattacaggtgtgaggcagcgcgcccggcctatgttaagtattttatatatgggattcttacagagaaatgttaacagcaagccgagcactggacactgggtggcgggcagcaagacccttgccagggagggttgtcggccctgtttctcctggtccaggggaccgcggttaacaggcgctgcggcaaaactctccgtccgcccagcgccccaggaatctcctccgtctccaagacggggtcggaccaccctccccgctccccccggctatgccttccttgcgccccgctctccgtgaccgaggaacgccaggaagggaccacttctagcgccagccccgctgctcagggtcgggtggggggcggggccagcgcgggggcggggccggctcaggggcgtggtcactcggtggggcccagcgggacctggcctaccaggcggagcgggggctgggcaggggcgtggccaatcgggaccggtggggcgggcgagtggcgggagcgctgcacccgcagatgggccccccacgtggggaccagcgcccacccggcctggtcgcatgggcaatgggagaccccactgcagcgcaaggtctcgcggcatctgggaagaccggccttacgccgtccctcccttcgtcagcagacccctgtccaggatccgggatccggcataatcgaggtgccaggctccgaggacgccacgcttttggccgtggacttccacgcagaaagacactggcgcctgagaggacggggacgaccgtgtcccgtgtcagatgcgcctggcccacggctgagtccccagcatcagccctcagctccacggctgagccccgggaggctgattcagttatctgggcctctccggggcccgacgtgtgggcgccgcgcgtgcacctcctcttcctcagtaaaccacggcggcgactcctctcggggagcccggggggggcctgctcggaaagcagggtgggcaggacctaagggaacccacgcttgcgggcgtgggcacggcagagagcacgggatgcgggtgggcctccaggtctggaggggtgagcgaggcgggccctgagcagcagtggctccgggctcgtgggccccgggtggccccgcctccaagcgcaggcccccacttccgccctggtctgcctcctggctttgctgcctccagcgacttgtcctgacgggaaggaccctcccccccccccaactgtggggaggaccctgatggtacaaatttgtgggtgggggcaaaacagcctgcctcttgtgagacccagagcaccagggggccctgtcccctccctaggtccaggccaggtggccaccaagctatgggttctaggggccccatctagcagagctaggagctgcagggcccagttctaccccttccttcatctggcacaagtgcaagactgggaatgcttggtcctgcaggggagaaggcagggccctcagctccctccctccctccccatgggagtctccacaaatgcatgcctcagccaggacacctctcctgtgctgtaaccaatcacaccttcatttttctaaagctttatttattttataaaatgcatagaataaattatactagtaacattttaaaaattaacatctttgtattcagcagtcctgggtcaggaggcaggaggagggtggtggggacgggatggctcactgggcagctaacccgtgtaggccacttcctcctcgtcactgccatcggggaccgcgtctgtcccaaagtagcggtcgccaaagttccctggaaaaagggggggggggtccagtgtggtggggcctcccagggccacccaccctgccctcatgtgcggctgaagggcccgggcagcctcaccaatgcctgggatgatgcggaaaaggtcattgacccgcttgtccaccgccgtggtgatgattctcactcgcggaaatgcataggccactgagtgcacgcccatctctgccatgagcagcgacagcaaaaagatcttgtcctcaggcacgtcgtggtcctaccgagtgtattgggcaggtaaatcccacctctgcctgaacctgccccgcctacccagggctcactcaccaggagcacgcgcactgccatcatggccgccgcgcccgtggacacggtgcagtccatgaggatcacgtggtcatcgctgatgtccttgggcagcctcaggtagtggagctgcgggcagcaggggtcaggctgcaggtggggctccctgcgtccccttgctgtgagctccctctgccccctacccccgggctcatcaccccggctgcccccaggcacctcgggctccccggtaagctggttggtctggatgaggatggtgccgatgcgcacgtctttgcacacagcgcgcagcgcgggctccatggtttcaccggcgcgcagaatggacacaccggtgatctgcggggaggggaggctaagcgcccacatcccgccccagcagcctgtcccgcgcccaggtgtgcccaggcaggtacctgcttccccgcatagcacttgcccgcatagtcctgcccctgcggggtctgtacgacgcagtcctgtggggtgcagggtgaggactccggtgagcgcagggagctcgcaccggctccaagacccaccctccacctcgcgggctacgggctacgaacctgaaagggcaggaaggagagcgcgtgctcgatgagcagccgcatcagtctcttggagtagaagatgaactcgtcgcgactggtctccttgtccctgtggggccaacagttgagcgggagcacgcgcccggggccgccccgtccccaggtgggccctcacctgatgatggtgtgcatgccccgtacctgcggcgtgctcttcaggacgctcagcgtccggggcagcgggtggcactggtgtgccgaggccagcgcagccctggggacaaaccgatggggaacactcaagaagggggtcttttcccagagccctccctccccacaggacggctgtgcgtcactgtgaggggaacacacgggccaggcacagcacgaggtgcagagcgggcctgacttctgcctggggctgagctggggggagacgtcgccctacctgagctgtcaggcaaaggcgaaagatggcggcgaacaacggggcaagctcaccatcaggcagaaagctagcggggtaggctgtgagggcccctcccagtgcgggacccctcctgcgctaagaggaagcagaagtgggccgggcacagggcgggctcacacgtgctgataggtgtcataccccagaatgggtagcttgtccccagcctctccccgggggaactaaagctttgtggggtcaggccccgccctggctcctccccgaggtggtgcgcggcccctcaagagaggggggtggggggcaaagctggctcagtgtctcttggctgtcccgtcccgccccgctgcccaagcctggggatggccggggcagcagcaggtctaggagcgggcaggaaaagggcggggtggaggcaagaaagaggtgggacagggaggaggcaaagccggaaaggggcatgacaggggcagggaatggggcggggcaggaaagggggtgatgcaggggcaggaagaggaaagcgacaggccacagaattgggtgtggcaggggaaggaaagaggcagggcacggaattgggtgtggcagggcagaaaagaggcgtgacagcggcagggaaaggggcggggccgggaatggggtgtggcagggcagaaaagaggcgtgacagcggcagggaaaggggcggggccgggaatggggtgtggcagggcagaaaagaggcgtgacagcggcagggaaaggggcggggccgggaatggggtgtggcagggcagaaaagaggcgtgacagcggcagggaaaggggcggggccgggaatggggtgtggcag

SEQ ID NO: 97224 - DNA, 14424 bp, Homo sapiens
tgttcttccaagacccaaactttaacctcagtctctttgcattctcttcattactttctagcacatcactctgtattcttcactgccttattacaatcggaacttatatatttgtttacttgtttatttctgtctcctcaagaatacaagttccacaaaggtagagatcttgtccctctggctacctgttgactctcctgtgcctaatacagtgcctgattcatactactcaataaatacttatggaatgaatgaaacttgagttaactcctctgacaaccatatgcaaagtatctgagaaacgtgaaattactataaaagacttctgagcagcccaattagaggtaaaaacacaaaaactcatgcaccaagctcctttgggcttcatgcagagccagttcactctcattttatatacataattccaacaagcttgactatctggtttccttgtctatagctgatttaaaacagtaaatactatggaagaggagagatactgtcaaaattaactgttgacagcagtaggaaatgaaagagggaggacacagaaaaatatacatgaaacctcaaacccaggtattctgggaccatctaacttagagcaaacagccctacccctcaaggatattgttgtacaatgaagtgtttaaagatgataattactattatcataatcattagaatatgacggccaggcatggtggctcatgtctataatcctagcacctggggaggccgaagcaggaggatcacttgagcttaagagttcaagaccagcctgggcaacatagtgaggacttatctctacaaaaaataacaaaaatcagccaggcatggtggtgtgtgcccatagtcctagctacttgggaggctgaagtaagccaaagttgcacaactgcactccagcctgggcaacagagtgagaccctgctaaaaaaaaaaaaaaacaaaaaatagcacgtgattatcctaatcatcatcattattagcaagtgcctggtatatagatttcaatgaattatgtacaagatacattttagaaatttttccatcaaaaaagggtaaagttttagtttttagagggagctttggtcatatggaaaaatctgatattcattccccactgacagtggataattgtgcctttgctgtttttcttttcactaattctaaacttctttcaatttcctcatattctgagactaagtaattaaatacatgatcaagtctttgtgatttgatttacttatagcaggagttatggacttgggattcaggggcagatttcagcagttatgtgaacccccttaaagtattctatgtgtggccgggcttggtggctcatgcctgtaatcccatcactttgggaagccaaggcgggcggatcacctgaggtaaagagttcaagaccagcctgaccaacatggagaaaccccatctctattaaaaatacaaaattagttgggattggtggcgcatgcctgtaatcccagctactcgggagggtgaggcaggagaatcacttgaacccgggaggcggaggtttcggtgagccgagattgcgccattgcactccagcctgggccgcaagagcgaaactccgtctcaaaaaaaaaaaaaaaaaaaagtattctatgtgtttccatgataagtttacaattctatgcaaaattccacatttgagtgatctgcgatttttctagggagatggtctgtggctttcattagattattcaaagggaccccaataccaaggagattaagaatccctgactcacatcattatttcctcctggcattatctctccagactgaagaagcagcaccagctttgattttaaaattcaggctcttcacgcctgtaatcccagcactttgggaggccaaggtgggcggatcacctgaggtcaggagttcaagaccagcctggccaacatggtgaaacactgtctctactgaaaatacaaaaattagccaggcatggtggcgtgtgcctgtaatcccagctagttgggaggctgagacaggagaatcgttcaaacccaggagggggaggttgcagtgagcccagatcgcaccactgcactccggcctgggcaacaagagcaaaaccccatctcaaaataaataaataaataaagataaaattcaggttccttgggacagttacttaagtctctctgcccctctggttccatatatgaaaaatgaggacaccaaaactgctgggttgttaggttaaataagaaaacttacatgaaatcacctaagtgccctcgtagatcctcatatgttagctaccactaccattattataaagagacctaatcatatacaggtgactgctaataaaacctgtttcaagatttggtgatgaaaactgaaagtcaaacttcaagtcttgacacaacataggtttacacaatggaaagacaatgctatttagttcttaatccctactgctacgatcttttattagggtaatactttaaaggaataatggccagtttctctgagaagccttttcctcctgagtctttaaaagataaaagacctgtagctcaaatcctattcctacctcttactgattatgtgtccttaactaaatcatttctgtttgcttacttacataagggaggggctaataagacttccctcattgggttcttgggaacattaaatgagttgcagcatgtaaaatgttcgcagtgcctgacaagtagtagatactcagtaggtggtagctactatcatcattatcatcatcttattaggaagtgcctggtatatagtaaggtggttgtcaatcaatgctaatcttttcttccatcccatcccatctggccagccctgaactctttcttacctgaagcacgctatggttcatctggaactgcaggatggcctcgaagaggttccaaaatgtatactctggccacagaacgggttggaacaccaggcaggagtgagaggtctgggaaaggtagggaggagagtatgatttagtaacatgttgctgggccgcatccctggtcagtcctccagggaaaaagcaggctaagcaggacccagaagcccagagatgacaatgttacaggcatcctgagctgtagctgcagctgctgctggccctgattcattcactagtagggggaggcgtcacttgaggcagccagatcacctgcctgtggtaaagcagaactaaaacgagactagatcaacatttccaccaggatttttctaagagccaattttaggactatgaaataacatctggattatgttattggctcttggcccttagagggcatctggaagacatactgtctgataaaggtcaccaatgaacaaatggtagctgccattgttatttttaagtaccagcagcagggcacagtggttgagagcatgagctctggagccagactgcctggctttgaattttggctccaaccatttaccatttatttgagcaggggtaatttcacctggcctgagattcctcaaatgtaaaactggataataggaatacctaattttcagggtactgtttagattaaatgagataacatatgtatagcaaagagccaggtgtactttaataataatcactgatgaagaatcccctttggaacactcttgacagccactgcctgatatctctagtggtgaggaattcagtacctcatgggggataactagttgtccgaagcctgtttggctttttatgctaaaccaatgtcaccttccctacaacttctactaaggtcccaggtattttttctggaacaagtttgtttcttcttcaaagtgacattctttcaagtatttcaaggctagattagagctgcctgttatcagttcccaaagttgtaatgacttgttcagagtttgtctttgctagcaaactataagtttcaagacagtagggatcatttctgactcactcactgccatatttccagcataaagaaggaactcaacacttttttccaagggaatacattgtcacttatttcccttttgcagaccactatcctttcctcattttttgtaagacatgagattccttgctttccagtttggcctcttccagtaagtcctcaagtttgtcaatgtaactaattctgtacactgagtaactgactctgtagtctcttaaaattcagcccatcagtaaacttcccaaacgtgatctgagcagcacagtgggccacagaaccaataggtgcacattgtacttatttcttttcttttttttttttttttttttgcgacagagtctcactctgttgcccaggctggagtgcagtggcacgatctcgcctcactgcaacctctgcctcctaggttcaagtgattctcccacctcattcacctaagtagctgggactacaggcacctgccaccatgccaggctaatttctgtatttttagtagagacaggggttcaccatgttggctggactggtctcaaactcctgacctcaagtgatctgcctgcctcagcctcccaaagtgctaggattacaggcgtgagccaccacgccctgcgttagctcacttttaagattgtggtccattaaaatttctggagctttatcatgtgagctgcttccaaatggagtctctcccagaacaaggacttcccctagttatgtgctctccagggaccaagttaacaggggatagagacttgagtgtttgcatattgtttaccatgcttgcataggtatggccctttatcctgaaggggagggactagtaactgcaaggcaagcttccaacccagaggggctagggtccctggcaggttaccaaggcaagagcttacgctcagggatgcaagacagaagtcccattccttgaaaagcggcacaatgaagttttcactatagttggattcgcaaagccagcgacagatgaggaatggacatcaaatattatgagacacagcctagagatgcttctccagattttagctttccccagaagtactctggccccagcctgtttgggagtggggatggaccactctgatccattctgtggatacagttggtttccccatgacacaaacataatagtacttggaaatgacctacctgccatagcaagaagtcactcagccgcacttctccagaagtccgtatcaagatgtcaggatgaggagagcggttggtatagaggcacttatcaagcagagactcagagatatcactaagatgagcaagaagagacaaagagaggcacacatcctgtagtattctctttctgtagtgttctcatggtgaacttccatatataggcttctcagtttatacaataccatcaaatacactagccaatactacacagaaggccctcaaaaaatgtttgctaaattaatgaatgaatttaaatcttcacaactacataaggtatttctttttttttttttttttagagaatacaatgtaaaattcttttctcttttttattttttgccttttttgacatgttctgatacataaggtatttatttatttatttatttatttgagatagagtctcacactgttccccaggctggagtgcagtggcacgatctcggctcactgcaaactctgcctcccaggttcatgccattctgcctcagcctcccgagtagctgggactacaggtgcccgccaccacaccctgctaatttgtttttttttttttttgtatttttagtagagacagggtttcaccatgttagccaggatggactcgatctcctgacctcgtgatccgcccccccctcggcctctgaaagtgctgggattacaggcatgagccaccatgctcagcagatacataaggtatttctatcctcattttatagataaggaaactgaggctcaaagatgaataatttgctgaaagtcatttagcctcaggcctaaaaccagatgcacccacaaaaatatctgttgtcttttgctaaaaacgtcttgttttttaaaatacatacatacatcctatggcccagtatttgatgaaatactatgcaactgcattctaaaaataaagataaatctaaatgcactgatttggaaagatgtccaaaatctaatgttaaatgtaaaaggcaagtttcagagaatatatagtataaaacatacacacacattcaaacattcacacgtgcatataagtatacataaagaacaaagtctaaaaagatacatcatactattaacagtggattggataagaagtaaggaagaaaagactatttctttttactttatgtacttctgttattgtttgaatttatgtaaataactttttttggccaggcgtggtgactcatgcctgtaatcccagtactttgggaggctgaggcaggcagatcacctgcgatcaggagtttgagaccagcctggccaacaaggtgaaaccccatctctaccaaaagtacaaaaattagctgggtgtggtgccgcatgcctgtagtcccagctacttgggaggctgaagcaggagaatcgcttgaacccaggaggtggaggttacagtaagcccagattatgccactgaactccagcctgagtgacagagcgaggctctgtctcaaaacaaaaaaaaacagaaaacatattttattttttttccagacagggtctccctctgttgcccagactggagtgcagtggtgtgatctcagctcactgcaacctccaccttccatgctcaagcaatcctcctacctcagcttcccaagtagctaggaccacaggtgtgcaacaccatgctcagctaatttmtttttaaaaycttatttaagtcatatggaycctgaaacattgcaaaaattccacattacaccggattttaaataaacagcaatatgatcagttctcctgtgtttgataagagctactttcccaagcacagagatggtcagaaaggagatagaattgaagaaaactggtgagtggaagcatttatcttaagtaaaactatcctgtccacagaaagagggtatttgcatggctggtgtctgttggctccaagaatgctgtttacctgtcctaccaactacccagaagcagaattcagaatgtccaggtagttagagttacatcttggaaagggtccagaagacaaaaatttcttggtgggaacatgtttctggacgcatggtcaggaaagcagaaagatctgggctgagtgttcaaaaccagactctacacttactagttgtgtgtctttaggcaagttattcatcttttttttggagatggagtcttgcgctgtcacccaggctggagtgcagtggcgcaatcttggctcccgcaacctccacctctcgggttcaagtgattctcttgcctcagcctcccaagtagctgggactacaggcagccaccaccacacccggctaatttttgtactttgagtaaagacggggttttaccatgttggccaggctggtcttgaattcctgagctcaagtgatctgcctgcctcggcctcccaaagtgctgggattacaggtgtgagccactgcacccagccaagttgctcatctctctcagtcctttaaggcaaaccacagagagagctttcttttccgtatcatcatcacagaggaaacagtattcacttataattgagcaataagaagggctctggttcagatttctctggtaatctgacaatcttgtcttggcagcatggtcttaattctccaagttatgtgagactctgtacaatccatataatttctcattctcttatctttaaaatgggcccatttgctctttccctaagcggcctgaggtaatctgtgaaaatggttcactattcacttaacccggagaacctcatgatatcatgcaaatcaagaggttccaatcttcgtgtttactttaagaatattcgtgaaactgcccaggccatcaagggtatgcatataygaaaagccatgaagtacctgaaagatgtcactttacagaaacagtgcgtaccattccgacgttacaatggtggagctggcaggtgtgcccaggccaagcagtggggctggacacaaggtcagtggcccaaaaagagtgctgaatttttgctgcacatgcttaaaaatgcagagagtaatgctgaacttaagggtttaaatgtagattctctggtcattgagcatatccaagtgaacaaagcacctaagatgtgccgctggacctacagagctcatggttggattaacccatccatgagctctccctgccacattgagatgatccttactgaaaaggaacagattgttcctaaaccagaagaggaggttgcccagaagaaaatgatatcccaaagaaactgaagaaacaaaaacttatggcacaggagtaaattcagcattaaaataaatgtaattaaaagggaaaaaaaaaaacagggcccatttgtcctatccaccttataggttatcatgagggtcaaatcaaatgaaataatagatttgagtgcactttgggaactataaagtgctatataaagaataataataaaaaattattttcagtcccaccaacttgcagtgtgacttcagagactcagtctctctgagtttacaatttatctgcaaagagtttcttctacctactttaggcagtaggtatgcagtaagaattctgcagtgggcagaattcttaatggaaaaagctgatattgtgccagtgcattccagcctgagtgatacagcagactgtgtctcaaaaaaacaaaggggttggccaggcgccggtggctcacgcctgtaatcccagcactttgggaggccgaggcgggcagatcatgaggtcaggaggtcgagaccatcctggctaacacgatgaaaccctgtctctactaaaaatacaaaaaattagccgggcgtggtggtgggcgcctgtagtcccagctactcgggaggctgaggcaggagaatggcgtgaacccgggaggcggagcttgtagtgagccgagattgcaccactgcactccagcctgggtgacagagcaagactccatctcaaaaacaaaaaaaaaggggttaactctagggtggaaagatgaaactgacaaaatcaaaatggaacatctgtagactttggccaacaaaaatccatcactaaatggaatggtgagttaaagctgtctacgtgaagacttttcggaaatgatttacattaaataacggtaaaatatcagtttttacctatgagaataggtttatttttttgttttattttttgagacaggatctggctgttacccagactggagtgcagtgatgtgatcttggctcactgcagcctcagcctcctgggctcaagccatccttccacctcagcctcccaagtagctgtgactataggtgcatgccaccacactcaggtaatttttgtacttttagagacgagattttaccattttgcccaggctggtctcgaacttatgagctcaagcgatccaacctgcctcagccacctaaagtgctggattacaggtatgagccactgcacctggtcagaacagtttacatttaaaaaatcttggcaagaataaggtgaaatgagcactttcaaactcagatcctgaggaaacaataaaaaatgcaggcaagttcagtcaaagatttaattgtggcattatttgtaataatgaaatattaaactgcctatatacccaacaaatagaagactggttaaagaaattaacacaagatatattttacagccattataaataatgatatgaagaattattaaaaacacgggtcatgaaaagtactcgtaacattgaatgataaaagcatgattcagagtgtaaactattcattatgtgatttcatgtgttataaatatttatgtcaaaagtgagtgtgtgtgtgtgtgtgtgtgtgtgtgtgtttcagacagggtttcactctgttgttcaggctagagagcaatggcgcaaccatagctcattgcagcctcgacctgctaggctcaagtaatcctcctcactcagcctcccaagtagctacaggtgtgtgccagcacacccagctaactgttttatttttgtagagacagggtcttgccgtgttgccagggctggtctcaaactccagggctcaagcgattttcctgcctcagcctcccaaagtcctgggattacaggcataagtcaccatgtccatctaatttttttcttttttactgccttattgttcatttcagctttgctatgaggaagtcaatatgccacagtgaatgagaacacaggctctgaagccaggttgaaatcttggcccccaggtttgccaactatgtgaacttgcacaagttacttttcctctccatgtctcagtattctcatctttaaaatgggcataaaaacagtatctaccttatagggtctaaggataaatgtatgtggaatacttaatgcttggaacagagtaaatgctcagtaagtgttagcaattactattaacactattgttttataagaaagacagaggcctacagggaatcaagtagcccgttcaaggtaacacggtggaatagaatttattaactatcctttggtctcaatctacttccttcttctataatttccagactcacaaaacaatctattaatttaactgctaaaaaaatacatatatacctcggtcaggtgccgtggttcaaacctgtaatcccagcactttgggaggccaaggcaggaggatcacttgagcccaggagtttgagaccagcctggacaacatggcaagaccctgtctctacaaagtcaaaaaattagccagatgtggtagcagtatctgtggtcccagatactcaggaagctgaggtggaaggatctcttgagcccaggaggtctaggctgcagtgagccatgttcataccactgcacttcagcctcagcaacagagtgaaaccctgtctcaaaaacaaaacgaaacaggccaggtgctatggctcacacctataatcccaggactttgggaggccaaggtgggcagatcacttgaggtcaggagttcgagatcagcctggtcaacatggtgaaatcccatctctactaaatatacaaaaaatagccgggtgtgatcccagcactttgggaggccgaggcaggcagatcacgaggtcaggagatcgagaccatcctggctaacatggtgaaacccgtctctactaaaaatataaaaaaattagccaggcggggtggcaggcgcctgtagtcccagttactcaggaggctgaggcaggagaatggcgtgaacccgggaggcagaggttgtagtgagctgagattgtgccactgcactccagcctgggcgacagagcgagactctgtctcaaaaaaaaaaaaaaagaaaaaaaaatagccgggtgtggtggtgtgcacctataatcctggctactcaggaggctgaagcacgaaaactgcttgaacctataaggtggaggttgcagtgagttgagagcgtgccactgcacttcaccctgggcaacagagcaagactccatctcagaaaaacaaaaaaacaaaaatacacacacacacacacacacacacacacacacacacacacacacacatctacatacataccctggaagaaagaaaaatgaggagttggatggtgatagtgagaaatcaggaaaattccagctattagaagcataggacctaattgtaattaacgcactgactttgttataaatgcaggtttgtctaaattcgaataatataaagtgtaacgcctcaggccctgattagcccagtctgagcacaccaagcttcaggagttggtgggttgagacattggcctcctgaccctggtgatactgcccaacccacaccctgtctgcataactaaccccacagaggcaagttactaaaccatgcaggacagagaaggatatggaaaaacttgctggacaagaagcaggagataaggtagtggttactgtaatgtggtatgagggtaaagcatgctggactaggagtcaagatcagagtcctaggcataatgcatattagatctgcttgtcaaatggctttctttcattctagtgtcaacccttgtgccttaatatttatttcatacatacaagaatatttgaaacatattcattataaagcacaaaaatataatgaactacgaaagtacctccaaactaagaattttattgaaaacatgcttctatttctataccccttttctgtctcatcttcctgcctgctctctacctctgctaactccaccagtctcttaattgttttaacaacagctgattttcactctacatcttaattgacctctctacagcatttgacaccattgtttccatgggtgccctaccccttcccaacttgcaccaacaaactccctcttttcttggcttatgtaatgctggctgccctggttttcttcctgcttttctgtgtttttgcttataaagcttattctcctctacccagccagtaaagggtagagttcctcaaaaatgccatcttaggctctttcttcttctcactctacactccttaacaggcagggctgagtggctcacacctgtaatctcagcattttgggaggccagggcaagaagaccacttgaggccaggagttcaagaccatcctgggcaacaaagtcagaccctgtttttacaaaaaataaatataaaaagttagctgggtaggtggtgcacgtctgtagtactgggtacttgagaggctcctttgagaccaggagttccaagcttcagtgagctttgattgccccactgcactccagcccaggagacagtgtgagaccatctctaaatagataaatacacagatagacagacagactctccttagctttctcatcccctctttgctcaagttaacctatacacagatggcttccatactggcgacagagataaaccctgtctgaactgttgacctgacatctctgtctgactgttgacctgactataccaatccctcgctgaactgttgacctgacatctctgttcaacatgtacaggatatccaaaaccaaactgctgacccttttcaactggattttctctcagggttacctagcatggtgaagggcaccactatccactgtaacgtaagtctaaaaccgccgggcgcggtggctcacgcctgtaatcccagcactttgggaggccgaggtgggcggattacctgaggtggggagtttgagaccagcctggccaacatagtgaaaccccgtctctactaaaaatacaaaaattagctgggcatggtggcatgcccctgtaatcccagctactcaggaggctgaggcagaagaatcgcttgagcccaggaggcggaggttgcagtgagccgagattgtaccattgcattccagcctgggcaagagtgagactctgtctccaaaaaaagaattagctgagcatggtggcacacacctgtagtcccagctacttggaaggctgaagtgggaggactgcttgggcccgggaggcacagactacagtgggccgagatcacaccactgcacgccagcctgggcgatagagtgagtccctgtctcaaaataaaaataaaaatgggccaggagtgatggctcatgcctggaatctcagcactttgggaggctgaggcagacagatcacttgaggttgggagttcaagaccagcctcgccaacatggtgaaaccccgtctctactaaaaaatacaaaaaattagctgggcacggtggtgggcgcctgtaatcccagctacttgggaagctgaggtggaagaattgctggaacctgggaagcggaggttgcagtgagccaagatctcgccattgcactccagcctggagacagagcgagactccatctcaaaaaaataaataaaataaaaaataaaaataaataaataaaaataaaatatttgttgaatgaatgaactatgtgacagagaaatgtcacccagctgttaggaaggagaggcattcataaaatagcctcaaaaactgtctcctctcctttttatctaattctattctcaccaagtaactttttgatttttaatctagtttcctaggtcaatcgaatcgggaagggaaccagaaaaattcctgcttcccaagatcccacataatagaggtaaaggataagaaccctaaaatcaaacagctttagatatgagtcccagctctggcacttactagtagagtgaccctgggcaagtcacttcaatgctgaactcagttttctcatctacacaatggacaacagccttgaatctctcacacataaggttaatgacttaatgaaatacagaacacaacacatctcctgggttattttttgctactattattttactattgctgttagtttacaaatatattaaaagttacataaa

SEQ ID NO: 97225 - DNA, 42651 bp, Homo sapiens
aaataaagaaaggtaagaagaaagaaagaaaagaaacaaggaaaggaaagaagaaggaaaagaaaaaggaaaggaaaggggaaaaaggaaaggaaaggagaggagagggagaaggggagggggagggggaggggaagaagacagggggaggggacagagaggggggagagggaggggaggggaagggaggggaaacaggggcaagtgaccaaagagcgactgcagccagggcactttaggagtggtggcctggaagtccaggtgcgatggctcacgcctgtaatcccagcactttgggaggctgaggtgggcggatcacctgagctcaggagttcgagaccagcctgaccaacatggagaaaccccatctctatgaaaaatacaaaattagcaaggtgtggtggcgcatgcctgtaatcccagttactcgggaggctgaggcaggagaatcgcttgaaccccggaggcagatgttgcggtgacccgagatcgagccattgcactccagcctgggcaacaaaagcgaaactccatctcaaaaaacaaaacaaaacaaaaaaaagaatctagtgagaggaatctaacataactgactccatcctgtttctgacctcacagtctaaccacccttgctcattcctgtccataggctaagctaactatgagaggaatttactttatagtttaactctgaagcaaagatgataacagccgcttcccaaaactgaactccaccttgtttggggactaaaactgactttgtaaagttaataaaaggccacaaggtaacaactgagacagaggcctggactctgctaggatacaggtgtagtaaaatcatttgttttacttattttccttttcctttgtccttctcttcgtagatgcatgattgcctgcatatagtcagttcgatagaaggtggtcactaagaattgattgtctcaccccccgcacacctttctgtcaagctgtaggcataaaccataaccagtcattatctcttagcttgcttttctgctaagatgtagctatagttgaattataaccagtcattgtttcttagtttgctttttaaaatatagataacatcatcgttgtttttaacatagataacatcattattgtaaaacctgagtgtctgagatatttttcagaccttgcaatctggtagatcaatggatgccaaccagaccagtgacccatggcccccacccaggaactgactcggcaggtgaagacagtttcaacacccctatgatttcatccccaaccattctctagtccccctgcctgccaaactatcctttaaaaaccctggcttccaaattctgggggaggcagatttgagaactatcccacgcctcctcatttggctggccctgcgattgttaaaccctttctctgctgcaacacccgcagtctcagtgtattggcttttcctgggcagcaggcaagaagctgtccggctgtaacagagacgtctctctgagctgagatgtgaaggatgaagaaggaccacctagggaaacatattcaaggcaggagaaacagccagcacaaaggctccaatgtggaaataaaggtggtacactgaaaaccaaaagaaggccattcagttggggcagagtcaacaagtgggagaacagcaggtcacaaagtctatgtgaccacagattcccagctctccaaagaagacatcttccaaaaagcacccatgacatttccacagcacccagaaacaagaaccaccttgttattaaggaaggtgtgaaagccactctgggcttgtttttccatggctgaaatgaatgggttggaaccacatactctctggggtctattttttgcccacggaattcccattcaccctttaaggctaagctcaaataccaccctccccaaggcagccttccctgagcccttactccaagatccagcaacacatcccacgtacctcgactggcactcccacttttctgagtgctagtttttttggcttcccctgtgatgctggaagcactgcaagccaggctctgtctctcctttccacatcacccacactcaagctgtcccatttttattccgctttcaagggttcttagggtagagaaagactcacttaggtgttaacctgtctccagacacctgctaatgtgccctttcctagtgagggtgtgtccagagcccgggctctacactctgcatgcgaaggccctgaagaaaatataggagggtcagtgaggaaggagaaagaggtactacagggtgaacctcagaaatacaatctgaatttcatggctacccaaggccaacagaagtccccaggaatgactttggcctctctgtgcagctgcatcttagcagggggtaggaaaataccatcttcttccttccctcactgtgtggccttagacatgtgacttcacctctcggagccttggttactccatctcaccaaggaagataataatgctgccctcacagggcttgtctgaggattactggtgatcaaagggcctggcacacacacgcacttgataaaaggcagccggtattattactgcttttgtgttgtcaaatgtcccagtgctctgctcccaagcctgtgtgggctccccagcagagacagagagcagtgaaaacagaaacacattttcaaaaggattctgattcaggagatggtaggatattagcaataagggtggggacttggagagaactgaggcccagacaggggcagcgcacttatccaaggtcacacagcaagcagcaagatgaaatcaccggaggcagggccttgactctcagggtccacctttcctttaggaaagaacaggtggagggagtggtgatgctgggcagtagggaggagctccccaaagcagctgcgctaccttgttgccgagaatggggacatagccgtcagtgatgctccacttcttgaggttgacaggtcggcggctacggccccgcagggagccgtaatggaagacctcattggcactgttggagctgtagaggatgaggatggtgatgagggcaaagaggatcacgaacactgctgaccgctgctcctggagagaggagaggtcagtgagggcccagctgccgggcaggctcagcgccccacctccttgccacctaccatgcctggttaactcctgctttttgttgcagaccaggtcaggcactacttcctccaggaaggcctccttcagccacctcagtccccccatcacaacactgatcatactgcattcaaactcccatccctccaattagaccgtgagctctgggactaggtcagccttgctccccactgtatcctagatcccagggcagggcctggaacatggaaggttctccgggagggtttgctggactggattgaatatgtcaggattccctatagctgctgctaagaggatgtctagagacaggtgggacatctgagtgagagggtctaggtcttcccccaacagtaactctccaatgtattgcctctagctccaaatttatcctttttgtctgctctgtggaaatggatctgggccctttaaatattttcccttgtcagttagctgcatattaaactttgtgagtagagggtgctggacagacactgcaggaggaaaagcatttgcttcttggttctggtaggcttgctagggaggctccttcagtgcacacggcctctccagtaagggcatcttacccactgcccagaggccagcagtgccagcaagtcaggcttattgcttctggctcccgctgtgatcacagcttctccgaagtccagctcctacagtacactcaaccacctgcagcacctggaggctggcggcttcccctccccaggccagttctgtactggagccatccagtgggccatagctgggccttcttcagcaaggcccagatctcagcctttatgggggcaggggtgctccttatattaatatctgctattcctgtattcctcagaattccaatcccttgttactctagtgtcctattatagtcaataattttttgcattaaacttttccgtttaatcactgtgtagtttctttttcctgattaaactcaaattaatacaaccaccccatcccacttccaaacctcaggctccaccaaggctgcagtggatcctagggaaggggcatgcagggccagtcatgtagtaagtgcttaggaaagaatgaatgaatgaaagaatgatggggaatcctgacattctcagggtcatgctcgggctgtatcacctttgactctgatcagtgcacccttgccccatttcccgctcacctccacctgcccacccctctctcctgcacagcactccacagtcacctcggctagtccttgaccatcacagacagaccgtcaggcctgggaaggcagagctgaccctgggcccgggaacaggcaggagcttgccctaagccactcagaagatcagtggccaaaccagggcttaaatctgggcctcccaggcatgggcagcttcttgcggggaagaagagactcgtggtggctggggtctgagacaggtccaaaggaacccgttccatggagggaagtgagaggctcaatggggttaagaaatgaaggcagacttactttgttgctactcatttctctccggcgtctgctgaggggtaggtgtcggcgtcctgcaggtggccctgggggcagggatgtgggttcacacctgcaagccaccagaaagggttattatggcttcggtcctttgggtccagcaagccaaaggctacaccttctctgccccgcactagttcttctatgcacccagaactttaaggctcaggactgtatcccttttgcagacggagacactgagggccagaaaggccaggaatctgcctgaggtcacacagcctggtggcggcagagccctgcccattctcctccctaagcaggggccttcccacaccaaggcagctggcagggccaaagctggctcccctgctggaggacctgacctccacgcagtaggagccccattcacaccctgctctaaaccctgccttgggtccctgtggtgtcagaataaaacaacaccgcttgtaggcccccgaactcctctgctctggctctctctcaggttggcctggaacgccctccctcctatggcctcctgactcccactcatcctccaagcctggcatggaccaggaactcccctacgtcctcccatccccccaggctaagagctgcctgcgggatacagcccacccaggtcctcactcagtttccctgtgcctccacagccacggagattcaggaatatcgctgaatgaattagtgcattaacaagcaggatctctcgggggctaagggcacagactcaagtctgagaggctcggttctagtccaggctcgacagtctctgccagggctgactcctcatctgtcaaatggctgtaatcacagtctcagggggtggctgggggggcctttggaagacctggcagtgaggaggccagcccagctctgctccgcacaccccaatctcttcctctcccacaaccaaaacccagctcctttccagggttccccacctgtgaaagggaaaatgtactgtgtccagcctacctccagcagacaggccgggggcagggcgggcaggagtgcagagggaagaaactggggcttagggggccctcctcagctccgtcccctgctccaggggcctctcagttcctgtattctctgagccctttgacctagccgctgtttactcctacacggccaccaggaatagccagagaacctcgggccagaggaggcttggcacacacacctcgctcctgattggttagatcatggccccgccccctctccaaccccgccccctccccgtgggagcgcccctcatccggagctcggcttcgggtttctccagcggctgcccctcactgccagtcagggaggcccagactcctatctagtccaggccctgcggtacagagcagaaaacggggcctcatcagaagcagggagcggcttgttcttgccctcacagaccgttagagcaaaagacaggagtccagaatcctggggtggccccatctgccctgagaccttggcattcaaggcgcccaggggtccagccgcctatatcttactacgcgtggccaccctttcctgcggatgycccctgcccrccgcccactttcccacctttgcccgagctgtgccctcagccaggaccaccgtccccctsgtccgccccgtcacaatcctgctctgagaaggccatggtcagtacagcatgtcagctgccagtgcgaatcccggtttcaccactyactggctggggggcctcgagcaagccatgtgacctctctgagcctcagtttcctcatctgtgaaatgggaacaataagagtcggtaactcaaggggttgttggaaggattcaagcagatgtggcaagggacacgcggggcttgaaagtgctcccacattggccgggcgcggtggctcacgtctgtaatcccagccctttgggaggccgaggtgggcagatcactaggtgaagagatccagaccagcctggccaatatggtgaaaccccgtctctactaaaaatacaaaaattagctgggcgtggtggcgtgcgcctgttgtcccagctactccggaggctgaggcaggagaatcgcttgaacccgggaggcggaggttgcagtgaaccgagatggtgccactgcactccagcctggcracagagcgagactccgtctcaaaaacaaaaacaaaaataaataaataaaataaaataaaakaaagaaagaaagaaaagaaagtgctcccacaatgccaacagctgttagtcttgtggttaatcactgttcaaggcccgcctctccagtgtgtcagtgaarcactcctcccctgaccccagtgcagcgactttcccggaatatcaaggaatgtgtgggaatgcgttctaagcatcacccacgcactgaatccaggcaatgcatggtaggagctcttgttgcccattttacagataaggaractgaggttcagagaggcaaagcgccttgcggggccgcccagagccggctccagagccttgtttacagggagctgcccagggctgagcctgacttcgtctccctggaggatccctctcggctggaacgggtcagaggccatggagtgtgtgcccaggacgtggctcggcacmggcaccagggcgggggtctaggggtgccggcctgttggggagcggcttgctcacgctggggaggcggcagccccgagcgctgggccaggagcatggactcagcccaaggctggacgtgcaggcgagctgagcgggagccgagggtgggggccacaccctgccctctgtttgggggctttccttcttccagccccgggagtcctcccgcagatcgggacgcccccacgaacccgcgtgggaggagggctccagggagaagggggaggggggctcctaaatccaagacgatgcgggacgctgagcccgtgcgtccacctggtggggggctcacccagcgcgcgcctcgcctcatccccctccccaactcctgcactccgggggtccggagccctaaccccagctgggaagaaaagagaggcaggaccgctgacggggtagtcggcggcaagaggcccagcggaccccgcgacagaccctgggcgcgaggaccggaacctcggggcgcggctaccaagggggaaggggtctaggggtgccgccgggggacccgcatccatccccatccccggcgattagcaatctcctctcccggcgccctccgccccagcccccgcctccgcccccgcccccgcggcctgctcccgcgcggcgcctgctcacctccggcggggagcgcccggccccccgcggcccccgagccccctcacatggcgccgggagccgagcgccggggtccgcgctcctcaggccgcccaggcctcgccgcacccgcggcccgccgggtcctagcgccgccgtcacggcccggcccaggcctgggaggtgggcggagcctcggggccgcgggtggctccgcccacgggcggcgcgggcggggaagggaaaggggaggcggacccgggtgccgccgcctggtgagcgcctcggtcaccccactgggcagcccggggtgaccaccaaaatacaacagcctttcggctccctgcagtgtggatcgggcccacttctagctctctttattgccaccatgaccccggatggggaaactgagttccggagcacgctgtgcttgcactcagtggagtttctacctgggctccccacagagggcctccagctccctgccttgcaccctgtagtcacctgggcaaacttagggttcaccctcagattcaagttaacctctgccattcgccagctgcgcagccttagcgcataacttcccttctccctgcctctggaaaatagggagaagaataacttcacagagctgggaaaacttaagatgttccttcttgtaattaccagggcatccatgacatcactctacgtgatagggaaaaataacttaagtagccattgctaggggactgcttaagttaaggcacagcctgccgaagtgcacgaggaggctgttaaaatgaaggatgcgggccaggcgcggtggttcgctcacgcctgtaatctcaacactttgggaggtcgaggcaggtgcatcacctgaggtcaggagtttgagaccagccaggccaacatggagaaaccccgtctctactaaagatacaaaattagcctggcgtggtggcacatgcctgtaatcccagctactcgggaggctgaggcaggagaatcgcttgaacctgggaggcagaggttgcggtgagcygagatcacgccattgcactccagcctgggcaacaagagcgaaactccgtctcaaaaaaaaaaaaaaaaaaaaaaaaaaagaaggatgcaggtcagtatgtcttggcaggaaaggatggccaggatatttataggatatttacgtgaagaaagcaagttaaagaactgccagccaggcccagtggctgtaatcccagcactttgggaggctgaggtgggtggatcaccagaggtcaggagttagagaccagcctggtccacatggtgaaaccccctcccccaaccccccaccccaccccgcctccagtctctactaaaaatacacaaattagcgaggcgttgtggcgggcacatgtaatcccagctacttgggaggctgaggcaggagaatcacttgaacccaggaggcagagattgcagtgagccgagatcatgccattgcactccagcctccagcctgggcaacaagggctaaactccctatcaaaaaaaaaaaaaaaaaaaaaaaaaaaaactgtcttggaaacaaagttgtaaacatttgcattccacagctgagtacacatgccctggagaaattcttgcagatgtgcccaaggaggttcatagcagcatcgctatggggaaaaaccccaaatatccatcaacaagagaatggaattgttttatacaatggaaggttcacactgtggaataatatgtaacagggtaaaatcaatgatctacaattacatggatgaatcttagagacacaaggagtgaaaaagaggtmttggaagataagtaaaaactacacaataggggccgggcgcggtggctcatgcctgtaatcccagcactttgggaggggaggcaggcggatcacttgaggtcaggagttcgagaccagcctggctaacatggtgaaaccccgtctctactaaaaatacaaataaattagccaggcgtggtggcacatgcttacttggaacacgctacttaatcccagctacttggaaagctaaggcaggagaatcgcttgaacctgagaggcgggaggcagaggttgcagtgagcccagatcgtgccactgcactccagcctgggcgacagagagagactccgtctcaaaaaaataaaataaaataaaataaaataaaaatagaccgggtgcggtggctcagccctgtaatcccagcactttgggaggccaaggcaggcggatcacctgaggtcaggagtttgagacaagccagaccaacatggtgaagcccagtctctactaaaaaaatacaaaattagccaggtgtggtggtgcatgcctgtagtcctagctaccctggaggttgaggcaggagaatcgctggaccctaggatgtgsaggttgcagtgaccgagatcgtgccgctgcactccagcctggtgacagtgcgagactccatctcaaaaataaataaataaaaataaaagcaaaagtcaagaacaatgggggaggaatcaaagaggtatgcaagttacagtaactggtctttaagtggggactgagttcaagaggttcatgatatttttatgctttatcactttcaaatatgacaccatatcacaatattttaaaagatgcaaaaaaataaataaggaaatgccttttgcctatcacggtgattagtgtttttggttttttgttttttattgagataaagtctcgctctgtcacccaggctggagtgcaacggttcaatctcagctcactgcaagctccgcctcctgggttcaagtgattctcctgcctcagcctgccgagtagctgggactacaggcgcgggccaccacgcccagctaatttttttgtatttttagtagagatggggttttgccatgctggccaggctggtctcgaactctcgacctaggtgatccgcctgcttcagccttccaaagtgctgggattacaggtgtgaggmactgtgcctggccagtgtttagtgttaatagtggttatttctggaatgatgggatctggggctgctttttttcttttggtttaactgtatttttccaaaaattttaagataatggtcacattattattattattattattattattttgagacagactttcactgtgttgcccaggctggagtgcaatggcgcgatctcggctcactgcaacctctgcctcctgggttcaagtgattctcctgcttcagcctcctgagtagctgggactacaggcgtgtgctaccacgctcggctaattttgtatttttagtagaaacgaggtttcaccatgttggtcaggctggtctcaaactcctgacctcaaatgatccaccccccttggcctcccaaagtgctaggattacaggcatgagtcaccgcacccagcccacacaatttttatatatatttaaatatttttatatatttaaaaatgtatttttttaatttctaaaaacaaactgcaatatatagcataattttttgcttgcttttttttttttttttttttttggagatggagtcttactctgttgcccaggctggagtgcagtggcacgatctcggctcactgcaagctctgcctcccgggttcacgccattcttccgcctcagcctcccgagtagctgggactacaggtgcctgccaccatgcccggctaattttttgtatttttagtagagatggggtttcactgtgttagccaggatggtctccatctcctgaccttgtgatccgcccgcctcggcctcctaaagtgctgggattacaggcatcagccaccgcacccggcctttgcttgccttttaaaaatacataactatgcataatatttgtaaatgcacacataaagtgtctggaaggacccacaaggactaccagcagttgattccctgttaaagtgaaggtggggcaggacggttgggtgctaccttcacttttccctttataaacttctaggttgtttgcactgtacttatatgggaagttaataccagtttgtttccaattaaaacaaaagtcagcagtagtcccccagggtccagcctttaggccataaaggcactgcccaccaggcagggagggggtggcccgcaagggtggattggaggcttcctgtccctggtgcccacctccatccgcttcctgagcctcagaccaagctccacccatggccctcctaggtcgccgaccccgccctacaagtgacaggatggaaaaccatggagtgggggcagggcggtcagacaggcaggaggcctgatgaacttgacttctgaggactcagagcctctagcccaaggccacccagggcgctgggggctgcaccagggagggaaacatcctgtccccagcccttctcactaacccaggccagtgacccgaatcaaacacccagaagtgagagggtgctttggccctgctcctggacagcatctgggcctggagctgcctgtcccgcctgccatgtctctgggcccaggctcactccagcaggatttgcttcagggctggcttcccttcttgggccccaagaacgacagcaaccatctcaayaacagtaataacaaggatgagaaacagagcagcttactctctgccaggcactttgcaaacacacctcattgaatccttatggtggcctatgagttgggtactgcggttaacccactttccagaggaagaaactgaggctcagagaacacgcaggtggcagggttgtttccactaggcctgtctgtttaataaccacagacatattctacacggaagccttgggtctgtgagagccaggccaggccacaccaggacgttcctgcatggtggctgtggccagtcctcgtgggcctcccccccccagcccttcccccacagtctgggagagctggcctctgctttgacccttcctgcctcctacacgggtaggagaggcccgtgtatcccctgcttcctgacccttagcaaacttctttgagccgttaggatttttcccttccatggtattctggaaagagctctaagagacccctcacctgccgcagctcccaattcaaagaaaccaagatcaagggtcggagggagaatagaacttgcccaagactccgcagcgggtcgtgggcagagccaggctgcaagccaggcctggggactccggcctctctccctctaggcttttgtctgggggaggggcttctggagaggagaggcctgtgagagtggcgggcaggtgggggcctgcacacaggggctgctccatagcccaagacctgggctcccggccagagggtctggaacgaggaagtactgcctcttcccccacagaggctggagagggcagacgggcctagatgagcctagacgctgggtcccaccagtcccccaaagccagatgttcctgttctcacctgggtgtgtgagattttttgtttcattttgttccttacaaggtgaagctgtgtgaaccgtgagcgtgagctctgggccaggctccatggcccttctaaggaaaaggccccttaggacacctctgggctgtgaggcttccccggcttcccctctgggcttggaggaagtagggtaggtcctcagccactctgctgaggggcaaaggaaccagggtatgaacaggaaaacagaggcccaaagagtggctgcagattcaggtgatccctggggctgtggggaggctcctgccctgggctcacctcaaggaagctgcaggaactgctgtggcaaaagcagagagtcttcagtttcctgatcaagacagccttcagtagaccccgaaccagccaccagacctgtcaaggatcatctccatctgcctggaggaagtgactgacgcatcactcctgccaggtcaccacccccagaaagacacaccatttgggccaacccagcagtaaataccccacccgagggtagggccaggttagaggagcctctgtgtcctgggcccaagggctgggtcagccttttcccaggggatagagaaggaagaggaggcagcctcccaggagagagtggagttcaaatcccatcagaaccagtggacactgggccttggacacccaggatgaggcagggagtagggagacaaccaatggggcaggggcttcctgccatctgtcaccaccaaggaagggcagggccagcccagggcagatgaaccccacgaaaaatgctggctccacatgtcaagtgcctgctatgtcctaagccayggggatagtccactgtctgaatctgtgaggtggggacaattttaaccttttacaaatgacaaaacaggcccagagaggggtactaatctgccaagaccactacagcagaaagtggggccagaaagaagtcaggccttgactccagggccctccctctgagcccggaaaccccctccacctccgcctaccagactccatcccgcccttacctctgcctgacacctgttgagagctcctcgctccgtgctgtggctccgctgccagcctgctcctwgcttcgccagctcagggctctcctcccccctcccattcctgcagaaacttctgggtccacctggcactgggcaggaggaagccgggcacaaaagcggtgctgtgaaccaagtgccaggtctcagccccctctgtgaaagccaagggcgggagggagagtatgccgggtcacccagagcccccgggactactggctacataatttctgggatccagtgcaaaatgaaaatgcaagtcctcttgcaaaaaaaaaacaaaaaacaaaacaaacaaacaaaaaaccctaagaatttaaagttggcaacagcagagcattagcatagggccctgatccctggagctggcagctagaaccccagggctgcatcccagctgacagcccgaggccctggcccagtcctctgagtcttcccgtccccagatgaagtagtgatgcctggaaggggtgatgcttgtgggctctctccagcccaggggtgcagggctcaggtcctcgggctcagctctcagacctggtattgcacactggcccagccgctccacagttgtccggcttcagctgagtggcctcagctcatctgtaaaaccagctagcaccagtcctcctctgaggatggcaaggttccgctggtgggactttttttctcactttacagatgacgaaagtaaggcctgagccrgactagactccctcacagcagccacccagggctgccctctgccttcctgttttgcagggagaccaaacccactttctttctttctttttttttttttttgagatggagtctcactctgtcgcccaggctggagtgcagtggcatgatctcagctcacagcaacctccgcctcccgggttcaagcaattctcctgcctcagcctactgagtagctgggactacaggcacccaccgccacatcctactaattttttgtatttttagtagagatgggatttcaccctgttggccacactggtgtcagacttctgaccccaagtgatctgcccacctcggcctcccaaagtgctgggattataggagtgagccaccgcgcctggcccacttttttttttttttgtagagactggttttgtcacgttgctcagactggtctcaaattcctggtctcaagcaacactcccgccttagcccccactgtgccaggcccaaccccagatttaatggctaatttaacttgccatttgacccaggaccagggaagcaatatgggtggagaaatttccctcccactcagagtcgcttcctcctggccctggctctcctctcactgggtacagaacggggttcccaaagaagcctccgacttagggtcagtttcctgggccagagcagtgaagggaccagccccccagaggagccctgacctgctggggaaggggctgggctggggccaccagcaggaggttgttggggaagaaattgaagcccagccaatgtgggcccaggtaggggcctcagggattccagtcaacagcttctgggacagccgggcgcggtggatcacggctgtaatcccagcactttgggaggccgaggcgggtggatcgcctgaggtcaggagttcgagagcagcctggccaacatgatgaaaccccgtctctactaaaaatacaaaaaattagctgggcgtggtggcacgcgcctgtaataccagctacttgggaagccaaggcaggacaattgcttgaacccgggaggcggaggttgcagtgagccgagatggcaccactgcactcccagcctgggcaataagagcaaaactccgtctcaaaaaaaaaaaaaagcttctgggaccgtgacagggaaagaaaccctcatctccacccctaaacacatcagacacatgaccacgctagagacagcatccagaaaacacacgtttacccgtacgttcctgatacggccccggcagtcacaactccaaggccccttcaccaatgaaccccaggctctcggctgccccaaccagggcggccagcctgagaagtgtggcaccaaaaggtggtaggrgyggctggggagggaggaccaggactggcacaaggtcatgatgctggtgagttgggggccatcagccccagggacaaaggccacttgacagacctggaggtggggtgagcccccaaatgccrtgaattactcagggagtggaggggggagacacggctcccccctccactccccttcaagtcatgaggcctgagatggctccaagtgtcgccagaatggggygggaaggaaccttaggtccacccagcacgtggcaggaggcaggawccataaattaaatgtttttgtggagtgtgatggcttgggatgggacatcccggaggcctcgcaacggcatggcgrctggcaggaygacggaagctactcagtcctccaggacggatgggcgaacacgatgggcctcttcttggcccagcgggagaagaccgccttctcagtgatgaagcggtgggcgcttcggggcgcctgctcrtgtgccaggtacatctgacactcatctagccggcccttctcaaagtagtggtaaggcactgaggggtggctcttctccctgcggggtggggaacagggctggggtgggacagaacccactagcctccggccacaccctgccgcctaccttgaccacccctcgccaggcccatgggctcgtgaagacccacgcctgatccctggggaggccaagacacataggggagtagcagatcccgagagccagggttcgagtcctggctctgcctcttgcaagctggatgactctgggccagagatggacgctgtgagcctcaagagcccgtgtgtwaaacgcagacggtcacatccgccttccagaacaagtgcgtagatcaagagatggagactgcagggaccctgctagtggtcctgggctcctggtgagggaggagcccctcattcccatgtcacagagccaccagccctgcacgcccacctccccatcagcatcacgggggccagccgtatggccagggccatggctggggcacagggacacctgtcacctcggtgacctgttgtgaactcgttagtttccataatattgaaatataataatataggctggtgcggtgctcacacctgtaatccctgatccctggggaggccaaggcgggaggatcacctgaggtcaggagttccagaccagcctggccaacatgatgaaaccccgtctctactaaaactacaaaaaattagctgggcgtggtggcacgtgcctgtaatcccagcgactagggaggctgaggcaggrgaatcgcttgaacccgggaggtggaggttgcrgtgagccragrtcgcgccactgcactccagcctgggcaacaagagcaaaactccatctcaaaaaaaaaaaaagaaatataataatataacaatggtacaaaatcataccataaacatatctgaacttgatatcatgctggtattataatatcaaatattatataatatcaaaaatcacatataatatcaaaaattaaaacttatataaaacatatcactgtatatatatatatatatatatttaggccctatatatataggccctgactgtggtaagcacttttgtagattattccctccctaaatgtttcaacaaccttccaagtaagatgtggttcttttctctattttccacataaggaaacagagggtctgcggggtggcatgactggcccgtgaacagcctgtgaccacaacagccacactggggttggtaaggcagcctgtttgacactgagctctttcccaaggcccagagcgcaaggggtatctgtgctgtggtcacccaccatgaagcccacactccctctgcccccacagctcccaaatcctctggtttaaggcctaggagggctcacagtcctccccgcgtccccgcgtgcccggcctggcyggtctgacctgcagtagctgtcgctgaccatcccatagaccacgatctcctcacacagctccagcgcgaggatcatggtgaaccagccggtgctgaggaaggagcccgactgcctcctgggggtggcggggggacagggggacgctgtcaacaagaggccatgtggtagctccaggccccagcagcacttggtactttgccagcccggggctatgcacctcaacctcttgcggggggctctgggggaggctggggaggggacagagccagcccaaggccagcagtgggtgacaggcagagcggcacacaaacccaggcctgatcacctcctcagcacccagcggggctcgggcccagctacgctttgcagggtttgagcaaacccctggatgatgggtgtgggggctctggccacgtcctctcctcatctaagggaccaggcctggggagacagcatgaggcagcagggcaccgtggtttgaagtcaggtgggggttctctagagtccaaggatcttccacttgaaccctggctctgctatgggcatcacatttgctcgtgaacctctctgagcctcatgaccagtctgtgaagtggagataattttagggggttatagggagggaacactgtcagcccagcccctgcccgcatgcccccatgccccactcagagcaaggggctaggtggtggccccagcctcagctccctggaggcagcagccctgggtactcttgcagccaagggccacccctctcaacctctacagagcgggtatgaactggttcattcattcaaactgagccccacccaggccctgtgctggcccagaacctacctcatctggtgctaacattccacggaagcaccagatgggaagggaaggagaaaaatagataaacaagtagctaggagacaaatctctaagcaagatgatggcagagggtgacacctgctgccaagacaaggaaacaaaggaatggataaagaatgccagggcgggaggcactccttctgatggggtggtcagggcgggcttccctgaggaggtgacctgagtaacaagaggagcctgtcatgggaagatctgggagaagaacattccagggagagggaacagcaggtgcaaagtcctgcaggtagaaataggcatggatgtctgagccccagacggccagtatgggtagaacagggagaytgaaggagacacaaagtcacagaggcaggcagaggcaggatcacgcagggcaggcaggccaggagtggtgggggcgggaagcctaagtcaaggtggcagccatgggccattgtacgtggcagatgatgatacgagaggaatcagaggcacagcccaattttctgggggatacaccagaggctgactgttctatctcctgagcacagaggccagtggagagcaggtgtgtggaggaggggctggcaagagtcatgagtgtgcttttggatatgacataaaatgaaaccttgaatgcggagtgcttcacccaatgcctggtgagcaaagagggctgttattgctctgttttgttttgctttttgagacagagtctcgctctgtcacccaggctggagtgcagtggtgcgatcttggctcactgcaacctctgcctccaggttcaaacgattctcctgcctcagctactctcctgagtagctagaattacaggcatgcgccaccacacccggctaatttttgtatttttagtacagatggggtttcaccatgttggccagggtggtcttgatctcttgacctcgtgatccttccaccttggcctcccaaagtgctcggattacaggcgtgagccaccgggcctagccctaatttttgtatttttggtagagcccarggtttcaccatgtcagccaggctggcctcaaactcctgacctcaagtgatcctcccgccttggcctcccaaaatgctgggattacaggcgtgagccaccgcacccggcctctaacttttattatccagaagggatatcagagaccaagttagacagaccattccctccagagagaagtgctccctcatgcccctacacactggctagtgcttcccatcaggtgctcaaaaggcctgacagccctcaacaccatctgggattctagatctgtgtgacagtttcctgagtgacatcccctctgcctcctgccccccattagagggcaggaccatgtctgcctccatgagtgctgacctcccgggcctgacagagcagcccctgatggacaagagactcccagagaaggaaggccccagctgccagagagaccccagcaggcaggccccaggctcaccggttcttgcccgtctcgtcctggaagatctggtcgcagtaggccatcatgcgctccgtgaaggtgtacacctgcaggccggggtacatcctggtgagctgcagcagcgtgcggtaggtgcggccgccgagcacccggtccatgtgcctgccctggccccacaccatgtagagcgtgtctcgggccttctggaagtagtgtgaatagttscgcagcagcagcggcacgcttgtgtgtgagacgacacgcagggtgctgcgctggcccacatccgcctcaaagcccacggtgggcgcctggttcatgcggaacacgcactcggcactgtcgatctcagcacccaggcctgagcccagcatttggccrgagctggacaccacggcacagctgcggcagggctcgcggaccagcggctgcagggcaggcagggagaaagagacagagaggcatgaacacgcagcttacaccccctgcagctccccctggaatatccaccaatcttgcttgatcaggtatcggcttgaaggactgttatgaacccattttgcaggctgggcagcagggatgactttcccgagatcacagtgatacccagtgtcagagctaaggttctgcactcagcccccacttcctcatcagccatatttgtggtccttattcctgttgctgcctctgaggccctgtctctacgtaatgagtccttatgaggtttgcttgagcaaatagttataaaacacttagaacagtggctggcgcagactggaggtcatataagtatttgtcaagtaaacatgaacctcagctcttcagaatcattcttaggccactccctcccctgcacatgcctcacccacactgtgcccagtttctaagtaagagcagggtcatcagcgcccaggacagctgtgggactccctggtcctgagcctgaatcctggctctgccctctcctagctatgtggcctgaagccaagtcaccggcctctgtgcgcctcaagtctctcatctataaaatggggaagaaaacaacatctgggccgggagcggtggctcacgcctgtaatcccagcactttgggaggccaaggtgggtgaatcacctgaggtcaggagttcgagaccagcctggtcaacatggcaaaaccccatctctactaaaaacacaaaaattagctgggcgtggtagcacacgcctgtaatcccagctactcaggagactgaggcagaagaatcccttgaacctgggaggcggaggttgcagtgagccgagattgcgccactgtactccagcctgttgacagagtgagctcttgtctaaaataaataaacaaataaaaatataaatacaaaaaaaagaaaaagaaaaagaaaacaacatctggccgggcacggtggctcacacctgtaatcccagcactctgggaggccaaggtgggtggatcacttgagatcaggagttcaagacctgcctagccaatatggtgaaaccccatctctaaaaattaaccaggtgtggtggcatgagcctgtagtcccagggcagggctagggcaggcacatggacggggtgctcggcggccacacctactgcacactgctgcagctcaccaggatgtaccccggcctgcaggtgtacaccttcaccgagcgcatgatggcctactgtgaccagatcttccaggacgagacaggcaagaaccggtggcgggaggctgaagcatgagaatcacttgaatccggcaggtggaggttgcagtgagctgagatcgcactactgcactccagcctgggtgacaaagctagactctctctctctcaaacaaacaaacaaaaaaaaacatttcttgggcgggcgtggtggctcatgcctgtaatcccagcactttgaaaggccaaggcaggcagatcacctgaggttgggagttcgagaccagcctgaccaacatggagaaaccccatccctactaaaaatacaaaattagccaggtgtggtggtacatgcctataatcccagctactcgggagggtgaggcaggagaatcgcttgaacctgggaggcagaggttgcgtgagctgagatcatgccattgcactccagcctgggcaacaagagcaaaactccatctcaaaaaaaaaaaaaaaaaatctctttttagaatctagggctcagagccgagatcgcgccactgcactctagcctgggagaaacagaaagactccgtctcaaaaaaaaaaaaaaaaaaaaaaaaaaaaaagaacctagggctcagagaggtgatgtgattggccaggatcacatggctggtgagtagaggggccaagctcaaggtccggtttgggacaagcccagctctcactacccaccccggatgcattgcctggcccactcaccttcccatctggcacactgctatatccactgaagtgcaggggtcccggcacagtgggcctggagcctgtggggaagtggtggtccaggcaggtggccaggcagaggggcaggccggcccagcagcacaggaggatgtagacggcagagaagaccacggagcacaggatgatgagcacgagccgaccctgagggagacagtggccatgggggggtgtatgtggggaggggctcccagaagccccttcagcgctgcacctggcctcctgggtctagagaagctcctgggtctagagcagctcctagaacagcagcagaatccagtctccatccactgggccttacctggggatgccaagctctgggcacataaggccccggagataacactgttatcatccccacattctagataaggaaagcagtttggagtgaagtgtgtagtacaaggccatacagcaaagaagcagcacagtggggccttaaatactggctggaaagcccatattcctaactggaggctagggtgtactgtgcgacctatggctctccatccctctgggcctgtttcctcctctacaaactggggactgataatgcccaccgtgtgaacttacgggaggggggcagtgaaagccttctgtatactgtaaagtgctgtgcacatgacaacgggaaagtggtgcctcagaagggccaccagccccttcagcctaggaccagggctgcctagtgtggccccgcctcctccccacccccagctgactcagtggctgtcccctggtgatccggatctgggtcagcaggccaggtggcacaaggagattggagcaaaggtcactcaagaaatggttttaataattgaaaagctggtgcctggaggctaccgcctccagaaaccatgtgccaaaggccattggaaccaggaagctcttctagccatctggcctagacccagcctggggctggtcctgctggcagacttagtgaatgcccctaccaccaccaagcctcccaggaggggaagggcttggtggcagcagaactgtgggctagtcactgggtagtgggccaccctggtcaccacgtgtgtctctctgggctccaggtttctagactcgaggcacaagtccctaggccacccttcagaagccaccaagcagttggctggtgctctccaaaaatcagaagtgggaaagtggcccccaccccctaccccatcaccccacctgccccggcgcatcctgcctgaggcccaccattttctgcccgcaagctacgtcagcttctaaaaataagtcttttctgtgtggccagctgtgcaggggagggagttctgcctggcacctgctcccctgcccatgaggaaccagagaccttgactcaggcagtcgagatgaactgccccccacatccagctctctctctcacagcccggggcttctgcagtaaagacaagagcggctgaactgaacttcacaaccccagttccacgtaggctttgcctggtgagctcgtagcgttacctccgttttacagggatagcaaggtactgacactgcagagtggatgccacctgcctggggccacacggtctgcaagaacagggttggactttgaggccattctgcccttctctgctcagcagtagggaggtcagaagtggcagtgggtcctggggtggagaggctgctgagctgctccgccagtcggggcctctgcgttccctggaagtcctccttcttcccacttaccggagccttcatgctgtcgctgtccctcagtagtctaggggctgctgtctccagggctggggctgggaaggggtgggagccgggcacctgccaagacccagaaactcagagccgggaggggtaaggcaggtggggttctaagctatagggaaaactgaggcaggagagggtacaggccggggtgaaagcacatggcacccgggaatccaaccccttgacgtctccaaacaccggaaggcaatgtccccatcctaaaggagcaggaatcagcgacgtttgcgagacctcctgccaacccaattcccagtgcgcagatggggaggaagaggcagcgaggaggcgcccccagctcaaggtcacccatcaggtctggggcagagagagccagaagcccggaattccaccccatccatcctacctctctacccgggggacgaatggagaggccgggcgagggcaggacgtaggtttttcaccgcccttccagattccactgccgcatctcccggccgaatgctaaccgggcgtgcaggctggggttcgcaggaggctcgcgatccgccgctcggagctccatggcccccgggccgggccgactgggctggaagctgatccgcgcggccagaggcagggggcggggccggggccggggccggcgaggaggggcggagactcgcgcgccgggggcggggcctgcgcgccgcaggcggatcctacgagcgcggcctgcgcgacctggggagggctctgcgcggccgggacggggcgggacgtgaatggctggcggcgaggcctccagctaggggcggggcctcagggccgggggcggggcttcagagccggggcggagtctgagtaccagcatctcccttttcggtcctgccgaatttccagcaggctcctgcctgggcgaggctgtcgggccgcaggggaaagagacctagagggtgtcgggggccaccaggcagtggcggcctggctgtccggacttgagtgtctccatttctgaaatggtggttggggagggaaattaagcagggcttcgggtcaggcagcccacgtttcaactggtaggattgctgcatttatcaagtaagatacagaacgcccagtgacattggaaattcagataaacaacgaatacatgagttattttcaatatgattattttattatgattatgtcagtgtgacagtcacctgagtctgtttttctcctctgagacacacgtgtagaggcagctcctgtcacagccaggattcgaacccaggaagtttcactccagacccggggctgtgaccacctactcttacctctcgaaggctccctcgctggaatgtcctccaaatccaagtcaagtcagctcaggccccaggcagatgctgcagtgtgtcctattggggtcccttgggatctcagaggcaactgccttcaagcgccaggctggtggcagaaagcactgggacagtagcaggggtgggcctatggggaagtgagagggcacacttcctgtctaggattttttttttttttcttttgagacagagtctctctctgttgcctaggctggagtgcagtggtgccatcctggctcactgcaacctccgcctcctgggttcaagcgattttcagctaacttttgtatttttagtagagacagggtttcaccatgttggccaggctggtatcgaactcctaacctcaagtgacctgcctgcctcggcctcccaaagtgctaggattacaggcgtgagccaccacgcccagcccttgtttatgattttttgtgcaaaatgttgaattggccagaaagatcatttcaccatcccaaccacacccacctcctctgcagggagctagcctgggaaccagcttgggctcctgccctggtctccatttcaaactcctttttcctttttctcagaggctcaggcctgggcaggatgccagggtatctgtccccagctcagcaaccttcccagtctaccctgctccaggttcaaagccaaatcacccctgggcctggtgctctaggcctcagtgcctcccctatccaggggctgggaggagggctgctgtagtggccctgccccctaggggcctcctttgagcacaaactctcctgtcactgccactccagcctggacacacatggggagtagtggttcacgctcagtcaccatggcccctcactcacacaaggcagtgggtccccaaagccagagccctttcctctcagtcctcgttcttcaagtttctttcctcataggcccaaccctgagggcacaatggtgagaagttccctatggattcactcactgcccacaatggctggtgaggtgatgattccttccccggagaggcaactccatccttgctrgggccacatggagacagggacatgcccaaatggcccgtgctcccagggtagatgaggatcataagtccacagtagaactgtgaccaggaagtcccacagccccagataaagatcttcactttgcttttggcaaaaacctactctgcttaccacaacctacacgatcctacacagtgtgaactccttcagtcaccctccacctgccctggccaccctccgaccgccaatcattactgaagccattcctactgcagggcctctgccctcactgtgtcctctgctggactgcgctagtcatatggtggcttctcttaccattcagctcaagcatcacctcctctgaaaagcccttgccagccaccctacccaacgctgcaccccaatccctcttgcctcaccccgactcagtttttcataatatttgtcacactctgaaattgccctgtgtattaactggttgccttatttatggtccacctgccccacagactctaagctccatgtgggcaaagtcagaccagccatgtgctcaggacacctccagcacctgcacagtgcccggcacacactaggtgctaggtcacgtctatcaatkcatgagttaggagagcctgggtcccatgagttcttggacaaatcactttcctttccagcctgaggtcccggctaggctcacggccagagacccaaaggtggagagagtctgagtcatccttatgtgtgagagcaggactctgtggcgctgactcagccctgtgggatccagatgggtggaaatgtggagtcagactccagttcctgctgcaattccctgccacctccgagyttcmctggcccatcacctcctgagtgatgggcgtgacaacactctatgtcacaacttcctgctaaagtaaggacaagaaatttccactcagctcatgccagcacagagaggttgagaaatcaggcaaggtcacccagacgactaggagtgatatcaatatttaaagtacatatattctggtgaggtgcagtggctcatgcctgtgggcccaacactttgggaagatcaaatcaggcggattgctggagcccaggagttcaagatcagcctgggcaatatgatgagaccctgtctctgcaaaataaaataaaataaaataaaataaaataaaataaaataaaagtagccaggtgtgatggcacatgcttgtagtccccgctacttgggaggctgaggtgggaggatcacttgagcccaggaggttgaggctgcaaggagctgtaatccatgtcactgcactcacgcctaggtgacagagggaggccctgtctcaaaaaaaaccaaaaaccaaatattccaggaaccctgcatccagagctctctccttcctcccccttccccctcagccatctttctttttttgttgttgttttgttttgtttgagacagtcttgctgtgttgcccaggctggagtgcagtggtgccatctcggctcactgcaacctctgcctcctggactcaagaaattcgcctgcctcagcctcccaagtagctgggactacaggcacccgccaccacagctggctaacttttctatttttagtagagacgaggtttcaccatgttggcccggctggtttcaaactcctgacctcaagtgatccacccaccttggcctcccaaagtgctgggattacaggcgtragccaacgtgcccggcccctcagccatctttctttggtgggatctgataggtcagtggagtggcagtgtgcattgcagctgaatggcttccccgaggtcctgcactgtccaatcctgggggtccactcttggcccacatggccccctcccactctgaaatgttttccttctctcaccccaggcccttgctgtgctcttagcctgggaccctcctagggacgtgtcagactcttctctggtctcagagtagaagttaaagctcttcccccaacactatccatcaaatgatcgggtaggggtcccttcccccagactgtgagttccacgagttccatgaaggcagaatctgtgccacttgcttcatccccaggtccccattaccagcagagggcctgtcacatggcaggtgctcaacaaatatttaatgagttaatgaggtctgtttccattccttcattttacagattagaccagcgaggcacagagaggtttagcaccttgctccagtcacacagccaggccccggagcagttctggaggaaaggcccgcttgggcttgggcatggtcggattgaactggggtcagaggccaggctggagtttcctggaggaaggagaaggagtgatcaggggcatgcaggctcctggtgatgtctgtgaagccaagaccttggtcggaccacggacccttgcccccatttaactgatgagaaaagtgactttcagaggagggcagagctcacctgagatcagtagtagaccccgttcagaatgcctcccagagctccaggcagcccccaggacccctgcttctcccacctgcatccctagagtatcaggccaggagcagggggccgggaggcctgggtactcagggccgaccttgccacttacccgtgcttacgccccttaaagtctctgggcctcagtttccccatctggatgacaagagggctgcagccttcagcctccccccttgcccagatcatgaggaccaagctgcaggagctggtggttaagaatacaggctccggaatccaaaagccatggttgagtcctggttccagcatttattgctgaatgatcttgatcagtcccttcaccccctgagcctccatttcatggtctgtaaaaagagaataatagcattttttgaggattaaatgagctaaagtaggggagtccttggcacgatgctgggcacggcaccaccgtcaaacgggactgcgcggttacggtattagttaggggatgctgccctctggcgaccatcaggaggaagcgcaggcgagatgcccgggcccgggggaaccggcgttcctggcgtgagcccatcgtccagatccggagagtggggccgggcgcccgtcactccgtgtgcgcctccacccactggcagaggcgacgggcgtagcgagccgggctgacagtggagaaggtccggcctgggtagcgcagtgtcttccacaggtgctccagccgcttgcggagcccgtagactgtggcgagatccacgacgcccaggaaatagcgctgctcgggcccgtccaggatgtgtagggcgttgggggcgtcgggcagcagccggcggttttgggctctcgactcttccgggctctgtgccccttgcacagacctgggggccgacaggagggtgaagctgccagctcctccaggaagccccagccagtcggctctgcaagcctggccaggctgcccacccctccaccagctcattcccacacctcctgtgtgcccaggtttgtgaagtcaggtagactgagaaaagtgaaagtgttgggctagaggtgcactgttcagtagacattggccacaggtggccactgagccttgaaatgtggctattcctagttgagatgtgctatacgtgtacaatacatactcaatttcaaagacaggatgaaaaaaaggatgtaaggctgggcgcagtggctcacgcctgtaatcccagcactttgggaggccgaggcgggcggatcacctgaggtcagaagtcggagaccatgacatggcgaaaccccatctctactaaaatgaaaaaattaactagccaggtgtggtggcggacgcctgtaatcccagctgctcaggaggctgaggcaggagaatcgcttgaacccgggaggcggagggttgcagtgagccaatatcttgccattgtactccagcctgggcaacagagctagactctgtctcaaaaaaaaaaaaaaaaaaagaaaaaagaaaaagaaaaaagaaaagaaaagaaagaaaagaaaaaaaggatgtaaaatatcttactcatttttacgttgattcaatgaaatgaacattttggatgtattgagtaaatgaattatagtatttcacctgtttttactttttaaaatgaggctactagaaaattttaaattacatgtatggcttgaattatatttctactgggtagcactggtctatagcttttgcgtcacacagaccctggaatctgcaccttggtgccacatgacttcaggtaagtctatttcctaaatttctctttggagtcatccaaccccagaagtctcagggttgtgaagcagaagttttgtgaacaaaatccagcaaccccagtttgcagatggtgtgtctatggttttgcctcaaaatgtcttccataccagaaggtacctttggcagggcgcccagtcccagcagaagcaggttcaattccctaactttgtcctcaggcgtcattgaagggctttaatcctgtcctgtctgggtctcggggtaaatagaccaatgagaaaaaagccctgcccggcgctggccaatcagagctcagtggtctgagagtctgaacagaatgctggtaccctgtgggctacctggatgatggggagatgtgggatgggggcgttctcagtaggggctgggaactgggttggggtggggctgggacagccaacatgaaaatatttcaatgtcacaacaattccatgcaaaccaggactcactgactgaatgacagcggtggcctaagtaccagctagggggagagggcaagggaaaagctgacctcacttggatgggcaggtgtgggaggctccgtgccccatggcaggcttgccaccatccggtcaggacgtgtccagcccagccaaaggccagtgactccaaattctacccaagtctcacccataccaagttcttcctctgaggggtaggaacgaggcaggggacaggaggggtggcggctggacctcctctttcactccccttgtccacccactggatcaatggagtgcctgtcttagctcctatgtaattctgttcgaccacaggggtgggcctgagggaactgaaatggaagtagctggccaagtactaacatgagtcctcagaagtcattctgcaaccttgtgtctgcttcccgagcctcagttctcacatttctcaaatggggatgagtctaccctcccagggaggctcccagtcagcatgaaggaatgacagttaccactactgagatgaagacaggaagacggtgccaatgatgatgacgtcagcgtcctggaagtggaatgaccagctaaaaagggcaaggaccctttctaaagcaaaaattaggctgggcgcggtggctcacgcctgtaatcccaacactttgggaggcagagacagacaaatctcttggtcaggagttcaagaccagcctggtcaacatggcgaaaccccatctccactaaaaatacgaaaattggccggatgctgggcctcccagcactttgggaggccgaggcgggtggatcgcttgaggtcaggagttcaagaccagcgtggccaacttgatgaaaccccgtctctaataaaaatacaaaaattagccgggcatgctggtgtgtgcctgtaatcccagctactcaggaggctgaggcaggaagaactgcttgaacccgagaggcggaggttgtagtgagccaagatcgcgccactgtactccagcctgggctacagagtaagactccatctcaaaaaaaaaaaaaaaaattagccaggcatggtggggatgcctgtaatcccagctactcaggaggatgaggcaggagaatcgcttgaatcggggaggcagaggttgcagtgagccgagagggcaccactgcattccagcctgggtgacagggcgaaactccatctcaaaaaaaaaaaaaaaaagcaaaaatgttaaaaattaaataggtctttttctctgctctgaaaccttcagtggttccacagccccactggaaaatgggcagattcttcaaatagtcaccaaagctcttctccaactggacttcatctgttctgtcccctgctgcagtccacctgtgcccctcctgccctaccagccaggcttctccagccctcccctctacacacacacacacgcacacatgcacacccacacacatgcacgcacacacacgcatgcatgcactcacacatatgcacacacgcgcgcacacgcacacacacacacaaactctgcactttccagccttcatgtctttggctgcactgctcccggtgcactcccatgcccccatgtctgtctttcccttactctcaccacctcaatctcgctgttgcccctgtgggaggctcacctggccgtgcggaagatgaggctgctgcccgggcccctctcatcctcgtggagacgttggaaggctatcaggaggctgtaatccarcacgttgagctcccggaggaaggtggtatccagttccatctggcggaggaaccagctccgctggggccctgccggagcatcagtgcccccacctgagcgctcatcatgtgccagccacggtgctccacacactctgccccgtgacagcatgtggcattactgtccccatctcacaaataaagaaactcatctgtaatttgccttggtcacttagctaggaagtcatggagcctgaatttgaactctgctctgcctgattccagaatctcttttatttttattttattttttgagacagagtcttgctctgtcgcacaggctggagtgcagtggcgccatctcggctcactgcaacctctgccgcctgggttcaagcgattctcctgcctcagcctcctgagtagctgggattataggcgggtaccaccacgcctggctaatttgtgtgtttttcgtagagacagagtttcagcatcttggccaggctggtcttgaactcctgacctcgtaatccacctgtctcggcctcccaaagtgctggaattacaggcgtgagccacggcgcccggccgaatctgggctcttaataactcaggcagagggcagcagggacacccttctaaacttcaccctgaatgaaggaggaacaggcagtggccacccccgtggctcacccaggttgatggtcttgccctgaaagttgaggtccttcagcaccagaacaagggggctgccctcaggggcgggatccacccagcggctcacctcgcagcctttgatgtcatacctgggtggggggacagaattcagctttacatagatttgagacacagagagaatctcacaagagcttccagtgactacttatgtgcactgaactattacagagatcatccccagtcctcagcacaaccctggcctgtctttttctctttctttctttctttctctcttttctttctttctctctctcttttctttctttctctctcttctctctttctttcccttccttcctccccttctttcttccctttttttttttttttggagatggagtctcacctgtttctttctttttttagagaaggtcttactctgtcacccaggctggagtgcagtgaaacaaacacggctcactgaagccttgacctcctgggctcaggcaatcctcccaccttaacctcccaagtagctgggactacaggcacgtgccatcacacccagctaactttttcattttttgtagaggcagggtctcactctattgcccagggtggtctccaactcctgggctcaagtaatcctcctgccttggcctccaaaagtgctgtgattacaagcgtgacgcaccatgcccggccctatagctgaaccccggcctattattgtttctgagttaaagataagagcagagcaggcattcacactcaggccactggtggcccagcccaggcttgagccctgcctgtgcctgcctctggacaccttgtcacccctgagggtgtcccagacacagggatccaaccccaggcggtggcaacaggacggcttggggacagccaatggccggggggcggggaacctgtgggtagagtcagcgctggagggcacagggggttacgtgcagtcagaggctgggtctgagtccctgctccccacatgttagctgtgtggccttctccttcctcggtttctcatctaggaaggaggataagagctgcccctcagcgtccttctgggaattaaaaagcatgcgaagggcccaacacggcgcctaacgcacactgagtgctccagagatgctgggtgtgggcgtcactgtctctgacccaccagatcttgggaacgccccttctccttcctgggcctcggtttcaccgtctggctagtgagtgtgggtgcttcgggccgcgagtttcggctgggatgggggcccaaacctgcttaggccactcacctctcggagatgcggccggcggggtagaagacgctctgcatgacgatgaagtacgtctgggggccgggacagggagtgagggaggccggctgtcgccctccagccgcccgctccgcccagccacctcgcctcggcttcacccaccttctttccccggtccacccgcagactgtgcactcctggaaggggagagggcgccggatgaggatccccaaactccacaacccggggtgcatccggcgccaatcccagcgccaggccacgcctccttctcaagatccgcggcacctggacccttccttggctggtccggatcccgacccgatcccacccctaaacacagccccagtggtgccccgcccccacgtatggccccacccccatgccctacaaccccaaatccgcccatttgggccccgcccacataccccgccctccccaggtatatgatgacctaggacccgcccccaccgagccccgcccccagccaagtacccagcaaccgcgccagcagcgagtgcgggtgccgctgcaggtgctgcacgtagcggggcaggtgggcgagcagagcctgcacctctcggcgcccctgggtcttcaggaagaagcgctggtcgtggctggggggcaagagaaagaggtcactgcccaggcctggctggagcggctcccacccggcccccttccccgacctgtgcacgtggatctcgctcccaggtctcggcaccgcctctctcgccttcggccctcgccctcctctcctccccgatctgtccaccatccggccctgaccctcccagattagggccgctctgtttctctcttcagggggccttccccgccactgggaattctgccctcccagccaggggtaccactcccacccctgccccacccctgccgcaagctcacgacaggaagaagctggccttgctcttggaggtgctgaggaactgcaggtaggggccgccggggcccagsgcagcctgatagtcctcctccgccaggcccagggagcggcgcagccaggcaaaggcggggccggccagcgtgcccagctcgaagccctgcaggggaggaagagcctcctctggagtgtctgcgtgggcccgggtgtgtgcagttggtcctgggacaggagggtcagggtgaccacacccttcctgcaaggctcaagtctcagggacaagccttcactcccactgcacagatgggaaaactgcagaggagagagcaagaccagcacacgtccctcccacacgggagtctgggcctcctacctcgtgaacctgggttaggacctccgagaaatcgtcccgggagggcggcccctgcagggagaggtagaggagctcagggcaaccctcagtcccctgctgcctgccccaggatctccagatgtcctgcacctggcccgtcccccacctcctccaattggattccttcagcaaaccgggaccggagtttctgagagtgcctgagttgggcagatgcattgctcacctcccagggatgccagggggacaagagtgacccacggcaaggcctgagtgtatctcatccactctggatcaccagcaccaggccatgagttcaagccaggcacgttcccagactcacaggctggccaagtgaagccagattctgtccagtacaagggggtggccctgaagccaagggacctgcctgatgcaacctgggaggggcaaaatcagagaagccttcctgggggtggagacctctaagctgaaatctaaagggtagtggagaggaggagcagggtgctcgcaccagtagaaacagcactggtggctgccggcaagggaaggagggcccaagtggctgaagccagtgagggagggatggagtgtgaacaaggctggatgcagctggatctggaggtcatgctgagtattggggagccatggaagcttttcagcaggtgatgaggtcagtttgtgatttagagaactccctcgagtctctacactttccctggatctccaggtccctgtgcccggatgtggtctgtggaatgtggtcccactgcgcacacaggcacacacacgaacaccacacacatgctcacccaggcccgcccagctgctgagcttgcagttgggccacctttctgctgagccagccctgcctcagcctgagctccagagaggatgggctaggccagcagggtgggggtgggggtcccttttcaaccatacaccctggcagggctgggagggcctcagaaaccaaggagtataatctccccccattatacagatggggacactgaggcccagagagaggcagagacccacctagagtcacacagcaaccacctgagtcagggggttcctcacacccccaacgcaccccagacgttccagctcccacaccacaatgttcctccctctctgccttcctccccttgatatccctctctgatccccacacctgcagtttcagccagacagggcatcagccaagtcttgccattgctggtgtggagattcgtgggacagatgggccactcaccgtgggtgggtggtccatggagacctgggtggcagcccacagccctgcctgcatcatgcacgtcatcccatgcagttcatgccccgggctgatctcaaacaggcccaggcgagactgcttgtctcggaggcgccagagaagcccccgccggctggaggtgactgctctgcatccagcctcaggggagggggccaggacctggtgggaggaggcacaggacacagcctgtggcagcgtcacagaggaaaaagatcagggttcaagtcccacttccactacttgtgagacttcccctcatctctctctgcctcaatttcttcagctgtaaaatagagatgatgctggtacccagaggggccacacagtgcctggcacgcagtcagcacccgaatagagcaatggttatgattatcagtagatagggcgtgcactctgcagtcaaacctggccttagatggaccgtctctcaccaaccttgtgaccttaggtaagtcacctaacctttctgtgcctcattttttcatctgcaacgtgaaaactagaacagcttcttcgtggtaggtatgaactcttgttacttttgagtttgagctccttgcacgggagcccttgatagtaggagctgtgatgccggtgattcagtcacatctattccattcgcctatgctgagcgcctccaggccagcacggaggggccagcacgatgcttttcatagccgctgacccaccagtagtgggcatccaccgcgtgccccgcactggatgagagcttgacctcctaacagctccctgaaggaggagctttagcatcctctccattttcccaatgagaaagctgaggaagtgttgagggatatccgccaggccgcccctcgggatacctggcgccccgtgtggggcgtgtcctggtcttcgccggctgcagggcccctcccaggcttggatgggggcgtgtccgcgccgctcgccgaggggaggcccggcccctgcccaccaacccttccctctcctgtcctctctcgggtccgcacctacctcgcggggccccgggctcggcgcagccatcgcccccgcagcagcttcccgggctttggccgcattccccgccgccccgctgcaggaatcaggccccgcccctacctcgcggccgaccaatagcatggcgccgactgcggctgcatccaatccacgcgggaggcgctggcgatcgcctgcgggtcccgcccccacggctgcagcatccttcagacctcggtccggctggggcggggccgccggacattggctggggtccctcgaagggagcacccccattttccgccctcggcgtggggactcgggtcgctagggccgcctggggaggcgagtaacctaaatcctgtgccacccacccattccggcgtgaaatccccattgcccgtcttttgggtgaaaaaactgagagatctagagaaagaagtcactacctctaggtcacacagcaaagtcggggacatccattcattgaacacatagatattgaacacccactgtgggccagcagtgctaggccctggggatttagtggtgagcgagagggaggggctcagctgcccgcgtgatctttaaaagcataacttggatgatgtcactctcgtgcttaaagcctccagtggctcccatggcaatggaacaaaacccaaacccctcaccctgaccccaggcccatctcaaaccactcaccctacacttaaccactgagccgcccggcccctcctgttccttagccgccaaactctcccattcaagcctctgcattttgctattccctctgcttgaaactcttgaccccagactgctactcgcctcgttctttcgtcaccttgccagactccaacagagcgctcccctccccccactcctgatcacatcacctttattttctttaccaccctaacactgtcagagactgtcttgtttattgtttatcacgtctccccctggagtgggaatgccatgaaagcggggccatgtcattcctgcctcctggctgagtgcctggcacaagcctgtgccggatgagtgtctatgggaccaaggcgagtaggacgtgcaaagggccttggtgagtccaggaagtgaaaggccagagtggctggagtgaagaggggaaagcaggctgagaggcagggccctgtggggacccagagaggtactgtgagtatgggtgtgtgtgtgaggcaccaaggttcgagggttttgtttgtttgttttaagacagaatctccctctgtggcccgcgctggagtgcaatggcgcaatctcggctcactgcaacctctgcctctgggttcaagtgattctcatgcctcagcctcccaagtagctgggattataggcaggcgtcaccatgcccagctaattttttttttctttttttctgagacagagtcttgctctgtcgcccaggctggagtgcagtagcgcggtcttagctaactgcaacctccgcctcctaggttcaagagattcctctgcctcagcctcctgagtagctggggctacagccgcgtgctaccatgctgggctttttttttttttttttttttgagacagtctctctctgtcgccaggctggagtgcagtggcatgatcccagctcagttcaacctctgactccccggttcaagtaattctcctgcctcagcttcccgagtagctaggattacaggcattcgccaccacatccagctaatttttgtatttttagtagagccggggtttcaccatgttggccaggatggtcttgatctcctgaccttgtgatccgcccacctcagcctcccaaagtgctgggattacaggcatgagccaccgcgcccagccatttttgtattttttttttttttcgagacggagtctcgctctgtcgcccaggctggagtgcagtggcaccatctcagctcactgcaagctccacctcccgggttcatgccattctcctgactcagcctcccaagtagctgggactacaggcgcctgccaccacgcccggctaattttttgtatttttttttagtagagacggagtttcaccgtgttagccaggatggtctcgagctcctgaccttgtgatccgcctgcctcagcctcccaaagtgctgggattacaggcgtgagccaccgcgcccggccccatttttgtatttttagtagagacggggtttcaccaagttggccaggctggtctccaactcctgacctcaagtgatctgcccaccttggcctcccaaagtgctgggattacaggcgtgagccaccgtgcctggtcaaggtgtgcatttttgaagggcactggttgttatgcatagttggactggtggggccagagtgggcaggagaagcagtgaggaagccatctgtgacttagggcagaggatggtggctttgcatcaggaaggtggctagaggccaggagaaaaggggagggagaactgataaagctcagggtcctgtggatggggggataaggaagaaagccaggttagggacatggtacaccagtcactagagggggaagggcatgaggggaacagccagatttgggagaagtctgagaattcagctcatgagaggatgcatttgagtttcccaccatggcatccgatgaggatgtcaggtgggcagctgggccatgtgcagtgcatcgggccagaggtgagcctggcaagggtgagacggcttgtgacacaaccctgaggagcccagcatcacatggcagaagacggcatgagtgagacatcaaatagcagaatgatcatcacagccggtcttggtggctcatgcctgtaattccagcactttgggaggctgaggcaggcagatcacctgaggtcaggagtttgagaccagcctggccaacatggcaaaaccccatctctactaaaaatacaaaaaattagctgggcgtggtggcaggtgcctgtaatcccagctactcgggagactgaagcaggaggatcacttgaacccaggaggcagaggttgcagtgagccaagatcgcaccaccgcactccagcctgggcaacagagcgaaactctgccacaaacaaacaaacagaatggtcatcacagacatcaagaaagcggctgacagtggatcaggggatgtcacaggccaaatgcagctgagagtcaagcaaacatcctttggatttaaagagtggacatcaactgggcacggtggctcatgcctgtaatcccaggactttggggggccgaggcaggcagatagcctgaggtcgagagttcaagaccagcctgaccaacatggagaaaccccgtctctactaaaaatacaaaattagctgggtgtggtggcacatgcctgtaatcccagctacttgggaggctgaggcaggagaatcacttgaactcgggaggtggaggttgcagtgagctgagatcacaccattgcactccagcctgggcaacaagagcaaaactttgtcacaaagaaaaattaaaaaaaaaaaaaataaagagtggacaccgctggtggcctcagtggctgcagcctgcctggagagatggggacagatgctga

SEQ ID NO: 97226 - DNA, 50754 bp, Homo sapiens
tcttacctctgcctctgccctctcctcttcttccttcctcctttccccctgctgcagccccacgggctctcctgacacactctccccctgcagaggtccaggggacccaacagccccagcaagatgagatgcctagcccgaccttcctcacccaggtgaaggaatctctctccagttactgggagtcagcaaagacagccgcccagaacctgtacgagaagacatacctgcccgctgtagatgagaaactcaggtagcacctgcccctggagaaatggggtctggcccataccaccgactgcatccaggacccagaagttcaggccccagcccctcctccctcagacccaggagtccaggcctcagcccctcctccctcagacccaggagtccaggcccccagcccgtcctccctcagacccaggagtccaggcccccagcccctcctccctcagacccaggagtccaggcccccagaccctcctccctcagacccaggagtccaggcccccagcccctcctccctctaaccatctgtgctttctccccagggacttgtacagcaaaagcacagcagccatgagcacttacacaggcatttttactgaccaagttctttctgtgctgaagggagaggagtaacagccagaccccccatcagtggacaaggggagagtcccctactcccctgatcccccaggttcagactgagctcccccttcccagtagctcttgcatcctcctcccaactctagcctgaattcttttcaataaaaaatacaattcaagttgcttctcatggatggcactgcttttctgaggactcaagggccaagatggaggggctgactcagtccagccaacatttaatgagcacctactttatgtatggagctctaacccatgggtccatgggaataaagcagtgaatagtaacaataaataatcgtaacagcaattagagactaatctttattgaagtccggctttctctcttttatttttttattttttgagacagggtttcactctgtcacccaggctggacagcagtggtgcaatctcggctcactgcaccctccgcctcccaggttccagcgattctgtgtgcctcagcctctggagtagctgggattatgggcatgtgccactgtgcacggctaatgtttgtatttttagtagggttttgccagttggctaggctggtctcaaacttctgacctcaagtgatccacccgcctcagcctcccaaagtactggggtgacaggcatgagccaccgcgccatgccaaaatccagccttctcatttgtaaaataacaaatcatagacacagctagtccacagtggcctctgacagtctccagttgttaacggtgaatggtgtccaggtttttggcgtcctgaacaaagaactggacaaaacgcacaaacaaagcaaggaaggaatgaagggatttattgaaaacgaacatacactaaacagtgtgggagcgggcccaagcatatgggttcaaaagccctgttacagaatttttgggagtttaaattccccctagaggattccccttccactggttacttctggtacaccctatgtaaatggagaggatgaagaaaagttacaaagtcatttatggcctaccggagaggatgtttcctgttatagctgaagtgaattggccttatgttccctgcctccctattttcctgccttacagttgctggactgacacattttttattttatttattttgttttgagataaggtcttgctctgtcgcccaggctgaagtgcagtggtgagatcttggcttactgtagccttgaccttttgggctcaagagatcctcccatctcagcctcccaagtagttgggactagggatgcccactgccacacctggctaattttttgtatttttagtagagacggggtttcgtcaagttgcctaggctagtctccaattcctgggctcaagcgatctgcccaccttgcccttccaaagtgttgggattacgggtgtgaaccaccgcaccaggcctgggctgacactttaaacgtgccattgcaatcagtgtataatggtcccgtggcagagggagaatggtgcccaagtcagtacttcttggctgggacccaagaagacaaacctctagggccggcgtggtggctcacgcctgtaatcccagcactttggttggctgaggtgggcagatcatctgaggtcaggagttcaagaccagcctggccaacatggtgaaaccttgtctctaataaaaacacaaaaattagctaggggtggcccgcgcctgtaatcccagttacctggaggctgaggcaggagaattgcttgtaccctggaggcggagatagtgccactgcactccagcctgggcagcagagtgagactccgtctctaaaaaaaaaaagaaaaacttattaaaaaaaaattgcaagcaaaaagcacagaaggcagaaggtgcaaataagcagaggctccatggtctgaaggaggccagtgctgggaccatgaatgaagggggctgggggccaagattcctgtatcctgagggagtccagggtggtactgctccccaagtcccatgggtggggctattggtctctggggatccactgcttgtatttctcctaatctgcttggcattaacctcctgccaggctttcaacacccttggggcagttttcccaggtcctgaggctgggcagctgagtccagtaaaaaacaggggccctggagagggactgtgggcaatgcccccgagtccccggggcctgggaagaacagaggctgccaagtgcagggggtggtggggaggggaagaccctggagtaacaatccctgctgtgtccacttggttcccacggactcaagccaagccaaagcactgcccggaccagttcggcttccaaccaatcctggtgctggcctcagactcctcctttctttctcagaaccccattcccctcagggcccccagagtccaggcccctagattcttcttcccctagaactcaggagtctgggaccccccagtcccttctcctcaggacctagaaggttggatccccagccccctttctcccttagaacctgaaatcacagcccttgatcagtattttgcgccccctagtggagagaagagtgggtctgtcctgtgacttacatacagcaggaatggcagaattttttacttattatgatttttaatttctttagagacagggtctcactctgtcacccaggctggagtgcagtaatgtgatcacagctaattgcaacctcgaacgaactcctgggctccggcatccctcccacctcagcctcagagtagctggaccacaggtggatgccaccacaccacctaattttgttaatttttagtagagctaggatctcgctatgtcaccaaggctggtcttaaactcctaggctcaagcgatccttctgcctcagcctcccagagtgctaggattacaggcatgagccacgaagcctggacggaatggcagaatttatttggtcactccacagagcataggaaggctctgcagggaacctgcctccacaggagccctgtccaaggtcacacttctcatgagaagcttagacctcatcatgctccaacacattggcccttgcagtgtatgagacttggagagcagattgcagcagtttgtatttatagctgagagcgcagttggggttgcagtgaggctggagaaagtttcaaagcccctcacttgcctgggctttccatggtcctctacctaaatttgtacaagtcattttgtactttttttttttcaagacagagtctcccttttcttgcccaggctggagtgcgatggcatgatctcggctcaccacaacctccgcttcccaggttcaagcgattctcctgccttggcctcccaagtagctgggattacaggcatgtaccaccatgcccagctaattttgtacttttagtagagatggggtttctccattttggtcaggctggtctcgaactcccgacctcaggtgatccaccagcctctgcctcccaaagtgctgggattacagtgtgagccaccacacccagccaattttgtactttttaaaagaggccaggccaggcgcggtggctcatgcctgtactcccagcactttgggagacagaggcaggcggatcacgaggtcaggagatcaagaccatcctggctaacacggtgaaaccccgtctctactaaaaatacaaaaaattagctgggcgtggtggtgggcgcctgtagtcccagctactccggaggctgagacaggagaatggtgtgaacccaggaggcggagcttgcattgagctgagatcatgccactgcactccagcctgggtgacagagcaagactccatctcaaaaaaaaaaaaaaaaagaggcccacaaaacacataagcttcagaccccacaaagtctctcctcaatccctgtcttagtctattcacttcatccctggacttaaaagactgggcctacacattcaaagaatcgttattaacaccattattgtctgtaacagtgaggatgaggcactgagttttctttttcttttctttcttcttttttggaggtggagtcttgctctgttgcccaggccggaattcagtggcatgatcttggctcactgcaacctctgcctcccgggttcaagcaattctcctgcctcagcctcccgagtagctggagttacagacgtccgccaccatgcccggctaatttttgtatttttagtagagacggggtttcacaatgttggccaggctggtcttgaactcccgacctcaggtgatccgcctgcctcggcctcccaaagtgctgggattacaggcgtgagccaccgcgcctggctgaggagcgaagttttctaaggttccttcttgtcctgtgttagccctcagagaggtaactcactcaccttctgcacctagagagcctcatccccagggcaatcatccccagggcagtgctggagatacagcagtgaccacaacagtcccaggtcagcctgcccagttggggagacacacccatccctgacagtgatgacacaaagtgagcagggatggggtggaggagctgagggggcaagggaggataggaaaagggctcagagagagtttcctagagcgagagctactgttacagggctgagacctagaggaaagtggaggaaaccgataataaaatgataattatatattcagaatatcccaatgcaaagcttactctttttccaggtaatatataaggttcataatcacagcgctccaaatattgaccacttaagcatgaggcccagggcctgatgttttccattcgccatctaactacgtcttcccaataacacagcggggcaaaacgggaagacgaagaacgagtacgattatatccctggtttataaaaggggagaaactgaggctcaaacatagatgtcacttgtcaccagcctggccaacacggtgaaactccgtctctacttacaaaaaaaaaaaaaaaatgggaggctgacgcaggagaattgcttgaatccgggaggcagaggttgcagtgagccgagatcgcgccactgcactccagcctgggtgacagagcgagactccgtctcaaaaaaaaaaaaaaaattagccaggagtggtggcgtgctcctgtaatcccagctactcgggaggccgaggatgcagtgagccgaggttgcagtgagccgagatcgcgccattgcactccagcctgggggagagtgaggctccgtctaaaaaagaaaaaaaaagagagagagagacgtcacttgtccaggatatcttatccagtcagtagcaccacaagggttagaaccctggccagacatccacccaatttcacgggtgaacagttaacagcctctgagagtcttgtcctctctgggcctccgtaacaccctctccaaactaagggtctctcagcagatggccgggtttagagctgtacgaagacacacagctaatgaaaaattgtggaattctcagagcccgtgaagcctagcccacggatgcgaggtttggaccactgagggaacgcgcatgcgtgctaggcagggcagtccgaaggcttgggggtgtatcatagggtctcatcggaggtttgttggccgtaagacccctggaattggaactctaaaaacacagaaaggatatgagctcaggagacttgaacgaaagagttgtcttaggaagaggggtcagamgacaagggtgctgggcaaaaggctagttcttcgaatcagaatacggtggccagaaaggttcctctgacgaaagaggggcgtggttcgaagccgtacagtggccggtaaagctcaagaaacatggaacgaaaaggacgcgaagaatcggcagggagaagcggacaggatgtcccgaaaggctcatataaccgaaaaggcgggttaatgtgaagggacggaagggacagaacttgcgggaggcacatgctggccgagaaagtcctggagttcggagcatacagtgtttttattaggtggaaacaaacgggctgggagaaagacgagtacggtggccaggttggtccttccatagccggaagtggccttcctgagaggcgtggctgcggcactcttgccggatagggtggcccggcggggctaggaaagcgtgaaatctcgcgcgattgygctgcgaagtcggggacggggcggggctggcggcgggggcggggacccggagcgggaagatggcggcggcgcaggaggcggacggggcccgcagcgccgtggtggcggccgggggaggcagctccggtcaggtacggaggccgagaggggactgagggggttcttccccagccggggggcctcccacggggcgtgtcctacctcttgtcacggaatcccgtgcactgggggctcyttggccagagggaccttgaatacccggcccaggcagggccggaccgcccgggaggccggacggtgccgggaacagggccctgttgcgggtcggttcccctgcacgctcgagccgggcggccaccaggctcattgctcgatccggggagacagtggctcggaggggcgcaggcttgtaccttggcgcgctgggttctcaactccgcgattccatgctctgaggccgttcctagagtggtctggcgttcaggtctcgttgtagtgtttgaggtgtgcgcagtgattaattgggakttttctagctgtggggaagtcagtattagcagggcacggccgacagacccattttacagacgggaattcaaggaacagtgagactaaggcgcttctagaaggtcatcctggttaggtttgtaactttatgtagaagttacaagacactgctgacacagggactggtatggttgtrgttttaatgtaaaatagttctatgggttaattagtcctggtgcggatgacttctgccccactgctgtcttaacacactgcagagcataccatttcaggcagctaccgttcaggcatttggggaatagatggagagacatgaaggtgctgtcgacccacccactgggatgtcactgacatgtgggaggcagctcaggggaaaggagtgcgggttgagaggggagaatgaagctgactctctgtgtgaccttgggcaagttcctttccctctttaggcctttatctctcccgtgttaaatgcagaggttggacaggagggccagccatatccctgctgtcaggggacgaagagaggagactgacatgtaaacagttrtaatcctgaatgattaggttggtgacaaaagtctgtgtcagggactgggggagcccagagaaagagcaagtggtatcacttgggtaggacacatggatgaaatttgtgtgatagagcccactgtatctgctctgaatcttttcagcattctcagccagggcctggcttcagggacagctyaggaaatgtttgttgagttagtgctggaatgaaggctcagttcctgtcttcaagggtttcccagtcttgctgaaaggaggtcgtttcccctctgggtttctgttgattattgggttgatggtggcttgagagaccagggcccaggttgttctcattgccctgagcttccagatggcactctgatcttctcttgtaccaactctgcttaaaaacaatcaagagttacccctttgcctttaggacaaagtacaaattctttaataaatcacagtcttgcacgatccgacacttttcttcagactagactaggatttctcgagctcggcactatcaacattttgaattggataatgctttgtttggggggctgccctgtgcattttaggatgtttagcagcatccgtggcctctacgcactagatgtcagtaggatccacgcccctccccagttgtgacaaccatatatgtctccagacattgccaaatgttccaagagcaggggggcaaagccatccctgcgtgagaacaactgcgctaaaggggatccgctgctctgaacctattttatttctaaacctcttttattgcctctcagtctctttcctcatagtctatgcacaggtctctcccctctttagctagttgatgtgtattagtcctacagatttcagatgtcccttcctgcagaaagccctctttgactgtctgggctccgctgtcccagccctgccctactgggtttcactgtctggggactgggaaccccaggagggcagagccaggactgccttgatcaccactgcttccttagcaccactcagctcagcgccaggcacagaggaggtgctcagtgtttgtggaatgagcggatcttgaaacagaggctgggctgaggtggaattccctgatgccrtggtggatccaggtaatcagtgaagacatgccgcaaaacctagcttcctcctgctcttgcctagccctggtggtctcagctacttcttggaccctttagcagatgttgctggggattgtgtgtgtgcgtggacgtgcagatccgagagcaggaactgtgtcttagtcactgatgtgtccacagccactgccacccttctcccatgcccagggcctagtgcacagcaggcacaccctctgcacagtctgctgctttagctagcctgctcctgtagccaggaactcggacacagaacccacagctttgccattccttccttcagcgaatgcgaattgagtctactccatgctaggcctttgctgatgctggagatacagctgtgaataaaataggtgctgccctcttgaaggcccttacacttatgttctagttggagctgaatttataggggaagcacagacagggacacacagtgaacaagataaataagaaaaacagcagttcagatggctctgcgtgccatggacagaaataaagctgggatggggataggaagtgaggggtgggtagaagagttscaattaaatagggtagtctagaaggcctctctgaggaggtgacgcttgaacaaagacctgaaggaagtgagagagggagtcccaaagatacacgagggaaaagcttttcaggcaaaggagcagccagtgcgaaggccctaaagtgggaggtgcctggtgtgatgaaggaagggcgaggaggctggagcgggtgaggggagaggggtggctggggacagatgcagattatgccaagctttggaggccatggggaggacttggcctttactctgagggaaataggagctgaaaagagtgactctttttttttttttcttttttctgagacggagtctcgctttctcaccacaatctcggctcactgcaacctccgtctcctgggttcaggcaattcttctacctcagcctctcaagtagctgggattacaagcacctgccaccacacccagctaatttttgtatttttagtagagacagggtttcaccaggttggccaggctggtcttgaactcctgacctcaggtgatctgcccacctcggcctcccaaagtgctgggatttcaggcgtgagccaccacgtccagccttgtggtataatttagatggtataacgttcacctgttcttaggatagagtcyattggctcctggtccrtttatgcagttgtgtggtgcagccatcaccacagtctggtctgagaaagcttctgtcccctcaaaaagttcccttttacagtctctgctgctcccaatcctaggcagccacagaggtgctatctctgtaattttctaaaaatgtcttaaacaaggatctaaacaacatccagtcttttgtgtccagcttctttcattgggcataatgggtttgaggttcatgttgttacatagatctgcagttgttcatttttattttattttttacaacctaggatcagggaaatttggcctttggggaaatcctaaagtacgtgctcacagttgttccttttcactgctcagtggtagtctgcagacatgacacagtttawtctttcagtccttgaaggatatttggattgtttttagtttttgtctgttgccaataatgctgctatgaacattcatgtacaggcttttctgtggctgtattttgtttctttttttttttttctaagtaagagagacagggtctccctgtgttgctcaggctggtctcgaactcctgggctcaatggatcctcctgccttggcctcccaaagtgctaggattataggcatgagccaccacacctggccactgtttgtttttgagacagagtcatgctctgtcgcctaggctggagtgcagtggtgtgatcctggttcactgtagcctcattctccaaggctcaattgatcctcccgtctcagcctcctgagtagctgggaccacaggcatgcactaccacacctggctaatttttgtatttttatagagatgaggtcttgctgtgttgcccaggctggtcttgaactcctgggctcaagcagtcttcctgccttggcctcctgaagttctgggattataggcgtgagccactgcgcctggtctggcttcatgttttctgcctcctgggtagccattcaggatgggtttgctggattgtgtagtaggtgcacatawgacttgttcaataactgccatattttccgaagtagctgtacttttactttcccccctagcagcatacgagggttcctgtttttccacatccctgccagcacttgtgattgtctttctgctgatagccatcctaataggtgtgaagtgacacctcattgtggttttaacttgcctttccgtgggaaggttcccagccagattgcccatcactaacgggtaagcgaagagacctgggagtcagtcagatgcagcttcaaatcctgacctggcatcaagtgtcctttcctgaccccaaatcagctcagacccattgaaacccatacttggacccctaaatttcccaatagctaggctggccttgaggagggggccttgtgcctgtctgatttcccttccccagcygacccccgccccatagatctcctcatcagaatgtggctttctctgtctcagcctaagggtctcacccagacgacccagacgtcaaagggagctcctcagggaggcctctctgaccacccactccaaagtggatccctgttcccaactcagttgcwgtcacttccccctgcttgttttccatgtaccatttttaattatcctgtttaccgttctagtgtgtttccttctagatccccagctctgggtaagcagggcccagatttctgtctaaaatgttccagtattttcacaacctggtccacaggtcagagaggtgaagtgatgtgcccaaggtgtcacagccaagaacggtgggaccaggactatagctgaggtctgtttgaccctggagcccctccaatggtgtcctgtgctttgggagattacaggaaagagctcttgctggtgaaggggacaggaggtgacaagtgacacatttaacacatgtagcccctctaaccatgctcctgggacatttgctatctggtgggtaaggtgaatggagaaaacattgcagaggagtggactaggggctgtggaggagagggccagacactggagcctcagagggaagtgggtttgggtgacctgagcgtccggggtgagtccttcaggcagcggtggccacacaggtgtttatcacagccttgctctgtgccactggtgctcttgagctaactgtgactgtgatagccctggtcctgcctcttgaaggctgatggctgaggggacagctgggaggaggggtgaatgagaacaggactggggagctagcagggtgcgtgaagggtgagcagaacatccccttccaaacctggcattcagagagtctctgattgtgaccttctgtgtctgagtgaagagtcctcctctgggaagccgtgcctggctcccttgcctgccccccttcccttctgtcattctgcttctgcggtccttcctgagtgaccagacaagtggcttcacctctctgagcctccctttgctcagcagccggatggagctggtcatagttttggcctcaggattagtgtgctgtgtgctgtcacagacatgtcttgtggccgtggcttatggtagcagctgatagtctggttgtgtttttctgtgtctgtcccacctgctggaccaggggcccttggagggcagggttggccacagagggggcctcaggaatggtttgcccagggaaggctctttcagctaagccccagccttgaagaatctggcacctgccataagactccttctgttgttgtccccaatagccacctccttgcatcctggctccagccccagggaacagtggacagtcatcagaatcagactgtgcctctaatcttctgtttctgcacctgctgcttctctcacttcctcctttgtgccaccaacttgctatgttttaggtctcagcttcaatgcccccttctccaggaagttgccccgaaccctagactggaccaggtgcctctcagggctcctgcattcctgccccgttctggacagtcactgtctagagatgaatctttctcccccacygggctgttaaaccccaggaggacagcaaaagactctctaggtcaccactgtccctaggtcacagaggtgctctgcgagtgttttcctcctaaaagaagaggaccgcaccttcccaggtgttttcactgattcattctccagttattgataagcacccactctttgcccagcctgtgcctggccttcatgcatgatggtgtctaagacagcccccgtgtccattctccctccttaccctggcctctgtcccccacaggtgaccagcaatggcagcatcgggagggacccgccagcggagacccagcctcagaacccaccggcccagccggcacccaatgcctggcaggtcatcaaaggtgtgctgtttaggtgagcagacgggacttgggtttgttcaccgaaaacattcaaataaaawtaaggaagaaaggaaaagtcagctgatcagctgaggatggtgatcattactgtatggtagagttgctttttttctttttttttttgtatgatggaatgttttctaaaccttttttttactctggtaaaacatactgaagtagggagtctccctgaacctgttctggtttttggggggctacctgatttgtgaaaaaataaaaacacaaaaaatactgaagtagtttgctagggcccttgtatcaagtaatatagacggagtagcttaaacaactgaaataggaaattcattgtcttacagttctgaaggctggaagtccaggatccagctgtgggcaggggcagtttcttctgtggcttctctcctgggcttgcagaaggccgtcttctccctgtgtcttcatgtggtctttcctctgtgtgtgtctgtgtcctaagctcctcttatggggacactagtcatactggcttagtacccaccataatgacctcactgaaccttacttttttacagaccctatctgggccaggcacaatgactcaccctcataatcccagcattttgggaggccaggttggaaggactgcttgagcccaggagtttgagaccagcctgggcaacatagtaagaccctgtctctactaaaaataaaaaaatctggctgggcacggtggcttacacctacaatcccagcactttgggaggccgaggcgggtggatcacgaggtcaagagatcgagaccatcctggccaacatagtgataccccatctctactaaaaataaaaaaattccggaggctgagacaggagaatggcgtgaacccrggaggcggagcttgcagagagctgagatcgygctactgcactccagcctgggcaacagagaaagactccgtctcaaaaaaaataaaaaatacaaaaaaaatacaaaaattagctgggtgtggtggcaygtgcctgtagtcccagctactcaggaggctgagggcaggagaatcgtttgaacccaggaggcagaggttgcggtgagctgagatcgtgccactgcattccagcctggggacagagtgagactccatctcaaaaaaaaaaaaaaaaaaaaagccaggtatggtgacacgtacctgtagtctcagctattcaagaggctgaggtaggaggatcacttgagccttggaaatttttttatttttattttatgtatttttttttttttttgagacggagtctcgctctgtcgcccaggctggagtgcagtggcacaatcttggctcactgcaagctccgcctcccgggttcacgccattctcctgcctcagcctcccgagtagctgggactacaggcacccgccaccacacctggctaattttttgtattttcagtagagatggggtttcaccgtgttagccaggatggtctctatctcctgacctcatgatccgcctgccttggcctcccaaagtgctgcgattacaggtgtgagccaccgcacccagcctatttttatttttgtaatggagtctcgctctgtttcccaggctggagtacagtggcgcgatctcagctcactgcaacctccacctcctgggttcaagcgattctcctgcctcagcctcctgagcagctggaattaaggtatgtgccaccatgcccagctaattttgtatttttagtagagatggggtttctccatgttggtcaggctggtctcgaactcccaacctcaggcaatctgcccgccttggcctcccaaagtgttgggattacaggcgtgagccactgcacccagtgcctagctaatttttgcttttttttttttttattagagatggggtttcactatgttgaccaggctggtctcgaactcctgacctcatgatccacccgcctcagcctcccaaagtgctgggattacaggcgtgagccactgggccctgcctgaccctcagaagttgaagctgcagtgagccgagatcacaccactgtactccagtctgggcatcagagtgagaccttatcgcaaaaaaaagttggggggaccctgtctctaaatctagtcacggtggtactgaaggttgagactttaacatatgaattttgggagacatgattcagcccacatctgcacataacatcaaatttaccattttaacctatgttttcattttaacctttttttttttttttttttttttttttttgagacagcgtctcactttgtcacccaggctggagtgcagtagtgcaatctcggctcactgcagtctctgcctcctgggttcaagcgattctcctgcctcagccacctgagtagctgggactacaggcacctgccaccacgcctggctaatttttgtatttttagtggagatggggttttgccgtgttggccaggctggtctctaactcctgacctcaggtgatccacccgcctcagcctcctaaagtcctgggattataggcgtgagccaccacgcttggcccattttaaccatttttaagtatgtagtcctgtggcattaagtacatctccactgttgtgcccccatcaccattatccatcccgagaatttactcttcccaaactgaaattccatacccatcagacacaagcttcccatttcttcctccttgcaacacctggcagccacttttctatttcctgtctctctttcactactctagttagctcctgtatgtggaatcagacagcatttgtccttctgtgactgcctggtggtgacccttttacctgtgggttcacatgctattcctgggcagtgggaccccagggcctgttttttcaaagcccagcttctgtttgaggccctggggagatgctgggtggtggcgggggaatatgcttggcactgggttctatccttcctgcctagacctagtgacagtcaccttctttgctctgagcctttgtttactcctctgcaaaatagatattccttttattttttttttgctttttggagatgtattttagcaaaataagagaccacaccatgcagttaggcaatcagcttccctacttatgagatagaaggaattgcacagcagagatgtttacaacaatcatcccgccaggtgcggtggctcacgcctgcaatcccagcactttgggagaccgaggcaggcagatcatgaggtcaagagatcgagaccatcctggccaatatggtgaaaccccatctctactaaaaatacaaaaattagctgggtgtggtggcacaagcctgtagtcccagctactcgggaggctgaggcaggagaatcacttgaacctgggaggtagaggttgcagtgagccaagatcgtgccactgcactcaagcctggcgacagagcaagactgagtctcaaaaaaaaaagagaaaataaaaataaaacaatcatggctgggcgcggtggctcacgcctgtaatcccagcactttgggaggccaaggcaagcagatcacgaggtcaggagatcgagaccatcctggctaacacagtgaaacgccgtctctactgaaaatacaaaaaaattagccaggtgtggtggcgggcgcctgtagtcccagctactcaggaggctgaggcaagagaatggtgtgaacccaggaggcggagcttacagtgagcccaggtsgtgccactgcactccagcctaggcgacagcgagactccgtctcaaaaaataaaacaaaaataaaaaaataaaacaatcattcctttggctagaatgtcttcacatggccatggccagctgcacgggaggctgggaaatgtggtctttaatctgggaaactgagcaccctgctggaaagcagggctcctattactgaggaagaagaggagagtggttatggggggcagctacttatctcttccataaaatcttattactggtttcccttagcttataaattatgagtgtttattttacaaaattaagtagttcaaacaatacgaagagtgaaaagaaaaagctaatgaaaaagtgtaatgtgggccgggcgcggtggctcacgcctgtaatcccagcactttgggaggccgaggtgggtggatcacgaggttaggagatcgagaccatcctggctaacacagtgaaactgcatctctactaaaaatataaaaaattagccgggcatggtggcaggcgcctatagtcccagctactcgggaggctgaggcaggagratggcgtgaacctaggaggcggagcttgcagtgtgccaagatgccgccactgcactccagcctgggtgacagagcgagacacagtctcaaaaataaaaaagtgtaatgtgttggtggccatcccataggcacacatttttgtaattggccctaaatgggattatatatagatgctcacagatagagttgtttaaaatagagaaaagttaggaggcggggggcaggtagtgtcagatagcgtgtaagagcacagccctgctgacatctcagccctgccacctctgagctctgtggcctggtcaggttatcacccttcttgagcctcattttccacctcacagacaggaatcttgacaattagctcagggtgcatcagaaggattccaagagaattcatgtcaactgaggggtgcaggagctggcacgcacacagacaatgttggccatgattccttttgttgttcaacgtggaaaaaaaaaaagcctgagcaacacagtaagacccccatctctctctctctctctcttttttttgggagacagaatctcgctccgtcgcccaggctggagtgcagtggcgcgatctcggctcactgcaagctccgcctcctaggttcacgccattctcctgcctcagcctcccgagtagctgggactacaggcgcccgccacagcgcccggctaattttttgtatttttagtagagacagggtttcaycgtgttagccaggatagtctcgatctcctgacctcgctatccacgyacctcgggctcccaaagtgctgggattacaggcgtgagccaccgcgcctatcctgaccccatctctgtaaaaaactaaaaaattagctgggtgtgatggcgcacacctgtagtsccagctattagggaggccgaagagggaggatcgcttgagcccaggaggtcaaggctgcaatgggccgtgatgatactactgcactccagcctaggcaacagagtgagactgtatctcaaacaaacaaaaaccttaggaaatatatagtgaaacagtgaaaaaaaaaagttcatgaggccgggtgcagtggctcacgcctgtaatcccagcactttgggagaccaaggtaggtgaatcacctgaggtcgggagttccagaccagcctgaccaacatggagaaacccatctctgcaaaaaatacaaaattagccgggcatggcggcttatgcctgtaatcccagctattcaggaggctgaggcaggagaatcgcttgaacccgggaggcggaggttgcagtgagccgagatcatgccattttactccagcctgggcaacaagagtgaaactctgtcycaaaaaaaaaaaaaaacaactcatgatccctgatgtagtcactgatcacattctagactagagcagaactgcctgcctggtgtcctccaagagtgtcacacaggacactgagaaactgcaggaaagaaacctccccactctgttaagttgcaaaactgacatgtgtgcctcaaaaattcctgccatgtgccctacgcttctcagtcatgcgcccctgtcccttaccgtctccacttcacctcccctccccatggccacgtaaagacttcagattttcttatatatcaccttcttttttttcatgctgcaagcagctctgcatgaaaattatttttatctttcccttcatttttacataagaggtagcctgttttacacactgttctgctccttgatttttttcattaacaatatatctttgaaatctttccacgtcagtgcatagggagcttccttcagagagacatttttaatacaagtcacactgtaggctaatttcctttcttagaactaggcagcatcaaacatcagttcgggtgggtgctcggagaccatcttggctgcagttcttaaaatgggatccagggtttgttttcaggggcccatgaactccttgtagcttgaagctgattatgtgggaatagcctttctagatagcgggtggcgtctgtgtttttgagcacatgtggttacctggagtgggaggtggagcaggaactgggtatataaaggaatggggtgggagggagagttttgattatacgtcttttcatatatttaaaaatgttctgaacctgtgactgtagaatacctatttgggtgggagaaaggatttaatgtctgttttctttgcttactcaagtacatcaggaagcattagaaaggtccagtctcctgcaggcctgggtgcatggatgaggggccatggccatgagccctctgagagggtccacagaactgtgggcgtgtggatacacacagacgttcttcaggggactggggatctggaatccaaaaaggcctggccttgttttatacatggggatctagaagcccagaggggttaggacccccacagccacacactaagccaggggcagagctgcctgggggcatcactgcttctacactctcccctggtgtgtttactaaaatgagagcctctgctggaggcatcggtatccccagagattgccaggtccagaccttccccagacgtgcatatcagggacttcatggggaggtagcgatggctcagctggaccgtggcccctaagaccctggaccccagggccttgtggcttctacaggcagaggcaagttcctgtgcctgatcctgcccctgatcagggctcagcagggaggcaccccacccacactagaatttactcatagtgtttttctgctccaaagttttttgtatgcctttttcctatgattaaaataacagtaatagctaacacttctcagtcacttactgggtatgcaccaggctccattctgaggtacgtgtgcgtgtgtcagatgtatatacacgctatataaacatatatataatttaatgtgtttaatgcttataaactaccctatgagagtaggcactgttattatccccatttcaaccattgaagttgaccactgaggtcacagtaagtagcagagctgggcttcagatgaagatactgtagtttagaggctgggctcataacctcttctgctgtatggttatcatacctataattaataagtacttgaatcatttaatcacatggctgcatgcagctgagaaacctccattaacacagtacaggttcatttctctctgatataccagtctggatggaggcagactaggattctgcagtcttcagtgacccagactccttgctgtttgttgtgccattgctaggtttttccctttatcctcatagcccaagacagctgctgaagattcagccatcacatccacactccaggcaacaggagagaagaataaatcaagaaggaatatttcttctctttaaggacacttttttttttttttttttgagatggagtcttactctgtcacccagactggagtccagtggcatgatctcggctcactgcgacctccacctcccaggttcaagcgattcttttgcctccgcctmccaagtagctgggattacaggcgcccgccrccacgcccggctaatttttgtatttttagtagagatggggtttcaccatgttggccaggttggtctcgaactcctgacctcaagtgttggcttcccaaagtgctgggattataggtgtaagccaccacgcccagcctcgttttggttttggtatctgttgttgctgctgattctcgctcataatgtcgtttccttttgtgcctggcttatctctgtctgtgtcctagtcattatacttgaaaagttatttgtaggaatttcagggctaggatgagcatattttcctacagagaggattgcctttgcttctgcctgggggcattaccaagtcctaggtttccttgcaccaggttcagggcttgagctgcccttcgtgactccttatcccacgagtggccttgcatacttcgccctgcatacctgttgtgcaactcctgggaatgggtaggccacctggttccttccttctcaggggtggaggcttgcaccttgtggggtcttagtttcctatagggtaggtctctggttacctcatatgttgtatgtgccctgggctagcatttttttttttttttttgagacagggtctcactctgttgcccaggctggagtgcagtggcatgatcgtggttcactgcagcctcgacctcctgggctcaggtgattctcccacctcagcctcctgagtagctgggaatataggcatggtgcgtgctgccatgcctggctaatttttgtattttttgtagaaactgtgtgttgcccaggctggtctcaaactcctgggctcaagcaatccacctacctcagcctcccagcgtgctggggttacaggtgtgagccaccgcgcccagcctaggccagcatttttgtcacccaccaaaacacctagcagatgtcctcggacacatgaagaagcttatagggctcctttacttattctttttttttttttcccctagacctgcaaatccaagatcctttacttctttttttttttttccttgagatggactttttgctcttgttgcccaggctggagtgccatggcacgatctcggttcactgcaacctccttctcctgggttcaagcgattctcctgccccagcttcccgaatagctgggattacaggcatgcaccaccactcctggctaatttttgtatttttagtagagatggggtttcaccatgttggccaggctggtcttgaactcctgacctcaggtgatccacccacctcggcctcccaaagtgctgggattacaggcttgagccaccgcgcccggccgatcctttactactttaggattcccactttcccttcagtttttgcctgaaggtttggtaacctacagtcgtgtccattcttcagagctgtctatttatatatattcatatgtaaacttgataaaaattacatgcatgagaacaaatacgagaatacgtgagcagcatatattctcattctatcaatatgtataattacaaatataaaatatattgatattttcttagtgtattaattttatcaagcttttccaattttttccagtgagagggttggtctgaataattaagcccactgttactaaaattggaactaacgtatcacttactatctgcttctccaaaaattctccaaaagttcagaaatgttgctctttctaagcttctgtgccttcggttcttttccttttcttttttaaaaaatttaattaattaattgattaattttttkgggacaagctctctatctcccaggctggagtgcagtggygcaatcacgtctcactgcagccttgaccgtcagggctcaagtgactctctcacctcagtcccccaagtagctgggactacaggcatgggccaccatgcccagctaatttttatattttttgtagagacgggatttcatcatgttgcccaggctggtctcaaacttttgagctcaagcaatccgcctgcctcagcttcccaaagtgctgggattacaagcrtgagctgctacacctgacccaattatactttttttttttttttttttttttgagatggagtctcactctgttgcaaggctggagggcagtggcgcaatctcggctcactgcaacctacgcctcccgggttcaagtgattctcctgcctcagcctcccaagtagatgggactagaggcacgcaccaccaggcccagttaatttttgtatttttagtagagacagggtttcaccatgttggccacgatgatctcgatttcttgacctcgtgatttgcccacttcagcctcccaaagttacaggcatgagccactgtgcctggcctctatacttcttaagttattttaaaatgtgtaattaaattactattgactagagttgccgtgttttgctaccaaatactagatctcattcattctttttttttttgagatggagtctcgctctgttgcccaggctggagtgcagtggcgcgatcttggctcactgcaacctctgcctcctgggttcacaccattctcctgcctcagcctccggagtagctgggactacaggcgcccgccaccatgcccagctaatttttttgtattttttagtagagacagggtttcaccatgttrgccaggatggtctcaatctcctgacctcgtgatccgcccgccttggcctcccaaagtgctgggattacaggcatgagccgccgcgcccgtcctcgttcattctattttttgtagccattaaccatccccggttctgtgcttttgaagcgctaggattccagattctttcttttaaaaattttatgtttattattttttctttatttcttttttcttttaattcatccatctgcacactgaaggggttccagattcttagtctcctctcgggggatcccagggggctggatggcaggtttcccagtctgagtcaagagtcagcccctgcagccctgtggtcaccaggagctcctgcaggatttagagtcaagggtctgcatgcagaccagggcagtgccagctacccccacacactggcaaacggtggcatctgggctccctccccagatgtggtctttagggacatcttmtctccttgccagccctgtgactaccttctcagggcctccctgacttggtcactagccccaggtcaggcgccagcatgtgctaagtcagaaggaagtcaggcgggtctatggcggagagccaaggcttggggactcaccaccttgctgcttctctcctcaggatcttcatcatctgggccatcagcagttggttccgccgagggccggcccctcaggaccaggcgggcccyggaggagcyccacgcgtcgccagccgcaacctgttccccaaagacactttaatggtaactgccgggtggtagggcagacttgggaggtgakggggtgtggaggggtggaatgtggaggagtgatgtcagcagtcgggacagaccaggtccttgctcactggcaggtctaggaaaacaggtccagggttgaggaactctgggcccatccccaacacgtgagacctctgtcacctgggtccatccscagcacataaaacctgtgtcacccaaaagaaaaagcaaattcatttggttaaaataggttaaatcagggtctttggatgttatatttcaaaagtatgttcagcctttcagggttgcagagggagatgtgcaagggagagagtgtgagaggtggggagggcagggagccagcagaggctgacaggaggtgggcccggaaggagaggagacctgcacttccacagtgggcttgggcacaggcagggcagggcttcaggagcctccagagcaaaagcatttagatctgtcagtctaggcttttctgagcaaacatggccattggggcttgagaaaggaggaagttcttgttgggtcacagtgggttttttttttttttttttttgagatggagtctcactctgtcgcccaggctagagtgcagtggcataatcttagctcactgcaacctctgcctyccgggctccagtgatcctcctgcctcagcctcacgactagctgggattacaggcatgtgccaccacgtccagctaattttttgtatttttagtagagatggggttttacctttttggctacgctggtctcgaactcctgacctcaagtggtctacccgccttggcctcccaacgtgctgggatcacaggcatgagccaccgtgcccggtggctcacagtgcttttgtagctctggactgcttcgtccataagcctgcagagctctgaccaggaaggcccagcagccatgagggcaggagatcattcagggagctcctgccccttcctacccctaaattctaattggcaggctggccagtctccaagtgttctttgttcgttgacttcacaggctcagaccaggacaaacatggtggtatgagaaaagagaaaatatgtcctctctgctgctcttcctctctcctctcccctgtcctccataattactgttcccctgagtgtgctgaccgctgccatagctctttagccagcctgcagaggctctgaagagcaggcctgagctctgttcccttcctgtcccaacagaacctgcatgtgtacatctcagagcacgagcacttyacagacttcaacgccacgtcggcactcttctgggaacagcacgatcttgtgtatggcgactggactagcggcgagaactcagacggctgctacgagcactttgctgagctcgatatcccacaggtgggggcagctctcggtttctggccccatggctgcttgactggcactgaaggacctttcctccagtccgctccttgctgagagcatgtggagttygggctccaggcttggcccttccctgggctcacatggtctgtgaccacaagccagtccctgagatctctgggcttcactttcccctacctgaaaaaggtagataggggtggaattggcctgggaccctcccagctacctctaaggttgtgcagtcctccactttaaactggtgaaagattagtaattgtccttggggatgtttgcctatcaccagtttatcaggcagccccgtttcaaaataatattagttaatgttgattgagctaagtgcagggtactaagctaggctgactcatggaaatttcccggcaaccctgtgaagcaggaactgttattattctcatttaacatgtgaggaaactgagacagagagaaggaaagtgatttacccaaggccacatcgcatgagagattcagactcaggctctacggctgtggactctcgcagccctaggctcaaatccaacctcctccaggaagccctccctgactcacagagcactcaggcttggttaagcaccctctctgggttctcacacctgctgggcttccccatcccagcccattctggggcctcattgggactcctgtatgggactgtgagccttgtgataataaggctggggctgcctagatcacttccatgtccccagcactgcccaacgtggggctgggtgcagaatcagcaagtattgaacaagtaaaagggacatctctctttggggccttcttcggctgagtccaagacagctgccctcattcctttctccccagcaggccttctcagctttggggtggagggcacatttctgttctatttctgtctgggtagctagaagcagaatgtggacacagtcattctggttttkttttttgttttttgtttttttttgagacagcgtctcgctctgtcacccagtctggagggcagtggcgcaaccttggctcactgcaacttcacctcccaggttcaagcgattctcatgtgccagcctcctgagtagctgggactaaggcacacatgatcacacccagctaatttttttattttttagtagagacaaggtttcactatgttggccaggttggccttgaactcctgacctcaagtgatccacctaccttggtctcccaaagtgctgggattacaggcgtgagacaccgcgtccagccatcattcttttctttttgagatggggtcttgctctgttgcctaggctgaagtgcagtggtgcaattacagctcactgcagcctcaacctcctgggctcaagcaatcttttcacctcagcctcccaagtagctgggacaacaggcatgcaccaccatgcccagctaattttttgtagagatggggtctcaacatgtttcccaggctggtctcaaactcctctgctcaagcgatcctctcacctcagcctctcaaagtgctggaattacaggcatgaaccaccccacctggctggactttctgacctgcactgagaggtgactcccacagagwcctcaagcccagcccccaggccttgccacgagatccaaggaaggaccagggcctggcaggcccagcagggggatctgcttccaagggcttggatctaagtcgaagcttcagggtggggtccaagtggacttaaaaggcaggagagctgggcacagtggcatgtgcctgtaggcacagctactcaggaggctgaggtgggagaatggccagagcccaggagtttaagactgtagtgtgccatgatcgcaactgcaaatagccagtgcactccagcctgggcaacacaggaagaccccatctctaaaaaagatagggagagtgaggagaacacaatgtggccaactgaattcgagctctgcacaaggatcagagaggttcagtgctcgcctttgtctccacccagtgcccctggacaacttgcctcccttcttgaagcctcagtttcctcatctggatcaagtgagaatagtcccccttccctgggaggcaaggagacttgatgagataatgaggaagacttgggcagagaggggccagctggaggtagcagggagtagcacccaggagcccacagactgggtttccrtctgcgtacttgccacacactatgtgaccccttggcatgagccccgtttgcctcatctgcaaaatggggtggtaacatgacccattgcataaggttgacatgttatatgtgtgttaactcgttagattaggaagctgttgtctgaagtgcccagggcagggtctggcccatagtaggagctccatgtcggtcagctgcttcttcctgttgagtgagcttaacgagagctcgttgactgagctgtgtgccagtgctccaggtagtccctgcagtggtgccctcgggtcagtgctgtgggmacttcgcatcctctaggtggggccctgaggctcagagagaagctgagctcacacggccatggcaggtagagcgggcgtctgagtctgtctgactccagcatttacctctctgccacccagctacatgccccaccctgagtactcagtaaatggccagagagttgagggggaggaaactgctgcagatgggtgccaggcagggctttaacgtttccctcaccccagttgcccagcctgcccacctgaccttccgtcttttgcagagcgtccagcagaacggctccatctacatccacgtttacttcaccaagagtggcttccacccagacccccggcagaaggccctgtaccgccggcttgccacagtccacatgtcccggagtaagtcgctcccctgcagccaggacccactgtccaggaggccagcatcctgggagcccccaggctaatgtggcggacaaatcccaagtccaggagggcaggcaggaagcctgtgctcaaagagggtgggattggcagggcaggctcaagccccacccagcctgaaagagccctgtggacactaagcagggatacccacggaggaagggagacccacggaggctcagggaccagagagaaattggccagaaaaagcagctggagacagggactcttggagaggaggagacgtccttcaccaagggggaagggccagggttgacttttgcacagtaggggcctgatagaagtagacactcaaaaataatttgtgggctgggtgcagtggttcatgcctgtaatcctagcactttgggagacaaggtgggcagattgcttgagcccaggagtttgagaccagcctgggaaacatgacaaaaccctgtctctaccaaaaaagacacaaaaactagctgggcgtgtgcctgtagtcccagctgctcaggaggctgaggtgggaggatcgcttgagcccaggaggtggaggttgcagtgagccagaatcacaccactgcactccagcctgggtgacagaccgagaacctgtctcaaaaagatagatagaggccgggcacagtggctcacgcctgtaatcccaggactttgggaggccgaggcgggtgaatcacaaggtcaagagatagagaccatcctggccaacacggtgaaaccccgtctctactaaaaatacaaaaattagctgggtgtagtagcatgctcctgtagtcccagctacttgggaggctgaggcaggagaatcgcttgaatccaggaggcggaggttgcattgagctgagatcacgccattgcactccagcctggtgacacagcaagactccgtctccgtctcaaaaaaaaaaaaaaatagataaaattcaaagaacagtgtgggcaacataatgagacttcgttgctacaaaaattaatagccaggtatggtggtgagcacctgtggttccagctacatgggaggctgaggtgggaggatcgcttgaacctgggaggtcaaggatgcagtgagctgtgattgcactacagctttccagcctgggcgacagagcaagtccacgtctctgaaaaaacaatagtaataaaaaataagactaccacttctactcccatgataactcattaatccattaaaccactaatccatgaatgggttaatcagttcctgaggggagggtcctcatgacccagtcacctcttaaaagcctcatctctcagtactggcacattggggattaagtttcactgggagtggggagtactagagtacatcagtagtcccagctacttgggaggctgaggtgggagaatcagcatgagttttggccaggacaaacattcaaaccatagcattgtccgtcctcttgttttcgagargttaataattgttgtcatctttctgcttgcctggctctttttttttttttttttgagacagggtctcactatgtcgcccaggctggagtgcagtggactatctcagctcaccacaatttccacctcccaagttcaagcgattctcccaccttagcctccaaaatagctgggactacaggcacacgccactacgcccggctagtttttgtatttttagtagagacggggtttcgccatgttggccaggctggtctcaaactcctgacctcaagtgatcgtctgcctcggcctcccaaagtgctgggattacaggtgtgagctgccacacccagccttgcttggttctctgtgagctttttccctgagtcctctgtctcctgatgggcagccgtagaaatctcttgctgtacctgtttgagcggagctggagaatggcttcctcagaaagccccccattcttctaacgggagttctgtgtactccacctagctttcactttattgaggactattccagacattccctgtggatttggttaagatccatctggctggttttgggtggcgcagcaacagacagaattctatttgtatgagttaggtcttacctacttcttttagtacaaaaatatcctaaaggatggtaatttttttttatcacctatactggatgaaatgaaaagytgactctatgtgggtccctagaaatgacttggaaaggtcttctggagttacttgagcccctttctgagtgagtgtgtctgmagaatgtgctgcgttggtatgtcccacccggctgacgtccatgtggtgagatctttggagaaccaggcagaagtggcttgagggggtgtgacctacagggttggtctcacagatgtttccctgcagggggatacgtcaggggtctgggctaaaatgcccgatgtttcagaggtcgctctgaaggtgacccaggtgggtggctcttcaccctattcttgtaccccgtttgacgatcacctaatcatcccgttgacccaaatcgatgccagtattttctgcagttttgtctttggtgagtgtgatccatgtcactgtgtggtgaggtttattcacagtcagtctggtctgtaaaatagaacctgcagacagtgaacctgaaaagcatactaggatcatccaggcctccctccccagccttggagctgggaccctcaaagcagggacatagaaggacttggagtgagccacccacaaactccagggtgaaggagagtgtgagttcagaaaagcccccttttggctggttgtggtggctcatgcctggaaacccagcactttgggaagccaaggcaagcagatcacttgaggtcaggacttcgagaccagcctggccaacatggtgaaaccctgtctctactaaaaatacaaaacttagctgggcatggtggcacatgcctgtaatcccagttactcgggaagctgaggtgggagaatcttttggaccccggaggcggagattgcagtgagccgagatcgtgccactgtactctagcctgggcgacagagcaagactccatctcaaaaaaaaaaaaaaaaaagaaaagaaaagccccttttatccccaagaggccaataatcagtattctagagcagctccgtcccatggagataggatgtgagccagagaaggcattaaaatttttccaatagaaaaatactaaagagtaaaaaggtaaagagaggccaggcacggtggctcatgcctgtagtcccagcactttgggaggccaaagtcagaggatcgcttgagcccaggagtttgaggccagccctggcaacatagggagacctcatctctacaaaaaaaaattttattttattttatttattttatttcattttatttatttattattatttttttttgagatgragtcttgctctgttgcccaggctggagtgcagtggtgcagtctcggctcactgcaagctctgcctcccgggttcacgccattctcctgcctcagcctcctgagtagctgggactacaggcgcccgccaccacgcccggctaatggtttttttgtatttttagtagagaccaggtttcaccgtgttagccaggatggtcttgatctcctgacctcgtgatccacccgccttggcctcccaaagcactgggattacaggcatgagccagcgcgcctggcctattttattttatttttttttgagacagagtttcactcttgttgcccaggctggagtacagtggcatgatcttggctcgccacagcctccacctcccaggttcaagcaattctgcctcagcctcccaagtagctgggattacagtcatgtgtcaccacgcccagctaattttgtatttatagtagagatagggtttctccatgttggtcaggctggtctcgaactcccgacctcaggggacccacctgccttggcctcccaaagtgttgggattacaggcgtgagccaaaaaatttttttaaattagccaratatggtggtgcgcaacctgtagtgtcctccgactcaggaggctcaggtagaaggatcatttgagtccaggaggtcaaggctgcagtgaactgtgatcaggccactgcacttcagcctgagcaacaaagcgagaccctgtctcaaaaagaaatataaataaaataataaaaaggtaaggccagggccgtgatggctcacacctgtaatcccagcactttgggaggccaaggctagaggattgcttgagcctaggagttcgagaccagcctgggcaacatggcaaaaccccccctaataaaaatacaaaaattagccaggcatggtggcacatgcctgtaatcccagctactcgggagcctgaggtaggaggatcacccaagcccaggaggttgaggctgcagtgatcacaccactgcactctagcctggataacaaaaggagaccctgtctcacaaataaataaataaaaaggtaaagaaaaaccatgagattaatatcaataatagtttaattgagctcaacatattctcgtttcaacatatgatcagtataaaaagtgagatattttacatttttgtttccccttgtgtcagttttcagaatctagtgtgtgtgactgggcacggtggctcacatctgtaatcccagcactttgggaggttgaggcaggtggatcacttgaggccaggagtttgagaccagcctggccaacataatgaaaccccagctatactaaaaatacaaaaattaggcgggcatggtggctaacgcttgtaattccgtctactcgggaggctgaggcaggagaatcacttgaacccagaaggcagaggttgcagtgagctgaaatcgtgccactgcactctagtctgggcgacagagcgagactatgtcaaaaaaaaaaaaaagggtctagcgtgtgttttatatcatagcacttcttggtttggaccagccatatttgcagtgcccagtagctgcatgtggccagcaaccctgatactggatggtgcagctctagaagattttcctccaagaaaggggggctttttcctccccacaggagccaggtccatctggtctggatgcctccaagctgcagaatgtgttctttgcctgagccaaagcctctctcccctgtgcctccccctccaccagccagcgctgccctctggggctctcccttccctggacagtctctgtcaggtgtggacacgattggggcatgtccccctggaattttctccaagtcaacccttgagtgttggtttctccccctggacacaggaggaagatccccaatgatttaataatcatagaaatgatgaggattggccaggtggctcaagcctgtagtcccagcaatttgagaggccgaggcaggtggatcacttgaggttagaatttgagaccagcctggccaacatggttaaactccgtctctactaaaaatacaaaaattgctggtcatggtggtggatgcctgtaatcccggctactcgggaggctgaggcaggagaattgcttgaacctaggaggcagaggttacagtgagctgaagtcatgccactgctctctagcctgggcaacagagtgagactccatctcaaaaaaaaaaaaaaaatgaggatgacgtttctgctaataagcagtaggccctgggccaagaagtggtgaggcttttcttccttctttagggaagtgacatcactcaccagcatcccttagcttgtaggattcagagccaagattgcccccagagcccccgctgttggccaggtctctttcccctttccctgtctctccctggccccaggggacaggatagagacttgagggagggcagactgagttttccttcatagcataaggaagagctgaaaagtccccgggctcagtggctcacgcctgtcatcccagcactttgggagactgaggtgggcagatcacgaggccaggagattgagaccagcctgggcaacatggtgacaccctgtctctactaaaaatacaaaattagccgggcgtggtggtacacgcctgtagtcccagctacccaggaggctgaggtgggagaatagctggaacctgggagtcggaggttgcagtgagccaagatcacaccactgcactgcagcttggatgacagagcgagactctgtctcaaaaaaaaaaaaaaaaaaaaaaaaaaagaaaagaaaaaagaaaaatacttagcttcttttcgggccaggtgcggcagctcacacctgtaatcccagcactttgggaggccaaggtgggcagatcacgagatcaggagattgagacaatcctggctaacacagtgaaaccctgtctttactaaaaatacaaaaaattagcagagcctggtggcacacgcctgtaatcccagctacttgagaggctgaggcaggagaattgcttgaacccaggaggcggaggttgcagtgagccgagattgtgcyactgcactccagcctgggtgacagagcgagactctgtctccagaaaaaaaacagaaacgtccccaggccagggcagaggttgggagatggagcgtgggcacgcacaagccccttcctccccggcagcatttgggacaacatggcagggggcctgtggccaactgggcctctgcgagaggaagtgaggccaactcctggctggggattcacagcctcaaagtgtttctcatcttggtttctcatgttggtggcttcaggccttttttggaaccgtctgctgcctctttatagtcatgtattcaactggtcatcaccgagcctgtgcaggcgccccatgtgtrttcaaacaggccctgcccctacccgcatttccgcacagagtttgcagactggttgcagggacagacagcaggcaggtaaaccactggctaagtggttttggatagtggtgaaatgttgtgaaggaaacaagctggcaggagaatgactgcataggctcattcagtggggtggccagggaagccctgtggaagaaggacattctgccagggacttgaatgccacggaggagccaggccacgaagattgtgtcagggcatgggttcctgggacacggggcagcacgcctgaaggccccgggttggcatgtttgagaagtggaaggtggtgagggttgagaggtcaccggggctacggtgagtgtctggggttccaaagctgcgggatgccatgatcagtcacttgtttttatttatttgtttgtttgttttctttttctttttgaaacggagtttcgctcttgttgcccaggctggagtgcaacagtgcgatctcagcttcctgtaacctccacctccctagttcaagcgattctcctgcctcagccttccgagtagctgggattacaggcacccgccaccacatccggctgatttttgtatttttattagagacggggggtttcaccatgctggccaggctggtctctaactcctgacctcaggggatctgcccgccccagcctcccaaagtgctgggattacagtgccctactgagctggggtttctgcctggggcatttggtgatggtggcgtccccatgatcatgaggaactgggattcgttgagatttggggaggcagttctggcattccaggtcacattgatctcagcaggtgagtgcaaggtggatgccaggagaccgtgagccgttgctggtgggcaggggtccgggctctggaggctgcaggtgccrgcaggtctcacgtcccctcctttcccacctcccaaccacagtgatcaacaaatacaagcgcagacgatttcagaaaaccaagaacctgctgacaggagagacagaagcggacccagaaatgatcaaggtaaaygggcagggttgtcagggcctatagggaccaagccaggccattcacagctcatcccagaccactggggctgtcatctgtcaccaccactgaaccaccatgccggctcggtcatgccacctcccctccctgagcactgggctcctcctctgggaaatggggtcaggaggcagctgtctctcagggagtgaggaggatcccagacaaggttacctgagcctcttgccagcctgggaggggtctacatcacagtcccattgtcacatgaggacacttgctcagtctcagccggaagtggcaggccagggactctcacccacacagccaggccccagagcccaagctcagcctggctccaagcacacacacgagaatatggctttagtaggaactgcaggattcatagttgctgtcactcccrgtgggctggggagccgggcagttaatctgtggttaacctgcagtgggcactaagagacttcctctctctgcgggtggtcctgtgttgggggggtggtccctgctcatggagctgaggccaccgtgcaagagtgtgtggagcctgctgtcatgaggctgggcttcgcagcctggcctaggatgccagccctgcctctacctctacctcggttttctacatgtggrgtgggaggatcctgtcggtggccggaagggtcctgggtggcggaatctctaagcctagggaggagagccttctgccagcagttgctgtggtggctgatattctgctgccagggttgtcaggggagatggctcatgcctgttttcccagcattttgggaggccgaagcagaaggatcacttgagcccggaagttcaagatcagcccaggcagcatagtgagaccccatctcttccaaaaaagagaaaaaagaaagaaagaaaagaagctgtccatggtggctcacgcctctaatcccagcactttgggaggccgaggtgggaggatcgtgcttgagcccaggaattcgagaccagcttgggcagcatagtgagaccccatctcagaaaaaaaagaaagcaaagattaagattttctcgggaaccctggggaggaagtgtacagagagtgatagtccccgagcacttycacctgcctctgaggtccttccccccatgttgcctcagagggctgaggactatgggcctgtggaggtgatctcccattggcaccccaacatcaccatcaacatcgtggacgaccacacgccgtgggtgaagggcagtgtgccccctcccctggatcaatgtaagctccccagccctgccagctgcctgcagagcctttgagagggtgctcggggtccatctccttgtcttctcctggccctgtccccctgagagagctttccagggctccaccctyccaagctcccaccctgtcctatccccttcccatgtcctctccctctcccacaccaccacccctggggaccccaggactgacttctacacgccagcatcggtccgcaatcaagtgycatccagcccacaaactgttttcaaaaaatgtcttatcacttgccagcttttgaaattgaggcagtatcacttaaaagccacaatttctggcttattttataaaactgggttacatggtcacccacrgggcagccgtgggctggagctgagccacagctgcccccttcagtggggacctgcctgccctttgcctcagtcccctctgctgaggtcaaggcrccctttagctcctcatggtgtggcctagaaatgtcccctgtcctccagtctctgtagaggggccctgttgggtctctccagacatctgaggcctgcgggtaccctggcctcctgcccgggccaaatggtgcccctgccccacrtgctgcagatgtgaagttcgacgccgtgagcggtgactactatcccatcatctacttcaatgactactggaacctgcagaaggactactaccccatcaacgagagcctggccagcctgccgctccgcgtctccttctgcccrctctcgctttggcgctggcagctctatgctgcccagagcaccaagtcgccctggaacttcctgggygatgagttgtacgagcagtcagatgaggagcaggactcggtgaaggtgagtgcggccggtgtgggygggacttcccggtgccttcctgggcgcaagaggccaagaggaagtgtgccaggcctgggctgtgggacctcccgcctggtgctcctctgcccacagtttcacaacctcccaggtcccttctccacagtgaaaggaagtgggcacccagccctccagccctagatgactgggggtcctctccccaggctgttctgttggaccctttgggtccagacctgtcccttcctccttctgtcccagaccttgtgtccctggccctggctccaactctgtgtctctgccatctcactgggtcctgaaatgtcagcctgtgtctgtggcgtgaggctcggctttgcctcctgggctgtcgtcactgttgggtctctgctcctggctcccagtgtcccttcacccactccccgcagcactcccttggcctctgcctcttcccctagtgccatctccccgtctcttctgtctttgtgagtcrccctcctctctctccccatctgcccatctctgacccagtctcctcctggctggcccaccttcagcctccctctacaggcggccccaggggcagccctcgggacaaaagctagtgaaggtgctcctgggtggggacaggctgtgctcacatgtgtcccctgcaggtggccctgctggagaccaacccctacctgctggcgctcaccatcatcgtgtctatcgttcacagtgtcttcgagttcctggccttcaagaatggtaggaacaggaccccagggctagtgagaggctgtgcagggtgggggacaggacctgcccccttcctcctcccctccctccccacatgtcctccccctgcctggggtctctcagccccactctccagaggcctagtgagctggggaggggcagtggccccaaaactcccaacccagaaattcccacccaccgggtgtggagctgagggaggggctggcccgctggtggggcagaggccaggccaatactgccaggaagcagggctggggaactccagagccaagagcagggaagccccggagctgctcccgccaccctgcccggcaggctgcctgctgcgggaggccgcttagggctgagtggacggggcctgcccaagtgggaaggaggagcactgtcccccaaaggtccctaggttctaaggctgaccatactgatggccagcgtttgaggagaagcagccacatgccaggcactgtcctgggtaccctccccagtagctccttgagccctrtgggagccagaggctcagggatgtcacttgcccagtcacacggttcctaaggggcagatggttccagccccaactctcatcttctaggccctgcaggccacttcttccttgcccagagcaccccagtctgaaggagtggcctgcggccctgtagctcccgcaggcggcaagaggaatgagtagtagtattcctggtattaagatgctattgccggcctggtggtggctctcgcctgtaatcccagcactttgggaggccaaggtgggaggatcacctaagccccggagtttgagaccagcctgggcaacaaagcgagattcgtttctacacaattttttttaagaattagctgggcatggcagcgygtgcctatggtctcagctactcgggaggcttgggcctgaaaggtcaaggctgccgtgagccatgatcacaccactgaactccatcctaggcaacagagtgacaccctgttccaaaaaaaaggacgctcttgccattattgagaactaccatctggaagaatgcagtgtcatacgggcacaggagctggtgccgaccccagccagccatctaccagctgtcgctgggagacgggacccttctgcctagragctggcttggctggggtccagtgagaaatgaggcacaagaaggctgtcctccccagtgtcatgcagcagggggcgcaggcctcacttggcaccagtgctgtgtggcctccctggtctaaggagaggcttgggcccaactgctcccacgagaacccaccagaaccctgtctccagacccattcttctcagttgggacaggggtcattctgatgggcaggggtgggtggggtgaggctatggagtgtgccagagctctgggatgtgggggagctctgggatgtgggggagctctgggatggggtagggtgcacatggaccagaattcacagccctcactccctgagtgcagagctggccctgactctgcaggactgcagacctggctccaccactgtgctacagacgtggtggctcagcctcctgtggctgcggttagatgctcagccgggcggggtcaagagaggggtgtccgtggtgagaccagggctcagagaggagcaygctgacatggatccttggcagcatctaggcggagcactggaaggagctccagactggagcccagggcccttktcagtttcctgagcatggctgtgagccagttccttcccggtgtcagggcaggggcctggaggaggtggtcttgaagtgcatgccacagatcttccttcccagggagggcgagctggcaccatggtgtggcacagaccccgcgtcccttcagattctgccatgccaggctgtttggcctcagggaagcagcttccctgaccagtccttagcacctggcacgtggtgagccctgtccatggcaccagtcaccgtcaccatcagtcaagggactgcaccttggggtgctgggtgctgacgtcctatgggagggctccaggggtgccgcctgtctggtgctctgggggtcacccaatgaatatgagagccttcctgggagagaggggtctcgttcagcacccctcctgaggacccagccccaccccagggtgtgaggatgcaggccaagggggcctgagggagctgcagtagggtctcagcacctcctcagcctcctggttccccsctaccccctgcgcacagatatccagttctggaacagccggcagtccctggagggcctgtccgtgcgctccgtcttcttcggcgttttccagtcattcgtggtcctcctctacatcctggacaacgagaccaacttcgtggtccaggtcagcgtcttcattggggtcctyatcgacctctggaagatcaccaaggtcatggacgtccgggtaaggctggggcgccatgctgtctcgggagctgcaggggttgggagggggtagtgtggcccagctggaccctggagctggcccccgggggattcccagcaagtgcctcactcccaggactgaggggattttctcaccaggggattttttgggtcacacatggggcaggggamctgggaacggtggggaagggcaggggctggttctggcttgtggggtgggagccagcgtagcaactgaccatggcacccacctcatccacagctggaccgagagcacagggtggcaggaatcttcccccgcctatccttcaaggacaagtccacgtatatcgagtcctcgaccaaagtgtatgatgatgtgagtgtcctgcacagtgggcccctgggggtggtctccaggtacccacgtatccctgaggcacccggggccggccatctgtctgccggacccatgctttacagcctgtgccacatcctctgtgtcccccatctgccataamtgcttcctgggcgagtccggagtccccagggctacctggaaattccccctgcccggcctgccagaccaggtgtggtgggtgagggcggggagcagggctgccaggcagggctgaggagctggctgacagccccaccctgtggccccacagatggcattccggtacctgtcctggatcctcttcccgctcctgggctgctatgccgtctacagtcttctgtacctggagcacaagggctggtactcctgggtgctcagcatgctctacggcttcctgctgaccttcggtgagcggtccggccgccccaggagagagcaggccccatgctgcgcagggctcacagccccagtgtagragacagacccatccccagacagggacaacctagggtgggcagagctgggatatagggaggcccgagggcacacatggccccatctggggtcagagaggacttcagggaggacatgaacagtacgcttcagtcctcattctcagggggcctttgtgtcttgggaacaagtaaacaagtagggccaggtgcagtggctcacacctgttatcccaatgctttgggaggctgaggcaggaggatcacttgagcccaggaattcgtgaccagcctgggcaacttggcaagacccgatctctacaaaaaaacacagaaattattggggagtggtggtgcgtgcctgtagtcccagctacctgggaggctgaggtgggaggatcccttgagtccaggaggttgaagctgcagtgagccatgattacgccactgcactccagcctgggtgacagagtgagaccctgtctcaaaaaacaaaagaccgggtgaatcacagccaatagtgagtactgtgaagggcagagtggtgggaggatgcrcattaataggggtccgggggcccctctgaggacaggacatttaaacagaggcctcagatatccagggagagagctgtgcggatgtgacagaaggccccaccagtgcagaggccgctggtagagtgtgcccaggtataggaagtggtagagtgtgcccaggtgtaggaagtggtgagggggctggtatggccagtgcagagtgcacaggggagaggtgggagaggccatccctctgctcatgggtgctctcactgcaggcttcatcaccatgacgccccagctcttcatcaactacaagctcaagtctgtggcccaccttccctggcgcatgctcacctacaaggcyctcaacacattcatcgacgacctgttcgcctttgtcatcaagatgcccgttatgtaccggatcggctgcctgcgggacggtgaggcccsgtgggcaggtgggrgctcccaccggaacagggccctgaggcagtctttagggcccaggcctgagggggtgccayggccccagatggggtgctcagtctgagggggctcggccccgcccttgcatcacgccctctccacccaggcccacctggctgtggacgggccagcccgacctcacactgcctcccacccctctccagatgtggttttcttcatctacctctaccaacggtggatctaccgcgtcgaccccacccgagtcaacgagtttggcatgagtggagaagaccccacagctgccgcccccgtggccgaggttcccacagcagcaggggccctcacgcccacacctgcacccaccacgaccaccgccaccagggaggaggcctccacgtccctgcccaccaagcccacccagggggccagctctgccagcgagccccaggaagcccctccaaagccagcagaggacaagaaaaaggattagtcgagactggtcctcacctgctccggctcctggcgaccactacccctgcgtcccggccccctcgcctcccctccctgtcgccctttccctggacagatcaggccggggcggtgggaggcccgcctcaggtcagggcccagcgtgtgaygtaggggccggggcaggccagggtttgtttgtggaggcgctgtctgtccctctgtccctctgtgtttccagccatctcgccctgccagcccagcaccactgggaatcatggtgaagctgatgcagcgttgccgagggggtgggttgggcgggggtggggccgggcccccctacgggatgcccacggccgttcatcatcttgtccctcgtccccctaccacactccccctcctagaccgccgccctttaacacagtctggatttaataaattcatatgggtgtttaacttaaactcagcactgcccctcctcctcgtgccttccttcctctgttgccttggagaacagcttcaagcagggatgaggtggctttcctgggtctgggagagtgacctgcagggtacgggacgtgtaaaggtggggattgtgaccttgtgtcaagagccatacctggccgggcgcagtggctcacacctataatcccaacactttgggaggctgaagtggatggatcacttgaggtcaggagtttgggaccagtctggccaacatagtgaaaccctgtctctactaaaaataccaaaattaattgggaatgctggcaggcacctgtaatcacagatactcgagaggctgaggcaggagaatcatttgaactcgggaggcggaggctgcagtgagcccagatcacacactgcactccagcctggacaacacagcaagattccatctcaaaaaaaaaaaaaaaagccatacccgccaggccaggcctcttcctcacttctcgccctcccaccagccctctgagatttcattaactggcctcatttcagattgctggggaagctgcttgcagggagctcgctgccctataccctttcctgccagctgcccctgctgggtgcaggctggagcctgccatgtgcccgctgaatgtctcctaacccgacaccaccaggcagggccaagtacagctttcagccgggtcgccatgagcacctgccaccctgaggcctcagcacagcagttggggcacgctaaatgtgtgccattggctttttgcgctgacacccactcccaattttggggagcatgggggtgaaggctcagcctgcctgagtggcacctggttggctggctgtagcactctgtgagtgttggggtgtcatatcacatccccggggctgcctgtgctgacaacagaggtggcatgagttggatttcccatcccagcccctggtgctgggactcttcgcccactggataggtgagctgagcgaggcctctgtgttctgagggctggggaccctacattcccaggtttactgttttggggggtggtctcagcaacacttctgggatagggggcccaacgctgaggaccacaccaggttccttcaggctccagctgccaccccatattgcagagccagtcaggggatccatgaggccccagggagacgatggcaccctcggagccccataccacaggtccacaggccatggcagtctcccatccctcagggcagccatgggtctccattacccgccccccaactctataccattccatggatccccggtgcccttggaggaaccccagcctctgcaccatggcctgactgacaggctcctaggaaccccggaggtacagggctctgcagccccttgagactggtgggctctccagccacctggacttcctggcctcgtcacccctggttcttcctcctctcacagctccacgcccaagcctttgacaaggcccatcagctacccccacaactccctgggggtctcacctcttcattgggaccacctgctccacctgctccatgcccctccttaccctgtggtgttcttgctcagtgttctgtctggtcccctgtcccggtcctgccctccccacatcccattcacactctagctagcagctagaggaaactcttttttttctttgagacagaatcttgctctgttgcccaggctgtagtgtagtggtaggatctcagctcactgcaacctctgcctcctgggttcaagtgattctcctgtctcagcctcctgagtagctaggattacagacatgcaccaccacgcttggctaattttttgtatttttaatagagacgggatttcgccatgttggccaggctggtctcgacctcaagcaatctgcccacctcagcctcccaaagtgctgggattacagacatgaaccaccctgcccggcccagctagaggaaactttatagtttattctactaaagcacaaacctgaccctgcccagcccttgctcagaacctactgtgggtgcacagtgacctcaggagaaagcccaggctccttactggggactgagaccttggtgatggggacacttattaacccctgcatccagcctggtcttccccctacctggatcctgcccccaggcacacaacccctgtccacttctttttttctttgagagagtcttgcgttgtcccccaggctggagtgcagtggcacaatcacagccctgcagccttgacctgctggctcaagcgatcctcctgcctcagcctcccaactacctaggaccacaggcaagtgccactacgcctgcgtaattatttatttatttatttagtatttttatttattattattattttttgagatggagtctcactcttgttgcccaggctggagtgcagtggcacgatcttggctcactgcaacctccacctcccgggttcaagcgattcttctgcctcagcctcctgagtagctgggattacaggcacccaccatcacacccggctaatgtttgtatttttagtagagacagggtttcaccatcttggccagtctggtctcgaactcctgacattgtgatccacctgcctcggcctcccaaagtgctgggattacaagtgtgagccacagcacctggccgcctgcgtaatttttaaattttttgtagagttggggtctctcgatgttgccaaagctggtttcaaactcctggcctcaagcagtcctcccagctgggcctcccaaagtgctgggattacaggcctgagccatcacagctggcttatcccttctttatcttacccatgtgtcctccaagctgtggctccaatgctcactcctgtaggaagccctccctgactgccaagttctctggggtctctcatggcagccctgcccactgtgagtcatcactggggacaggttggtctcttccactggatggagccccgtgaggacatagccagacctgtcttgatcactgctgtgtccccagcatagggccaaacacagagaagccacgccaggaatatttaatgagtgcatgttgaacaaccccaacattcactttcccagacacatgaacacatccagaagtgtggacctcggtggggctcatattcagacactggagactgtgacaagcagtcaacaaatgtaacagctgaaccctgcccctgggtagtgccgtgtgctggggtgttttgtgtatacagccaggaccaagacagacccagacctgccgtcatggggctcacagcccagcagaaatcctgagcactgaggatatctgacatgtcctttttaatttttatttttatttatttacttttttttttttttttgagatggagtctcgctctgttgctcaggctggagtgcagtggcacgatctcggctcactgcagccttcgcctgtcgagttcaagcaattctcctgtctcagcctcctgagtagctgggactacaggcacctgctaccaagcccagctaacttttgtatttttagtagagacagagtttcacatttcaccatattggtcaggctggtctcgaactcctgacctcaagtgatctgcctgcctcggcctcccacagtgctgagattacaggcatgagccacggcgcctggctatcctttatttatttatttatttatttattgagacaaagtcttgctctgtcgcccaggctggagtgcagtggcgcgatctcggctcactgtaagctctgcctcccaggttcaagcaattcttctacctcagcctcctgaatagctgggattacaggagtgcgccaccacgtccagctaatttttgtatttttagtagagatggtattttaccatgttgatcaggctggtctcaaactcctgacctcatgatccacccgcctcagcctcacaaagtgctgggattacagacgtgagccactgtgcctggcccctttttatttatttgtgttctttttgagatggagtcactgtcacccaggctggagtgagtgcagtggcacgatctcacttcactgcaacctccgcctcctgggttcaagtgattctcctgcctcagcctcctgaatagctgggattataggtgcccgccaccacaccagctaatttttgtatttttagtagacatggggtttcaccatgttggccaggctggtcttgaactcctgacctcaggtgatctgcctgcctcagcctcccaaagtgttgggattacaggcatgagccaccgtgcctggccctgacatgtccttttagtcattcagcaaacttttttttttttttttttttttgagacagtctcactctgtcacctaggctggagtgcagtggcgtgatctcagctcactgcagcctccacttcctgggttcaagtgatcgtcctgcctcagcctccctagtagctgggactacaggcacatgccaccacacccagttagttttgtatttttagtagagacggggtttcaccacgttggccaggctggtcttgaactcctgacctcaggtgatccgcctgccttggcctcccaaagtgctgggattacaggcatgagccactgcacccagcctcaacaaacatttttgaggcctggcattggcaagaggcagagaggaatcaggagagcttctggtcctataacaattggagctgctatttgtcatccttatcataagccaagcactagtgtaagtgctgcatgtggttggcttcatccattacatttaatattattcagtgtcctcgtcaccttactggtccatcactctgccctcatctctacccctttcctgtcagtcactctgcaccagccttcttgctattccttaagcatgccatgcatgttcctaccacagggcctttgcacgtgctagcccctgtgctttgaacactctcccccagatatccacatgaatccctcacctcctttgactccctgttcaaatggcacctctcagaccctgatcttcctaacccaaactatcttccgaactccttctcgttatcctgctctatcctgtaatactgccatcaccatcagacataatatttgcttatctgttttccatctgtctcctcacttggatttccttgatggcaagggctttttgtctgctgtgtgccttgctatgtccctagcttttagagcagtgcctgacactgttacgctgtgtgtaataactgtaaattgaagagccaggcacagtggctcacgcctgtaatcccagcgctttgggaggttcgggcagaaggatcacttgaggctaggaggtcaagatcagcctgggcaacagcaaaatcccatgtcttaaataaaagaaagaagaccgggtgtggtggctcacgcctgtaatcccagcactttgggaggccaaggcaggcggatcacgaggtcaggagattgagaccatcctggctaacacggtgaaaccctgtctctactaaaactacaaaaaattagccaggcatggtggcgggcgcctgtagtcccagctactcgggaggctgaggagcagaatggcgtgaacccgggagtaggagcttgcagtgagccgagatcgcgccactgcactccagcctgggtggcagaggaagactccatctcaacaaaaaaaaaaaaagaaagaaatagggctgggcacagtggctcacgactgtaatcccagcactttgggaggccaagacaggcggatcacctgaggtcaggagttcaagaccagcctggacaacatggtgaaaccccatctctactaaaaaaaaaaaaaaaaagaaagaaagaaatgtagtcccagcactttgggaggctgaggtaggcagctcgcttgaatccaggagtttgagaccagcttgggcaacatggtgaaacctcatctctgctaaaaacacaaaaattaggccaggcatggtggcgcacacctgtggtcccagctcaccagctgtgtggcctcaggcaactgacttcatctctctgagcttcagtttcccgtctgtaaagtgggtctaa

SEQ ID NO: 97227 - DNA, 13711 bp, Homo sapiens
  misc_feature (1)...(13711): n = A,T,C or G
nnnnnnnnnnnnnnnnnnnnnnnnnnnnnnnnnnnnnnnnnnnnnnnnnnnnnnnnnnnnnnnnnnnnnnnnnnnnnnnnnnnnnnnnnnnnnnnnnnnnnnnnnnnnnnnnnnnnnnnnnnnnnnnnnnnnnnnnnnnnnnnnnnnnnnnnnnnnnnnnnnnnnnnnnnnnnnnnnnnnnnnnnnnnnnnnnnnnnnnnnnnnnnnnnnnnnnnnnnnnnnnnnnnnnnnnnnnnnnnnnnnnnnnnnnnnnnnnnnnnnnnnnnnnnnnnnnnnnnnnnnnnnnnnnnnnnnnnnnnnnnnnnnnnnnnnnnnnnnnnnnnnnnnnnnnnnnnnnnnnnnnnnnnnnnnnnnnnnnnnnnnnnnnnnnnnnnnnnnnnnnnnnnnnnnnnnnnnnnnnnnnnnnnnnnnnnnnnnnnnnnnnnnnnnnnnnnnnnnnnnnnnnnnnnnnnnnnnnnnnnnnnnnnnnnnnnnnnnnnnnnnnnnnnnnnnnnnnnnnnnnnnnnnnnnnnnnnnnnnnnnnnnnnnnnnnnnnnnnnnnnnnnnnnnnnnnnnnnnnnnnnnnnnnnnnnnnnnnnnnnnnnnnnnnnnnnnnnnnnnnnnnnnnnnnnnnnnnnnnnnnnnnnnnnnnnnnnnnnnnnnnnnnnnnnnnnnnnnnnnnnnnnnnnnnnnnnnnnnnnnnnnnnnnnnnnnnnnnnnnnnnnnnnnnnnnnnnnnnnnnnnnnnnnnnnnnnnnnnnnnnnnnnnnnnnnnnnnnnnnnnnnnnnnnnnnnnnnnnnnnnnnnnnnnnnnnnnnnnnnnnnnnnnnnnnnnnnnnnnnnnnnnnnnnnnnnnnnnnnnnnnnnnnnnnnnnnnnnnnnnnnnnnnnnnnnnnnnnnnnnnnnnnnnnnnnnnnnnnnnnnnnnnnnnnnnnnnnnnnnnnnnnnnnnnnnnnnnnnnnnnnnnnnnnnnnnnnnnnnnnnnnnnnnnnnnnnnnnnnnnnnnnnnnnnnnnnnnnnnnnnnnnnnnnnnnnnnnnnnnnnnnnnnnnnnnnnnnnnnnnnnnnnnnnnnnnnnnnnnnnnnnnnnnnnnnnnnnnnnnnnnnnnnnnnnnnnnnnnnnnnnnnnnnnnnnnnnnnnnnnnnnnnnnnnnnnnnnnnnnnnnnnnnnnnnnnnnnnnnnnnnnnnnnnnnnnnnnnnnnnnnnnnnnnnnnnnnnnnnnnnnnnnnnnnnnnnnnnnnnnnnnnnnnnnnnnnnnnnnnnnnnnnnnnnnnnnnnnnnnnnnnnnnnnnnnnnnnnnnnnnnnnnnnnnnnnnnnnnnnnnnnnnnnnnnnnnnnnnnnnnnnnnnnnnnnnnnnnnnnnnnnnnnnnnnnnnnnnnnnnnnnnnnnnnnnnnnnnnnnnnnnnnnnnnnnnnnnnnnnnnnnnnnnnnnnnnnnnnnnnnnnnnnnnnnnnnnnnnnnnnnnnnnnnnnnnnnnnnnnnnnnnnnnnnnnnnnnnnnnnnnnnnnnnnnnnnnnnnnnnnnnnnnnnnnnnnnnnnnnnnnnnnnnnnnnnnnnnnnnnnnnnnnnnnnnnnnnnnnnnnnnnnnnnnnnnnnnnnnnnnnnnnnnnnnnnnnnnnnnnnnnnnnnnnnnnnnnnnnnnnnnnnnnnnnnnnnnnnnnnnnnnnnnnnnnnnnnnnnnnnnnnnnnnnnnnnnnnnnnnnnnnnnnnnnnnnnnnnnnnnnnnnnnnnnnnnnnnnnnnnnnnnnnnnnnnnnnnnnnnnnnnnnnnnnnnnnnnnnnnnnnnnnnnnnnnnnnnnnnnnnnnnnnnnnnnnnnnnnnnnnnnnnnnnnnnnnnnnnnnnnnnnnnnnnnnnnnnnnnnnnnnnnnnnnnnnnnnnnnnnnnnnnnnnnnnnnnnnnnnnnnnnnnnnnnnnnnnnnnnnnnnnnnnnnnnnnnnnnnnnnnnnnnnnnnnnnnnnnnnnnnnnnnnnnnnnnnnnnnnnnnnnnnnnnnnnnnnnnnnnnnnnnnnnnnnnnnnnnnnnnnnnnnnnnnnnnnnnnnnnnnnnnnnnnnnnnnnnnnnnnnnnnnnnnnnnnnnnnnnnnnnnnnnnnnnnnnnnnnnnnnnnnnnnnnnnnnnnnnnnnnnnnnnnnnnnnnnnnnnnnnnnnnnnnnnnnnnnnnnnnnnnnnnnnnnnnnnnnnnnnnnnnnnnnnnnnnnnnnnnnnnnnnnnnnnnnnnnnnnnnnnnnnnnnnnnnnnnnnnnnnnnnnnnnnnnnnnnnnnnnnnnnnnnnnnnnnnnnnnnnnnnnnnnnnnnnnnnnnnnnnnnnnnnnnnnnnnnnnnnnnnnnnnnnnnnnnnnnnnnnnnnnnnnnnnnnnnnnnnnnnnnnnnnnnnnnnnnnnnnnnnnnnnnnnnnnnnnnnnnnnnnnnnnnnnnnnnnnnnnnnnnnnnnnnnnnnnnnnnnnnnnnnnnnnnnnnnnnnnnnnnnnnnnnnnnnnnnnnnnnnnnnnnnnnnnnnnnnnnnnnnnnnnnnnnnnnnnnnnnnnnnnnnnnnnnnnnnnnnnnnnnnnnnnnnnnnnnnnnnnnnnnnnnnnnnnnnnnnnnnnnnnnnnnnnnnnnnnnnnnnnnnnnnnnnnnnnnnnnnnnnnnnnnnnnnnnnnnnnnnnnnnnnnnnnnnnnnnnnnnnnnnnnnnnnnnnnnnnnnnnnnnnnnnnnnnnnnnnnnnnnnnnnnnnnnnnnnnnnnnnnnnnnnnnnnnnnnnnnnnnnnnnnnnnnnnnnnnnnnnnnnnnnnnnnnnnnnnnnnnnnnnnnnnnnnnnnnnnnnnnnnnnnnnnnnnnnnnnnnnnnnnnnnnnnnnnnnnnnnnnnnnnnnnnnnnnnnnnnnnnnnnnnnnnnnnnnnnnnnnnnnnnnnnnnnnnnnnnnnnnnnnnnnnnnnnnnnnnnnnnnnnnnnnnnnnnnnnnnnnnnnnnnnnnnnnnnnnnnnnnnnnnnnnnnnnnnnnnnnnnnnnnnnnnnnnnnnnnnnnnnnnnnnnnnnnnnnnnnnnnnnnnnnnnnnnnnnnnnnnnnnnnnnnnnnnnnnnnnnnnnnnnnnnnnnnnnnnnnnnnnnnnnnnnnnnnnnnnnnnnnnnnnnnnnnnnnnnnnnnnnnnnnnnnnnnnnnnnnnnnnnnnnnnnnnnnnnnnnnnnnnnnnnnnnnnnnnnnnnnnnnnnnnnnnnnnnnnnnnnnnnnnnnnnnnnnnnnnnnnnnnnnnnnnnnnnnnnnnnnnnnnnnnnnnnnnnnnnnnnnnnnnnnnnnnnnnnnnnnnnnnnnnnnnnnnnnnnnnnnnnnnnnnnnnnnnnnnnnnnnnnnnnnnnnnnnnnnnnnnnnnnnnnnnnnnnnnnnnnnnnnnnnnnnnnnnnnnnnnnnnnnnnnnnnnnnnnnnnnnnnnnnnnnnnnnnnnnnnnnnnnnnnnnnnnnnnnnnnnnnnnnnnnnnnnnnnnnnnnnnnnnnnnnnnnnnnnnnnnnnnnnnnnnnnnnnnnnnnnnnnnnnnnnnnnnnnnnnnnnnnnnnnnnnnnnnnnnnnnnnnnnnnnnnnnnnnnnnnnnnnnnnnnnnnnnnnnnnnnnnnnnnnnnnnnnnnnnnnnnnnnnnnnnnnnnnnnnnnnnnnnnnnnnnnnnnnnnnnnnnnnnnnnnnnnnnnnnnnnnnnnnnnnnnnnnnnnnnnnnnnnnnnnnnnnnnnnnnnnnnnnnnnnnnnnnnnnnnnnnnnnnnnnnnnnnnnnnnnnnnnnnnnnnnnnnnnnnnnnnnnnnnnnnnnnnnnnnnnnnnnnnnnnnnnnnnnnnnnnnnnnnnnnnnnnnnnnnnnnnnnnnnnnnnnnnnnnnnnnnnnnnnnnnnnnnnnnnnnnnnnnnnnnnnnnnnnnnnnnnnnnnnnnnnnnnnnnnnnnnnnnnnnnnnnnnnnnnnnnnnnnnnnnnnnnnnnnnnnnnnnnnnnnnnnnnnnnnnnnnnnnnnnnnnnnnnnnnnnnnnnnnnnnnnnnnnnnnnnnnnnnnnnnnnnnnnnnnnnnnnnnnnnnnnnnnnnnnnnnnnnnnnnnnnnnnnnnnnnnnnnnnnnnnnnnnnnnnnnnnnnnnnnnnnnnnnnnnnnnnnnnnnnnnnnnnnnnnnnnnnnnnnnnnnnnnnnnnnnnnnnnnnnnnnnnnnnnnnnnnnnnnnnnnnnnnnnnnnnnnnnnnnnnnnnnnnnnnnnnnnnnnnnnnnnnnnnnnnnnnnnnnnnnnnnnnnnnnnnnnnnnnnnnnnnnnnnnnnnnnnnnnnnnnnnnnnnnnnnnnnnnnnnnnnnnnnnnnnnnnnnnnnnnnnnnnnnnnnnnnnnnnnnnnnnnnnnnnnnnnnnnnnnnnnnnnnnnnnnnnnnnnnnnnnnnnnnnnnnnnnnnnnnnnnnnnnnnnnnnnnnnnnnnnnnnnnnnnnnnnnnnnnnnnnnnnnnnnnnnnnnnnnnnnnnnnnnnnnnnnnnnnnnnnnnnnnnnnnnnnnnnnnnnnnnnnnnnnnnnnnnnnnnnnnnnnnnnnnnnnnnnnnnnnnnnnnnnnnnnnnnnnnnnnnnnnnnnnnnnnnnnnnnnnnnnnnnnnnnnnnnnnnnnnnnnnnnnnnnnnnnnnnnnnnnnnnnnnnnnnnnnnnntagaggagagccctggccatggggcacccagagcacacaccggcccctctagcccagaacagccccatgccaggactgccctgcctgtagagtgcatgcagcacacacacacacacacacccagcacacacctccccacaatcctcagctgtggggggcggttgtaccaaaggcttcaagaagccactgggagcacagagcactcccaggctctgctgtccccgcccagctggcctctatccaggtagggacactggccttccccatgtgatcagtggcagcaggtgtggctgtcgggggccctagccttatctcctaggatcaactctgaaacgacaaccaactgcactgctaccctggccgcagaggtacagatgccactgtttgtgcctttcagtgcagtctctggtctacagtgacaaaaggactcaagaggaggatgagaaaagttgccgtgtaacttttgcagggatgagcccaacagaagcccttcacggtctccctgacccctgccagcaaaaggagcactcctttagtccacctttagtccacctaagacctctcaagtagctgcatggctacacccccgttcaatgtgacaaaaccaccacaaatggccaagggtatgacaattgctagagaactacaacaggacctgtctctcacaacaaacccctctcctctccaaactaacaagagactgcttgccctcacagtgacctgatcttcctggagagaagcagcagcaagcttctgttcacaattacagggcaaggaatgtcgacgagggtgagaatcattcctccccaggatcgacaaaaggcacagtggaattctgcagagtccaggaagtttggagttgctaagaaatttgctgctgcagacacaagccacatagggccttaccagggtcaaggcatgaatactgtgggactgaaggtgagtgacagaagagagacacctgtgtccaggacacgctgcacaggaatccctgggactctctctctgtcatgttnnnnnnnnnnnnnnnnnnnnnnnnnnnnnnnnnnnnnnnnnnnnnnnnnnnnnnnnnnnnnnnnnnnnnnnnnnnnnnnnnnnnnnnnnnnnnnnnnnnnnnnnnnnnngccgcccctctcttcccaggcctcaccagccccagcgcagccggcggcaccaggccggtgctcacggtgttccaggccactaacaactcctgtccgggccgggagtcgctgtccccctccgccaccacaactgccgccgccatctgcacccaccgactccgagattcgctcggcgcggcgcgcggcgatgacgcacgtctgcacgcgcagccatgacgcgcacaaggcgctcagcgatgacgcgctagttcggcgcgccgtgggggagtcgtgcgcaggcgcggacagcgctgcttccgcggcggttggggtggtggggccccgggcggcgttgaccatgacccagcagggcgcggcgctgcagaactacaacaacgagctggtcaagtgtgagcggcgcagccgggacggggaggtcgggagggccgcagggccgggttcccggctcgcagcggggtgcccctggacccgcctcgctgcgggcatcgcgcggctgagcagagccctccgtgccggaggccgggtgtccgtggcccgagccctcgctggctcgcaggccccgcgccgggcgctcgggggtggtgcctgactctggcttcctcgggtggaaggaggcccgccctccgccgccgcgctcctgccctgggcccacagcgccgcccctcccggcccccaggcatagaggagctgtgccagaagcgggaggagctgtgccggcagatccaggaggaggaggacgagaagcagcggctgcagaatgaggtgaggcagctgacagagaagctggcccgcgtcaacgagaacctggcacgcaagattgcctctcgcaacgagttcgaccggaccatcgcggagacggaggccgcctacctcaaggtggagctcgggaggccaggccgagcatcaggggataggcacggcaggggtgttgccacggcaaggcgtcaggaccggctggggctcccggctgtgggcagtctgtgcctcgctggcatttcgggcaggggcagcgtggccaggcccattgaggaacccaggctgctgtgggagtgactgtggggctgtctgtggggcctggggcatcctgggtcctggtctttatccggttctcgctagccatgtggttatttctgctcagtgtgaagagccaggtcttgggcagagcacccagcacgggccagtgctaacccagcctggctttgagggtggagaggaagtgttttgggtcagattccggagggaagagggccctgccaccccgtctgccagtccccttgggcttccgccttcccccacacaggatcccttggctacagcacccccagccaggtcccagcacctgagtgtgaggacagctggggcttaggaccttaccaacaggtgaacattaacaaccttctcacttctctggccccagatcctggagagctcccagactttgctcagcgttctcaagagggaagctgggaacctgaccaaggctacagccccagaccagaaaagtagcggcggcagggacagctgaccagaccacgggcagggcctgcctccgtgtgcccctcagctcagccccagcaagtgtgtgctcagagcatctttgttcttcacggcagcagctaccttccctcactgtctcaggtgccragaggggcaggtgccagcctccactggcatcagtgacaagcccagggcacagcccacccgggggtcctcgcttcatgctcacacaggctatggggatggtgggctccaggtcagctctgcaaggggcttgtctctgtggcacccacactcctgccctgccagggaggctctggttgtytgagcaccatgggggccccctcaccttgtccctcctcagccagcagaggcccagggcaagggacaggaggacaggggttctccttcaccrcagaacccaaacctcaggtctcacccctgtggcctgtgattatgaataaagattatctttgtaaagatccgtgccagcctgctgcttgcccgtatcaacagcatggggctgccagacacctgcagagccagagcctgaggctcccccttgggagaggagggaggagggtctggagtggcctccctgtgactgccccactagcctcagggacaccgctgagggtgcccaccctccccaggccagccccaccctgagccctccccagcagggccgccggtcctcttcccctgactggcccacggctcaccctcctctcaggnnnnnnnnnnnnnnnnnnnnnnnnnnnnnnnnnnnnnnnnnnnnnnnnnnnnnnnnnnnnnnnnnnnnnnnnnnnnnnnnnnnnnnnnnnnnnnnnnnnnnnnnnnnnnnnnnnnnnnnnnnnnnnnnnnnnnnnnnnnnnnnnnnnnnnnnnnnnnnnnnnnnnnnnnnnnnnnncatatccagcagctgcctcagattcaggtccctctcagcaaggtactggggggagttcacaccccccacccccgtcggttcctcagttgcaagttttgcttggcctgatgacaccactgctgccaccaggccctgctgcccacctttccctggccgcacaccaagcactggccacttccatccttccatgtgccctggggcctctgttttgtccctgcagcaaccaagcatggcccgaggactgggccgatttgggaggcatgtgttgatccagagggtccagaaaagagctgggcctaacccgaccagggaaatacaccaaactctccttccgccggagtttggccagacagcatctctttatctctttgctcttaggtttgatcctccagggaggaaatggtgcttgggttccatgggctgtaaacagccccagctctggccgtctgaggcaggcgctgctcccggcctgcctcatcctgtgggtcggggggcacgccaagcccagcagaagacaccgtcccctgtgctgccctcatgctgcccttcccttggtccctccccaggctctgggcccctcagagaagccacttcaggcccaacagctgcaacactctcaccctcccacctgaagtctaggcccctgacagcaggcctgtcatcctacctcccacagtgccagctctgggaggctggggtggaggggcaacaggttaacaggccatggaagttgggaggtcagagccttggccactgggacatcaaggagtgggggtaccagatcggggtcacctcccacacaccctggcatagacgtgcaaactggggcccactgtaccccatgtggcctcttcctgcagagacctgcccctgctcccttctcagccaaggaccacgcagtggggacaccagcagccttgtccagtgctgtttattgagtccatcatcagaggcaggaaagacgccactcatcacagagggcatgtgggctgcgggcaggggcttagggtcctgcagaggacaagtagctgggacagcccttcaccccgacaccccatggccactgtgaggcaggctgaggagacaggacagggaatggccaggtgcagaatctgcacagccccctgccgggtcgcagatggccaccacccagcaggcccctggcactcacccacaggcagttccccaccccacttcccccttggaccctcccaaatcagggccggggagtgagacccagacctggccccgatggcaggaggcaccctagctgcttccagggccaggaggggtgggtgggatacagtgaggccaaacaaggcagaagcgggtgcagtagtccctggctactgcccagcttccgggactcccacagctgggctcagccttggtcctggcagtgctgggctcagaaatacagggctggctcgctgcggaagtccgagaggtcattctgactggcgggtgtgagctgaaagtgagaggacagaatgtggacacatgggctcgcccgggtgtcagactccccccagcgctccactcccccgcatctcaccatggcctccacgggcgggggctctgcctccctcggggcctgctccagcgcctgctcctgccacttgctgaaggccacagagtgcttcggggtgtagctggacaggcctgtgaatggaggtgcacatgcagacgtggacacagaccaggctccacccctcccaggctgcctgtcccccaggtgggcactcacctgagctaccctctggcagccgagagctctcgggtctcacgctgctcacaaacgtggcccggggcaggaagagtgcaaagggcttctcctctgagccggatccctcttcctcctcttcctcttcctcctcctcctcctcctcctcctcctgctggtccacctcttcctcctgctctagggagctctcggaagggtactcaaatgtggtctgcaggcttttgtcgttgaaggagatcttcatctgggagtgagagtcacgtgaacgagggctgagggcccacatgggcacagtgatgccaggggctcaggttcagccctcaggatgaggctgacccaagtggggcgccagacacaccatcaaccgttccgggggctccaggagggggcacagagctctccagctggaccctgcaggcgtccatccctccaccctgggggtcaacctcccctccccattccagccagggaccaaacgctgaccaggaccaggagcccaaagcctctgggtccccagaagcctctagaccagctcctggagctaccatctcaggcccctcctgctctgctgtctgggcagagtgccagctggggggaaactggggtggacacatcccctcccaccaagcagctctagagcaggaacagggtggaaaagaggctgtcccctcaggggccttgcactctaggctccaggcagctcctgctggtgtctggggcctctctctaaagccaagttcatgtcctggcttactggatgcctggacaatccagcagagcatggaccccccactgtgaacaggggcctctgtgagccgtcaaggccaggcagtagcctcaggcaccatcacccacctaacatagttgagagttggcctgcggctgtgcagagtagggggctgcctccactgagcctgggtgccagcaaccccagcagtgaccccttcctcaccctgctgcccctctggccctcgtcctccatccccacttcgtaggctgcaagatttcacatctgagcaaattctttccttctcccagtggccttgaagcccaggcagggctgctggttcccaggggtaatgggggcagtggggaccaatggtcaggactctccacctcccctgaacggggcttgcatggggctaagctccccacaacagccgagctcccactgctcagctgcactcagcccggccccagtggtccctaatgaatatgagcggcccccgcttgcagcagatggaagcagccctgagggagctcgaaatattaaactcttcctgggcacaggacaccagcagctcaagttcctcctcctcccctagaaggacccggaggcaggagccgggccccaggcagagaaccaccgcagccaggcacaggacgagacggcctctcaggaggcagccgaggaggccacacagggctgccaggacagggccaagggcacacactcttgccatcatgctctctcccacagcggccacacggcccacacagccaggtgtaccctcaggtcccttctcaccacgaatacccccgcctcccacagctggggggccacgctttgtgcccaaacccccagcttcccctctcagcacagctcacacagagccctgctgggcaactcagctgcctgcttgcacccctaccccaggccccggcaccccagccgtctgcatggatgagcgggggagggggaggccacctgggccagacaaaacaaggaggaaagcacccgctcctgtcccttaactgccctgcctgtggctaggcccacctggccctccaacgctcatcccacaggaggccaggcagggagaggctgggacagacctcacaggcacccacccactgccagcccacttggggagggggtcacccggccctcccagactcatgctttgggacagataccccaggtggaggtgctcaaggcaggacagggctggtggctagagctctcccacagccccgaagtccagcagcaaatggggtttccagtcgccctggatatgtggagctaacccagatgaccccgaagccctccaggcccagcccccacggctgagaacacagaagggctggctgccagggccgcgggattagtgccctcactcgtgcacatgaccggtcccagcaggggggccgcgggggctgggtgcacatgggccctgagcctggtacagcctggccaggcggtgcggggcggggggtggacaggcagcccctgtctgccctcagctggggcccggggctctggtcacgtcctgcctccccaggtctcctcagctgggctggtgcctgctgactcgcacagccctcccctcccactgtggggacaggacaccccgtgactcatacggtgggcagcctgaagaccccgagacgcaggatgggcagagggtgtggccagggtctgggaccgcacgcacctggccgcagcctatcagggactttgcctggcacagccaacagagcaggcaggtgggtcccagctcagcccagcctcccagcagagcctcccggcttctcaggacccttctgttctcgctccacccaccctgcctgtgcacacctagctttggttaccaaagggcctggcctccacctgggacaaagggccaagcagccagccccaacctgcccagatggaggtgtgagctgagcccagccccgcctctccctcctccctgcacacagctacctgcctcccatcccccacgcagccccagccaaggctcccacgggtggccggaccctagaccaggctgcacgagtgcaatgcccagagcaggctcccgggaagctgggtgctccctgagtcaagtgtggccccagcgccaggcacggcctccacccatgagaaagctgagggaggagcgtccaggccgctcctggggttcccggcttcagaaggaccacctaggcggcacctatgggaagagctggcggagagacgagaaggaaaggaaaactgacaagaagggactcagccaacaacagtgagagcctctggccacccaggatctgcctgcacaggggtagaggcagggaggagcccagcctggggcttggtgctggccaggaggtggtgtcagtaggaagggcagatgtcagggtggctcttgggtctaaggatcagagagcgaggccttgggagtggaggcggaagttgcacagcaggtgagggcggacggccctgggtgtccaggactgagccctggggacactgacacgctccagctgggcagagagccaagaggggaggaggggagtagggcagaggggacgggaaggggccgccagacaggtaggagccaggccaggtggtgctccacgaagaggaaaagctacagcgccgagtctcaagggaggcaggtgtgaggatgagaatgggtgtcccaccctccaggaaagcagcccgggcgtggctgcagcacacagcagtctgctccaagctcagccctgcaagacggggcacctgccgcttctgccaatggataacttaagtgggcctgtgcctgccaggcaggcccccaccccggcacacaggccagcagctccccactgcccagagcagggctgcacccctcggaggcgggcaagggtatcataccctgtgcaggcacagccagccctggggcaggcccctcaccgactcccaccacccagacaactccactgaagagctgcccttcacctgtaccccaggaaaagcagcagcaccgccagccgctgaggtgcacagtgagccgttggcccacagtcaggtcctgctagactccgggccctgcaatccctgcactccacccccacgcccgggg

SEQ ID NO: 97228 - DNA, 103623 bp, Homo sapiens
agtgttggaagttctggccaggcaatcaggcaggagaaggaaataaagggtattcaattaggaaaagaggaagtcaaattgtccctgtttgcagatgacatgattgtatatctagaaaaccccatcatctcagcccaaaatctccttaagctgataagcaacttcagcaaagtctcaggatacaaaatcaatgtgcaaaatcacaagcattcttatacaacaataacagataaacagagacccaaatcatgagtgaactcccattcacaattgcttcaaagagaataaaatacctaggaatccaacttacaagggatgtgaaggaccttttcaaggagaactacaaaccgctgctcaatgaaataaaagaagatacaaacaaatggaagaacattccatgctcatgggtaggaggaatcaatatcgtgaaaatggccatactgcccaaggtaatttatagattcaataccatccccatcaatttaccaatgactttcttcacagaattggaaaaaactactttaaagttcatattgaaccaaaaaagagcccacattgccaagtcaatcctaagccaaaagaacaaagctggaggcatcacgctacctgacttcaaactatactacaaggctacagtaaccaaaacagcatgatactggtaccaaaacagagatatagaccaatggaacagaacagagcccttagaaataatgccacatatctacaactatctgatgtttgacaaaactgagaaaaacaagcaatggggaaaggattccctattcaataaatggtgctgggaaaactggctagccatatgtacaaagctgaaactggatctgttccttacacctgatacgaaaattaattcaagatggattaaagacttaaatgttagacctgaaaccataaaaaccctagaagaaaacctaggcaataccattcaggacataggcatgggcaaggacttcatgtctgaaacaccaaaagccgtggcaacaaaagccaaaattgacaaatgggatctaattaaattaaagagcttctgcacagcaaaagaaactaccatcagagtgaacaggcatcctacagaatgggagaaaatttttgcaatctactcatctgacaaagggctaatatccagaatctacaatgaactcaaacaaatttacaagaaaaaaacaaagaaccccatcaagtgggcaaaggatatgaacagacacttctcaagagaagaaattcatgcagccaaaagacacatgaaaaaatcctcatcatcactggccatcagagatggccacaatgagataccgcaatgagataccatctcataccagttagaatggcgatcattaaaaagtcaggaatcaacaagtgctggagaggatgtggagaaataggaacacttttacactgttggtaggactgtaaactagttcaacctttgtggaagtcagtgtggcgattcctcaggaatctagaactagaaataccatttgacccagccatcctattactggatatatacccaaaggattataaatcatgctgctataaagacacatgcacatgtatgtttattgtggcactattcacaatagcaaagacttggaaccaacctaaatgtccaacaatgatagactggattaagaaaatgtggcacatatacaccatggaatactatgcagccataaaaaatgatgagttcatgtcctttgtagggacatggatgaagctggaagccatcattctcagcaaactatggcaaggacaaaaaaccaaacatcacatgttctcactcataggtggcaatggaacactgagaacacatggacacaggaaggggaacatcacacactggggcctgttgtggggtggggggaggggagagggatagcattaggagctatacctaatgttaaatgacaagttaatgggtgcagcacaccaacatggcacatgtatacatatgtaacaaacctgcacattgtgcacatgtaccctaaaacgtaaagtataattaaaaaaaaaaaaagaaaatgcattgagaatgattttttttcctcaggagggtattttaaagaaaatgaaattatggctaaggagtttacaattttcaagaaattcatcactcatatataataatgttcatgaactcaatttataaacaaccttttaccaacctttatgttttataatacatataatgcattataaatacgtatatacatttataatacatataatgcattataaaacatatttatgtatgttgtagatacatatataatacattataaaatataaaggctggtaaaatattgcaaattaaaattttataaaatgagacatttcaaacattctttgaaagaaagaaaagcagaaataaaactttagattatctgtatccattgaaagtgttcccaaggatggagaactaaaaaggagttactagcaaatatgtatctgttgtgattaagaatgcagaactaaactacagttttaaaatctaacttaataaatgtgtgactttgggcaaatcaattaatctctcatgcctctgttttctcacctatgaaaggggagcaataatatatctaacaatattgggatgagctagggtattatccattatcagtcaactccacaaattcagtgatttacacaacaaattttacctctcattcatacaaaacttgctttaggttcatacagatctccagagcaagacttaatctctcagttggctcaagatttcaggctgcttgagtcttatactaccttcttataaacaggagcccccaggctatcacagagaaggagaaatcatgcagacccaagcattagttattgctggcttccacctcttattagatgacaatgttgattattataaagtaggcaggaaataaaatagagataaggttaacctgaacttttaaaaattgtatcatttaattttagaactggaaaggtctctaaaaataatccagtcaaatccctcactatgctttgaatgtgtcccccaaagctcatgtgttgaaaacttaatacaagtgcaagagtcttggaaagtggggcctaaaaagagatgattggatcacgagggttctgctctcatgagtgaattaaggccattacctcagaagtgggctagttacagaaggtgggcttgttataaaagtgagaccatgtgcagaggctcacacctataatcccaacaccttaggaggccgaggtgggtggatcacttgaggccaggagtttgagaccagcctggacaacatagtgagaccttgcctctaaaaaatacaaaaaaaaaaaaacaaaaaaaaaacaccgtaactggtcatggttgctcaaacctgtagttccaactacttggaaggctgaggcaggagaatcacttgagcccaggagttggaggctttagtgagctatgatggtgccactgccactccaacctgggtgacagagcaagaccctggctctttaaaaagaaaaaaaaaagtgagttcagccccctctttctctctttctttctctcatgctctcttgccgttctaccttctaccatgggatgatgcagcaagaaggtccttgcaagatgctggaaccttgatattggatttcccagcctccagaactatgagaaatattttttttctttataaatttcatagtctgtggtattctgttttggcaacacaaaatagactaagatgcctctttattttacagatgcagaaacagacagccagagaaagtacaagaattgttgtcctaggttacctatcctgcaatagcagagtctaaagttaaattcagatatctctactagctctctcctggctgcagttctgctaccaacccttggaaatgtgctaaacattcttgtttcttctgtaatagcccaaagaacagtacaacatggtgattaagtatcccttttccaaatttatatttaatggaaaacccagaaatgatgataataataggggaaatgttctcagacctgaaatggtactacagtagctattattaatttctattcattgtatattaacaatctgagacttattgtccaacctaactgaaaatgcaggattcaatacgatattgaagaataatatttttgctatggcaaggaagaataaggtttgtgagaagagacagaatggcatgtcatggaactttgaagtcttcaaaaataagatttgtttttcatcatactttctgaatcaacattattttaaaatgaatataccctcaacctttcctactcacacagccctacacagtctatactatcagtagggagagctagagtgctgagctagctgttacatgtgttttttgtttccatttgctgagtaagggggaaaatcaaacaatcaacatatcaagataagtgaaatacctgctgtgtttattgaagggtgtggctggtaatgactaatgcaaccattttctacttgaacagattcgggttcaaaatgatacttcagttatttctaaaatgaaaagaatgatcgcagttctattactacttccagttattaaatcattatcaatatcaactatttcctttcccttcccctgtttccatttaaacctccagcactatgtgggagaatgcagccatctggtcatgaggctaagctgagaagaatgctgccctaaagcatcctgggaaatgctggaccagaagtacttctgttagatacttctttgctaaatcacgcatcttgcaaaattgaccattaagagatacaactattgtatgtcccaaatactctggttaaaaatgtagggtgatcttccttttaggccctatgtaatatcttccgactttatggatacttagacatataatttattcgaatgacagcctgcttacttgataccattgacagaaaatagttataaataaatgtctaaagctagtgtgactctatccaaagattctgtataatcccgtttagagtaatgaggactataacgacaatcttaagtacactatttttttaaaagaaatctgatacatctgactcttatgcatgggattgatgatattcttcctccaatggattatgaagcagaaagtctaggtaagaataaaagcagtcccttagttactggagtagcttagacctctcacaggttatatttgtagttcacatcaagcctgagcaagtatttggactaattttacatgttgaaaccaaaggggaagcttagcaagtacaccgtttcttgctttgaaagagtcagtctaagatatacgtatatcattttgttcacacactgaactcccctccctttttttcctgcttctctcctgcttggagctgactcctccttcctgcagctccgaggatcacaggctgattgaagaacacagcggttcagatgggattctgtgcacaagctccctctgactggctcgcgctcgccctctctctctctctctctgtctctctctctctctccaccttcaaagctgaaacctacctgacaatctcctgcctttgaatccagctctggaaccaaatgcatcattttactgctcttaaaagtgaacagagtttgattatctcaagctacaagctgctttgctccataagaaggaccccaaaggatccagacatcattggtttttaatgtacctgaagagttttgttttgtttatttttttggctttcttccctgaaacttgatggtgggaaggagtttttgctttgtttttaattggaatgttgaaaagttatctgttcgggtttttttttttttatgcttgaaatggaacctaatttttaaatatagcttgagtcagatctaaaggagacatggctgaccattttctgcaggactgacaaggagaacatctagaggggaacttggtaggaggaatgaaatctgatttgcagcagccggtctttcttttgagaaaattatcagactcattgataagggaaattaaatattgaccaaggacaatgtctttatttctcagtaacttatcaacaaatgactctagcctgtggaaagagaatcataattctacggaccttttaaatccgccaggaaccctgaatatctatcttttttgcttgacatgtctcatgacttttgcagccttggtgggcagcatttattcactaatttccctgctgaaaatgcagaacagaactgttgtgtccatgcttgtggcttcctggtctgtggatgatctcatgagcgtcctgtcggtgaccatcttcatgtttttgcagtggccaaacgaggtccccggttacttccaatttctgtgcaccacctctgccttaatgtatttatgccagggcctctctagcaacttgaaggcgactctcctagtctcttacaacttttatacgatgcacagaggtgtggggagccagrcagcctccagaagatcgggccaggtgctcggcgtggtgctgaccgtgtgggcagccagyctgctgctctcggcgctcccgctgtgcggctggggcgccttcgtgcgcacgccctggggctgcctggtggactgctccagctcctacgtactattcctctctatcgtgtacgctttggccttcggactcctcgtgggcctctcagtcccactcactcaccgattgctgtgttcggaggagccgccgagactccactccaactaccaggaaatttcccgtggagcttcaattcctgggacccctcctactgcggggagagtggtttccytgtccccagaggatgctccaggcccgagtctgcggcgctctgggggatgctctccgagctccgacaccgtgttcggaccgggtgcgcccgctgccgctggggctgaagcctgcaggcgtgagaaccgggggactctctatggcaccaggagcttcaccgtgagcgtagcgcagaagcgcttcgctttgatcctagcgcttacaaaagtcgtcctttggctgcccatgatggtaaaagtgcagttgctcacaaagcgcgagtgtgtgtgccagacagtgtaaatgagtgttgggaccggcgtcgccggtttggggagtcaccaagagacacacagtgaagtccgcttccaagtgtatctcgctgggttttagacatgcacttagaagaaggcagttcgggacagggctagttggctgcgaaacctttactactaaatgcttctcctttcaaaagtcaggggcatggggatcgctttccgtcgcgagcgacttagttttccatatcggtggtggccaaggatattgtctcacacagcaaaatcagagagtattcagaaaaggaaagagggaattaaaaggttttttccccacaaccttctgtcatccctttctcgccgttccattcccgcctagagaggacgacgcccatctccagcagggcgggatagaggggaggagagatcagttgtggagggagaagacagggaacaaaacaggcttttgttcctccttccaggaggaagccgattaagaggtggcagagtggcgccccactgtgacgagcgcgcatgggcggaggtgagggtccagggaggcgacaaaggccattcggagaatcagatgcgggtttcacggacgcctgtttcctagctagcgtcccccacgttgtagactgtgcctttctggtggagtcttgaataggcagcgggcgcagatccggcactcaaaagctgaaacccctcccaaccctgggggtgtgccccgccgttcccaggagcccatcaccaaggacagggagccagctccgtagcagaggtccccgctgtccatcaggagaaggaactggaaagggaactgaggcagcgtgcgtggaraaaaggcttgagaagtacaaagtataattttaggttaggtctgaagttctcttgcccttgcagatgcacatggtggtccagaacgtcgtggggtttcagagccttcccttggagacattcagctttctacttaccctgctggccaccactgtaaccccagtgtttgtcttgtccaaacgctggacccacttgccctgtggctgcatcatcaactgcaggcagaacgcatatgcagtggcgtccgatgggaaaaaaagtaagtcctcaacactgcagtgattggcagcaatatgcattaggtgactttcagaaaagtggtctattaacaaagttgcctcagtaggggatggagagtccaaggataaatgtcagtggtaaatagtgagaagaaattataacatgaaacaatcactacaacagtttgggggtagattttaaattcagctggttttgaaaaaccccatgaagtgcctgtggtactgaataattattttaggtagaaaaaaaaaagggaagactaggattcattcagcacaccatgtcaacaaaggcacttagatgatacattcaccatagttcttagtccagaatagaaaatatattcccctcccaagtctagaatgagatgcagcattgctataagaagcttgcatttgaaaaaggattattaaccctctgaaaggagttgaaaactcattacattataacattattatgcaatggaacagtaaagaaaggcatttttgttgttttactgctagtattcttccagggttttggaaagttttcagagtaaggaatcagagtgcttgaaaacagttccaaaacaaattgtaagtgtaggcctctctctgtctcacacacacacacacacacacacacacacacacacacacacgccctggtccaaacataaaaacaaacaaaaccctcagtttaaaaaaaaaagacacaagtgacagtttgttactgtgtgttcatgtatggatctagccaagttatttacttaaagaagattctgtggtctgaagagtacacctagaatgagagtggaaagcagggtcccttccagaactccctacagtgtaattgttcccatatgctaagacaagaaaagtgttgaggaatgagctgtatattttgactctgccaggaagaaaaaggagattattgtattattctagacaaaatataggatgttctatcacttaattaatctgagaatgcattagtgtatgctgcattaactgtcctattaattgtcctttgctcagagtatgcaagtatattattctttaacagagatgaaggttaaatwwaaacagtccatctcaggctattttagggttgcaaaatctagaggatatcaaagtatactctgccatcaattcaacgacaaagttattttatataattagccatgaactggccatttttcctatgtcatagtgatggcatttaatatttagaatgtctagatatttttcaaatkaccagaaaattttttattgttaagaatgccattaagttttattagtagtagatggcagatgcatttgtctttaaaataaccttagaacttataataatgatgtgtctctaaagattaatatccagaacaacagtgacagagaaaattaataataaacccttatgggccacttataaaaacatrtaacataaaggaaacaattcacaaacctcaaaactctaacattctaataaatcttagcattttgccactaaactagtgaacgagcccggtcttacaacatctaaaattgtgagaaggatgagtctagtgccagtgaaaatgaaaagtcataatgaattggttgaaggcagtcatttttaagaagtggggaccacccatctcagagctgaaaacaaagcaaacaacagacttattcttgtaaatgacctatgaaatattctactttctgtactgcacagacagaagagtcttacggcaggctagcagaatcaacagtcacactcatatcacaggtttgaaattaaaaatatgtctttcgagatcaaaataatatttttttctaaaattaccattgcttttatttgtgtttattttaaaattccaaagaaagacttgaaatatgaaggcttatgaaaaagaagcatggcttcacaaataaaacattgtgagaaactttagcttaagatgcttatagttcaaatgactccattccctcttatgatccaggctgtgatatcagaaaattctgataataacaatgatgtgtttctactgtctgagaagccaccatcaattttcctattgatagtgtaacacaacaaaattttaaaaccccaaaggtagcacatgcttaggtgggccaggtggttgatcagctagagtatcttaattctttgatggttcgagttttatgtttaaactttttgtccataacaaactaagattccctctctttacatcctttatcagtcagtgaacttcagaagcaagagagagaaaatattttttcctaacatatttatcataggttaatgttgaagatgtaaatataattatacatctcaacttcactaaatgggaactgagagaagtgcaaccagaaaatgaatgtgagcagtggaaaataatttgcagaaataataatcctctcctgtttccaacaagaatctgtactactagtgtctcaaaagtgtttttttgttgttgttgttgttttgttttgttttgttttgcttctcaaatgattttaacatagaggtctcaggcagtagacacactgtttggatatggctttcagactcattttgtttgcctgacatgacgttttttaaattaaacagctaaatgtcaaacacattgtataaaaaacagatttttggtctttttttttttttgacaaaatgatagtatctggtaagtgacattactccgaaaaatgatttgtttttataagtggatgtaattactcacatctaaaattgtaattggcaagatgtgactaaaagcagaagactagagctaattcatattttatcaaggattttggaagaataaagattttgcttttaagaacaaaaattatatttatttttaagatgtttagtataaatttcaaaagattctagacaatattctgatggcttttaagtttcttgcaaattattaatcagtgaaagatctctatctttcacagacacacacacgaaatacaaaaaacagtttttaaaaaatctcaactatgtatttttttagtgatataaaagtaggagtcaggaactgtagcactgtcaaggccttcctcctataaataaatcaatattataaagataccatttttttgaaatcatatgttattcagctagcatcattgagtcaaggctaacctaacaaaccattcctatcacaccaagcatgattcctacaggttgcttcattcattcattaattcactcactcaataaataaatatttattagggaaaaagtcactatgtgtctagcactgtgctgcatgttcagtaaggaacagaaattcccaacccatgacccatgagctgaatttggttcaaagatctggtgtttaaccaatttttattgttacttaaaactaattttaattatggaccgaaattttaagatcaggatattttacatcaagtctatgaacgtggtttgtctgaaaaattagaattattgacaacacaacccctaatctccccacaactggctggagctgagaatcctccttagatggaggaagaactttcccatttgcctttgttaataattaaagcataggagatatacctaatgtaaatgacgagttaatgggtgcagcacaccaacatggcacatgtatacatatgtaacaaatctgcacgttgtgcacatgtaccctagaacttaaagtataataataataaaaaataataataataattaatgttacctaactggccccatagacactttttattttatatttttggttcattttttaaaaagacctaatctttaccctcaaagaacttaaaaatgattagttttgactctgattctcatattttcttcaacctaattttgattattaactatgttgttttaatttgtttttatagggattcgcccccttacaaccagcctctcatcttacattgtcaactttatgatactgttataacctattatctcaagttcaggtacattagttacttcaggcagaatttgccatttaagtgataagtcactaacaagaaatgtttccattgattacacttcataattactgtatttcctctgacttaaaaacagcacattgtgtaattctgcttccattaacataattctttcatgggtctgattagcaagaaaacaatttcaaataaagacaactccaattctgaaaacagctagctttaaattcatatcgttttacctgtaagcaatcttcagtagctttcgtctgtcaccccccgttttctccagtgtaaaatagaatcaatacgttttttattatgtagggttgttgtgtgttaaatgagataatcgatgtgcaaaatggcctcagaatgttctatcacatcatggtctcttgataattctcctttcttttcatagcctacctcacactgccccttgtcccttgtgacatggaggtgaagtctcctttaacacattctgcacactccttcaaaaacattactaatttttgctttatatatttgagattacaatgtgcaactaataaaattatagtcatagacatcaattttatcatgttatatcacaaaattgggattttatgacagcatttgttttcttaatggccttgaaatgacaatttgtcactttatatcttttttggagaacaatagaaacccatcaataatttaaacatccttttagttccttcacctttcacattcttaaagcaagttaaacagtataacttaattttacttgactatgttactagaaaaggtcagtaaaaatataaatgagacagtatataaaatatgaacatctgtttctacttytattttttctttgaatcaaacttgttcttgtttgtgttctggctcaaacaacaatgaatgatactaataaattctatttttcagtcaacagaattggtttataaatcttagattctgagaaacatttcagtaatagaatcagcatatgaatgacactcgggtatattgcaaaatggatcaaattttacttatcttttccatagaaagattatagcttttcatacatttttttctatcgaagatagctaaatgtctcagtataaaacacagagctatcaaagtagaaaatatgtttgaaacaaaccatgttttgacagatgaaagcaaaaacattaaattatatcttgtctaccaccttgatataacttcattcttaatatataaaacttatctagcatttaatgacattcaacataaaaattgtatcactttctgtcactttcttgctttttattctaagattttgcatcactccaccaactaatagtactataattattatttcatcatatttcacctgatttaaatcataaaaagttttatgcattcctgctaaactcttcttgtaataatcagctttatagacattgtaaagtgcttcaatttacaaaaaatattaatccatctaatttttaccagttcttttcacatttatttgtatcagaaatgtacatgttattttttaaaatttaaaagctgttttgcagtatagtctaatttttaatgtatgcacttatagacatataaatgacaaaaaattatataccaaaatattttaagaagttatatttattggtggtattcttagctgaataactcacataatattaaggctacttaataattaatttctagcaaaataaaatttataaataatatctcttatcccaaaatataaggaaatgtgcaaaatcattggtagactaagaaaagctaaaacaatgtatttgagaatttcctaatgtatggctaagtttttgttatgtaaggcttctttagagactgaaagagtttttaagattgtatgtatttaaagaccatsattttgtaaatgagaaaaattaggcacagggtggaaagataattttctgaggcataatttctttgcataactgacaaaaagtaaatgaagatagttttaaaatgtataataatcaagttgaatgcgctttctatttttatttgctatatatatacaatgttgtctttatctaccttactagccataaactgttgtttttatttttactcagtcaagagaaaaggctttgaattcaatctatcattccaaaaaagttatgggatttataaaatagcacatgaagattactatgatgatgatgaaaattccatattctatcacaacctgatgaactctgagtgtgaaactacaaaagaccctcagagagacaaccgtaacatcttcaatgctataaaagtagaaatcagcaccacgccctctctggacagctccacacaaagaggcatcaacaaatgcacaaatactgatattacagaagctaaacaggattccaacaacaaaaaggatgcgttttctgacaaaacaggaggtgatattaactatgaagaaactaccttttctgaagggccagaaagaagactgtctcatgaagagagtcagaaaccagatctttcagactgggagtggtgtaggagtaaatcagaaagaacccctcgtcaggtacagtaaaagttgttcttgctgttaaattgaaagtgatactaaatatgatagtcatgaaaaacattatcagttgtttgttttattcaatcaagcccaacattaacttcacttgcctcaattaatttccatgctatttaattttatttcaaggtctcttttgaaggactttttaattcttttaatcagtttaaaatctatacattttataataggaagagttaaacaggctctttaagaagggtagggaattcttttttaacctcaagtaacctgcataaattcagattagattcgcagaactcatggtccaaattaatttaatttgtatattttatttttccctcctccattccaaaggtataccttaagtctccaagggaagttttattttttcatgtaaaggcaaatatttatacaactagcagtgagaagtgttgttctgttgaaagtatattaggcagcttgcctatcagtcttactagaactaatccctccagtacccagcagaaaaaaaatattacagaatacattctcgtgagcatttgcaagcccttacgaatgttccatctccttaaatatggaagaatcattttataatattttataaaactaaaagaatttgcacatgaatttctcatcctttcctagatctcagccttccaaaaatggtgagggatccttcttattcattgaaatggcagtgtgatattgatatgagattttttctttccccaagctctcatatgtgataatcaagttgcccttgctttccacactattgatttcctaggaaaaaggagtctttttttctacatgagttaatggaaatcagaatctacatgcacctaatctctggaatcaaaagcattattttagaaataaatacactgctaggagtaatgtactcattgatcaaaagtatgatcatataacaccaactataaatatgagcagaataatttgagattttctttattctcattgattaaataaaactactagtctcctgataccattgttttaaaagtgagttgaatagtaaaataaggtgtacaaaatatattatacaaagagacaattgtgcatatgtttagagtttagaaatcaaaggaaaatatcactaaatatttgtcataaattaaatagtacagtaaaaggtggaggccaaagaacacaacgctccatatgtttaggaaaaatgtgtttccctagctaagaggggaattccaacactttcatcgccaatttgctcctgaataatgtaaacctcttagtgttgcacttagaaattgttaagttatattcataatgaagcgcatatatgtgtgtgtgtgtccatcccaataacttgtaactaccttctgtgctagtcacctatatcatcctcgtgattaccccttacagattacagctatcttgaatcttactcatattttttgttgtattcttctatcacaaatgtatgtayttctaacatactatattgtttagctttgctaattttgagccttctaaagatggtatcatgctatatatagtcttctggggcctgcttttgttcatttaacatgactaagctcaattttcttatttatttcatcaaaaccatggaaattattatctaaaataccacaacttaacatcctcatttaaaagccttggttatagtttggaaagtagggtcaaataactataactagaaacgtgaaagaatcagacactgcttgcacataagtacattgtcctgggagaatgatgaagaacaacttacccacaatcttctttaaatcgaaaattaaaatgatttatgtaaagtataaaactttgatcaatccaggtatctttcagctataaatattgacttgttaaatatagatatttaaacaactgtgatgatcaagtctttcaggaaacttctctgaaatggtcgctatgaaaaataatgattagtggtaaaagatggataatacaatattctggaaaggtaaaactttttatttccagggactaattaaaattaaataaaatactatcataaattttaaaacaacaggaagaaatcctaaaccacagactgacattttttgtataaccttcccttagtaaaagtacctgtggtctttaaggttagccttaaacacaaatacaaaattttaaattaaaaaggttctttttttttgaaagtcaaagttgaatagtgacctcttttttattattattattatactttaagttttaaggtacatgtgcacattgtgcaggttagttacatatgtatacatgtgccatgctggtgcgctgcacccactaactcgtcatctagcattaggtatatctcccagtgctatccctcttccctccccccaccccacaacagtccccagagtgtgatgttccccttcctgtgtccatgtgatctcattgttcaattcccacctatgagtgagaatatgcagtgtttggttttttgttcttgagatagtttactgagaacgatgatttccaatttcatccatgtccctacaaaggacatgaactcatcattttttatggctgcatagtattccatggtgtatatgtgccacattttcttaatccagtctatcattgttgggcatttgggttggttccaagtctttgctattgtgaataatgccacaataaacatacctgtgcatgtgtctttatagcagcatgatttatagtcctttgggtatatacccagtaatgggatggctgggtcaaatggtatttctagttctagatccctgaggaatcgccacactgacttccacaatggttgaactagtttacagtcccaccaacagtgtaaaagtgttcctatttctccacatcctctccagcacctgttgtttcctgactttttaatgattgccattctaactggtgtgagatggtatctcatcgtggttttgatttgcatttctctgatggccagtgatgatgagcattttttcatgtgtcttttggctgcataaatgtcttcttttgagaagtgtctgttcatgtccttcgcccactttttgatggggttgtttgtttttttcttgtaaatttgtttacaaaattctacaaaacattctaaatcacaaagtttaaaatgttcacattgtaatttaaaatgctagcaaaaacacatttaggactgaaaaccttatgaggacttttcctaagactaaaacaacttttaattcttacccttttcttcagcagcaaatattacatggaagtgaatgatgacttagaaaggactttcatttttatctttttcttcccagtgccgttttttgctctcaaagcaatgttaacatatgtatcgtatatagtgatgcattaaactgtgtggtagacacagcagttactctataaaaacactacttcttttgattgttttatggttgtactttcaaacacttaggctcaatttatcagtttgtatctaatggtactacatttaatagtaggtgttctcaggatattttaaaagcagatttgattttaaacatatttagtgagctctcttttatttctacaatatgcttttttttaattaaagtttatgttaacaattttcagaatattttcttggaagtcctggtaggagtgagaatatcatcaaattaaggttaaggtgtagaaattatggcaatacaatggcttcagtagatttaaatgtgatcccataaaatttacaagaattgaaggtattcataagactgaaattcaatttaaacatggccacacaattacttctttttgaacccctaataagtagaaatctaagcagtttaccattttgaaagttcagaagaaatagtaagaaacgtcagagttttttagttagaaagtcttaatgtgatagccaccagtatgactctttctgaaatgaaatgataattttctagaaccccacattttgtcatctatgaataaagaaaattggacttataaaataattggctggcttgtgggtgatcactctattttctcttttaataccaagttcataaaattaccctggattccattttctttccttttaatgttttgttttagagttccagaaactcactcatttatttttgtgaatcaaaaacatagatatcctgaaacttttaatctatttacaatcctatcattataggatctgtaaggtgcaaggtcctccattttgccagtagggtgttttaaaaacagattctgaaatattccctctcaaatgagagacaaagcagagggaggtaattgtgtttaaatttactacataaccacttagcttaaaggataaataaggccaacaagaactaattttaaagtcgcctgagaatcgaggaaattttattttcattttaaggaaaatgttttagctctctaaaaagagttttctaaagttatgttgtgtcagttgttaacagagtttagtagcagcgttggtttctatagtatttttaaaatattattatttatttaagtaattttcataggaaactacagaatccaaaagccagctagactattttgagctctttagatcagagcttctcaagttttaatgtacatacgagtcaaatgggtatcttattaaaatgcagattttgattgattaggtatgagatgggatccaagattctccattcctaataagcttccagatgatttctgtacaaaccaaggtcccacctcagacctataatcaaaatcccccagtgggctaatatgcacattaaaaattttaaagtgctgctttagattctaatggctagagaatgcgcatgagtttgaagtgcagggcaaaattaattctttctatttaatatacgacccataaagtataaggctggaagaaaatactcaatacgggtatctttttcctcttcctaaaaactgtgcatcttttcttttcactttaaaaaataaactatttaaaaaacgagaacagtgtattgctgttttctgttatattattagcttaaaatgaagatgcctaaacttgtctctgagtaatttctgacattttaactgaaatgaccatactagaaaaaatccacttaaaacctatttatagcctccacccrgtcatcttaacaaaaataatcatctggaatatactttatttttgactacatccatttgtttgaagtgcttagtttattactagctgttcagaaaattgaaaatttgctacactgcctagttttttaaaagtacaaactttattgtttttataattattaaactaacttataattattgtagaaaatctagaaattgccgataagcaaagaaaaaactcacttccacctacccagagttaaccactgtttacattttgttgtataaaatatctggctgttttctatgcatatatttttacttttgacaaaaacatacaaaccaaaaaaagtcctgctgcatgtactgcatgcgctctgcttttctccacttcacagcataactttaacctcaatttaattgtttcagccctttgtgtcattatctggtatagtttagagtggctatttgaagtgtggctgaaaattcatccatgaatataaatttgttctcaagtatataaaatcttggaagttgaacctaagggaattttattctaaactacttcagatatttcatagtacattttgtgatcttcacagcatgcatcatttgctgcaatgagtaaaatagctctaactgctcacgttctacaaattgaagggaattagcattggatcaaagcttgtgtggaatcatataatttatctgttagctaagaattctgttaacattctcataaaagtctcctggcttaagaaacctaaaagattgtgtactgaaatgacccagctgtggcttaaatctcttcttggttactctctacttgaactcaagtgactaggaactcactacattttttaaactttttattgtgaactaatacatgacctacaaaacagttgcaaaaaaatagtacagagtttcaatatatcttaattcagtttccactaatgtaaagttacactgtacaatgcaattatcaagaaattaataactaatctctaaattttatttcagytttaccaattgttctctttctggttctggatctaatccctgatgataaatcgtacttgtttttatgtctccttacctccaatttgtaacagcttctcagtctttctttgtttcgcaggacgtttactcttttgaagactactggccaattttgttttttatttttggaatacccctcaattagtaattgtcttatttttcaattgacagaattaaagacaagaatatcacaaaagtgatgttcgtcttttctagtgcatcatctcaaaaggtacatgatgttgatacatcttatgatggtgatgtgaactttgatcccttcataaaattggtgtctgccagatttctctatgtaaagtttctatttttcccccttgtaatttttaagtgtcttgtggagagacattttgaggttatgaagatattatgcttcatatcacaacttgccaactaactttagcatgcactgatgaatcttacctgcaacaattattatgcgayggtaattttctatttctacgattcttcttttggtttcattctttgtatattatgaataatgtggtgataaacatttttatacatgattcctgatgcacataaacacattttatttatttttttgtttttttatttcaatargtttttagggaacaggtggtatttggttacatgaataagtcctttagtggtgatttctgagattttggtgcacccatcacccgagtagtgtacactgtacccaatgtgcagtcttttakccctagctagcccaaccctttcccctgagtgtccaaagtccaatgtatcattcttacacctttgcatcctcatggcttaactcacacatatgaatgagaacgtatgatgtttgatttttcattcctgagttgcttcacttagaataatagtctctaattccatgcargttgctgtgaatgccattattttgttcctttttatggctgagtagtattccatgtatatatatatatatatatactacaatttctttatcaactcgttgattgttgggcttttgggccagttccatatttttgagattacaaattctgctgtgataaacatgcatgtgcaagtatctttttcatataatgacttcttttcctctgggtagataccttctagtgagattgctggatcaaatggtatatcacttttagttctgcaaggaatctccacactgttttctatagtggttgtactagtttacattaccaccaacagtgtaaaagtgttccctttttaccacatccctgtcaacatctatttttttttttattttataatcatggccattcttgcaaatgtgaggtggcattgcattgtgatttagatttgcatttccctgatcattagtggtgttgagcatttttctatatgcttctggccatttgtatatcctcttttgagaattgtctattcaaatccttagcccactttttggtaggattgtttgttttttccttgatgacctatttgagttctttgtagattctagatatcactcttttgtctgatgtatagattataaagatttttttcccatgctgtggcttgtctgttaactctgctgattatttccttcactgtgcagaagttttttagcttacttaagtcccatctatttatctttatttttgttgcatttgcttttgggttcttggtcattaagactttgcctaacccaatgtctagaagggttttgccaattttatcctatagaatatttatggcttcaggtcttagatttaagtcttgatccatcttgagttgatttttgtgtaagatgaaagatgaggatccagtttctttcttctacatgtggtttgccaattatcccagcaccatttgttgaatagggtatmttttccccactttatgtttttgttttctttgtcaaagatgagttgactataagtatttggttttatttctgggttccctattctgttccattcgtctatgtgcctatttttataccagtaccatgctattttgatgactatggccttgtaatatagtttgaattttggaaatgtaatgcctccagatttgttctctttgcttagtcttgctttggctatgtgggctcttttttggttatacaagaattttaggattgtttttctagttctgtgaaggaatgatggtggtgttttgatgrgaattgcattgaatttgtagatttcctttggcagtatggtcattttcacaaaattgattctacccatacatgagcatgggatgtgcttccatttgcttgtgtcatctatgatctctttcagcagtgtttggtagcttttcttgtctttcacctctcagtattttattgtctttgcagctgttgtgaaaggggttgagttctaggtttgattctcagcttggtttctgttggtgtatagcakagctactgatttgtgaacattaatttgtatcctgaaactttgcagaatttatttaccagttctaggagctttttagatgagtcgttagggttttccaggatcatcgcaaacagcaacagtttgacttcctctgtgccaatttgcccttttttcctttctcttgtctgattgcttgcctaggacttctatgttgaacagaagtgatgaaagtgggcatccttgtcttgttccacgtctcaggggtatgctttttacttttccctgttcagtataatgttggctgtggatttgtcatagatggcttttattaccttaggatatgtcccttctatgctgattttgctgagggttttaatcataaagagatgctggacttttgtcaaatgctttttctgcatctattgagatgattatgtgatttttgtttttaattctgtttatgtggtgtattacatttatggacttacatatgttaaaccattcctgcattcctggtatgaaacccacttgatcatggtggattctctttttgatatgctgttggattcagttagctagtattttgttgaggatttttgcatctatgttcaccagggatactagtccatagttttctttatttgttatgtccttccctggtattggtattagaatgatactggcttcctagaatgatttaggaagaactctctctttctctatcttttggaatagtgtcaataggactggtaccaatttttctttggatatctgatagaattcatttgtgaattcgtctggtcctggactttttttggttggcaaatttttaattactattttaatcttgctgcttgttattggtctgtttaaaggttctatatcttcctggtttaatctagaagggttgtataattcagggaatttattcatctcctctaggttatctagtttatgtgcataaaggcattcacagtagccttgaataatcttctgtatttctgtggtatcatctgtaatatttcccatttcatttgtaattgagcttatttggatcttctctcttcttttcttgataaatctcgctaatggtctacagattttatttatcttttcaaagaaccacctatttgtttaatttatcttttgtattaattttttttgtttgtttcaatttcatttagttctgctctgatatttgttatttctttccttctgctgggattgggtttgaattgttcttgtttcaccagttccatgaggtgtgacctcacattgtctatttgtgttctttcagaatttttgatgtaggtatttaatactatgaacttttctctcagcaccacttttgctgtatcccagaggttttgataggttttgtcactattatcattcagttcaaagaatttttaaatttccgtcttgatttcatttttgacccaatagtcattcaggagcaggttatttaatttccatgtatttgcatggtttttaggcttccttttggagttgatttccaattttattccactgtggtctgagagagtacttaatataatgttaattttcttaaatttactgagacttgttttgtggcctatcatatggtctattttggagaacgttccatgtactgatgaatagaatgtatattctgcagttattgggtagaatgttttgtaaatatctgttaagtccatttgttctaggatatagtttaagttcattgtttctttgttgacttcctgtcttgatgacctgtctagtgctgtccgtggagtattaaagtcccccactattattgtgctgccatctatctcatttcttaggtctagtagtaatagttttataaatttgggagctccagtgttaggtgcatgtatatttagaattgtgatattttcctgttggactagttcttttatcattgtataatgtccctctttgtctttttaaactgctgctactttacagtttgctttgtctgatgtaagaatagctactcttgctcacttttggtgtccatgtgaatccttacgtgttaggcgagtctcctgaagatggcagaaacttggtcagtgaactcttatccactctgccattctgtatcttttaagtggagcatttagaccatttacattcaatgttagtattgagacgtgaggtactattctattaatcatgctatttgttgcctgaataacttggtttttttcattgttattgttatataggtcctatgagatttatgcttttagggggttctgttttggtgtattttgaggattggtttcaatagttagagctccttttagcagttcttgtagtgctggcttggtagtggcaaattctctcagcatttgtttgtctgaaaaaaactgtgtctttccttcatttatgaggcttaatttcactggatacaaaattattggatgatgattgttttgtttaaggaggctaaaagtaggaccccaatcccttctaggttgtaggatttctgctgagaaatctgctgttaatcttataggttttcctttatatgttacctgatgcttttgcctcacatctcttaagattatttcctttatcttgactttcggtaacctgatgactatgttcctaggagatgatctttttgcagtgaatttcccaggtattctttgactttcttgtatttggatgtccagatgtctagcaagactggggaggttttcctggattattccctcaaatatgtttttcaaactttcagatttctctttttcctcaggaacacgatttgttcttaggtttggatgtttaacacagtcccaaacttcttgtaggctttgtacatttttaaaaattcttttttctgtatctttgatggatttggttaattcaaaagcctgtctttgagctctgaagtattttcttctgcttgttcaattctattgctgagaccttccagtgcattttgcatttctctgagtgtgtccttcatttccagaagttgtgattgttttttatttatgctttctatttcactgaagaattttcctttcgtatcctgtatcatgtttttgatttcttgaagttggacttcacctttctttggtgcctccttgattagcttaataattgaccttctcaattgtttttctggaaattccgaaattttgtcttggtttggatctactgctggtgagctggtatgatcttttcagggtgttaaagaaacttgttctgtcatattactagaattgtttttctggttccttctcatttgggcagactatgtcagagggaagatctggaattcaagggctgctgttcaggttcttttgtcccacgggatgatcccttgatgtggtgttctccttcttcccctaggaatggggcttccagaggccaaactgtagtgattgtttttgctcttctgggtctagccacccagcagagctactggatttcagtctggtactggggagtgtctgcaaagagtcctgtgatgtgatcatcttcagatcttgcagacacggataccagcaactgctctggtggaagtagcaggggcatgaagtggactctgtgagggcctttggttgtgtttttgttcagtgtgctggttttgtgttgattggccttcggccaggaagtgacactttcaagagtgcatcagctgcagccctatagggaggatgtaaacttgccctagggacacctggttaagtattcaggtttctcaggtggtgagcagggccatagagctcccaagaggttattgcttttgccttcgactaccaaggcagatagagaaagaccaccaggtggtagcagggataggcatgtctgagctcagcctctccttgggcagggcttgctgtagctgctgtgggggatgggggtgtggttccctgtccaatggagttatattcccaaggagaggattatggctacctatgctgagtcacacaggtcaccaggaaagtgggggaaagtcaacagtcacaggcctcamccctctcccaaatgcagcccacagtcctagaggcccatctcactcccactgtgccccactaacagccttgcgtctatttccaggcagccagtgaccaggctgagaacttgcctcagaccacaggcctccctgctgagaatgcaagctgactcacaggtttttggggtctcagggagcctgcagtggtgatccaattccttcagtgggtctgtggattcttttggctttcttggtatgttcctgcagtagttcttggagcaaaagttcatgatgtgagtctccacatgctgctctgtccatctgagtgggagctgcaagctagtcctgcctcctatctgccatcttcacaaggtcttatttctaccattctttctatatttagcataggaattctactgtaaggaaaagctatctcttctccttcgtttacctatttatttatttatatcagtatggattcacagatatttattttaacttatagatcataaactatgctatcatttattttgttaccccaactatcctatatttggccattgggagctctttcatgttggtatctctatctatccaacatgacataatcattttttagcattttctgactttctgacagcatgagatatcccagcatcattgtgtattttccttaacctggccccagaatcaagagtttttccaaggagctctggttcctttaattggaaaatagtatttagaagccaaaatctgggtgctagatacactcattgctactgaggtgtcttgcttctaggccctaacctacagagctaggaaatatatatatatatatgtgtgtgtgtgtgtgtgtgtgtgtgtgtgtgtgtgtgtatacacatgacatatacacacatgaacatatatatacacatatgcttatgtgtttatctatatttctatattaatcaccccatattaataattttaaaacaagtttatactgatacctccaattccaatcaactactacagagttcattcaagcctttctcttttcttatttacttcctttcctgacagtgaaaaaacaggcttttatccacaaatacgtttacttttttgcccagttctgatatacacataaagaaattttagaattgctaacccacacccctgtaggaaaaaatattaagagtataataattgcaaatggttattacctttagcttacaggttacagtcaaaacattatcttccaaagttacttaggtcagttctttgcatttccatttttccattcccttcattttatattacatttttcattatttatatttgactatgtgaagcatgatcaggttttcaagcatcagaactatataaaacatgatgtggtttggctgtgtctccacccaaatctcattttgaattgtagctcccataattcccatgtgttatgggagggacccagtgggagatccttgaatcatgrggggtggtttcccccatactcttcttgtggtagagaataagtcccacaatatctgacagttttataaggggaaactcctttcacttgattttcattctctcttgcctgccacgatctaagacatcccttttcctgtctgtcatgattgtgaggccttcccagccatgtggaactgtgaatccataaaacttttctttctttataaattacccagtctcaggtatgtctttatcagcaacgtgagaacgggctaatacaaaaggcatatgcgcttcattcatttttcttccctgattttatttttctcattctttccaccttgttcctacataccttctgtaagtaaccaatcatatagtttatggtttaacgttcctgtatttctttttgcaaaattgggtagatacatgtttgtcttcttatatcccctcttttcttacacgtagatatgattcatgctttacttttttccttaacaataaatactggacatctctacatattagttcatagacatcttcctcatggctgtgtaataacccagtgtgaatataccatagtcaatttaactactctgtagcttgtttccaatattttgcaataaaatcagtactgcaatgagtaactaaccttgtatgtatgtatttgcacattgttggaggtgtagcttcaggataaattcttagaattagagtttctcggtcaaataaaaaatgtagttttgctaggaattgccaaatacccctctagaaggttataccagtttctactcccaccagcaatgtgtgaaagaggatcttttttcctaccacttcagtaacagtgtatattatcacacttttaaactttttccagtgtgataggagagaaatgatttctcagggttgttttaaattatacttatctaattgtgagcaagcttgaatagtttttatatatttaaggaacttctatctttttctstattataaattgttattattttttccaatttttatagagatttctttttcttcatcttctaatttttaagagttctttacatattagaaatattagttcttcatccattatatcctatgttacaaatatttttcagcatttatcagataccttttgatttttgtttatagtatttttttaccatgcacaatttttkgtttataataaaaattatcaatctttttattaattgcatttgaatttttttaataatagttagaaatccagtttaaaatggaattcacccatgcttttttctaagtacttgtatggcttaattatttctattttgatcccaggtccatttggattttatttttgtggtagatgtaagatagggtataattgtatattttttccaaatggttgcttattattattaaaaagtattatttatttaaaggtcaatcattacccacagtgagttatcgtctttatcttatacatttctatatctacttggatctatttctaggctttctacttttttttttttttttttttttgatggagtcttgctctgtcacccaagctggagtgcaatggtgcagtctcagctcactgcagcctctgcttcccaggttcaagtgattttcctgcttcagcctcctgagtagctgggactacaagcgcaagccaccatgcccagctaattttttgtatctttagtagagacgggatttcaccgtgttagccaggatggtctcgctctcctgacctcatgatccacccaccttggcctcccaaagtgctgggattacctgcgtgagccaccacacctggccatattcactcttttttgtcttcagtataaatgaggttttctctatcattataccctctcactggctattgtttgtgtgtattaaaggtattgatttatgcccgtaaattttatatctgccacattactgaattcttttatcgtttaaatttattttatcattatcaaaaatttataagtataatatcatatcatctgcaaatagaaattgctttactacttctttattaattcttatgcctctgtttaatttctcttgtctgattatattggctaacactcctaaaacattgttgaatagtggaggaggtggtaagcattcttgccttcttcctgattttagtggaaaggtttctgatgttttcctattaagaaagatgacagctctcactactttgtgaggcagataatttaaatttctgctgctgctgctgctgtgmtgatgatgatgatgatagctagtatttattgaatacttgctatgtttcacatgaggttctaagtactttacaaaaaattgctcacttagtattcacaaaaactctgtgtggtttgtactgttactcaattttacagatgaaaaaactgaagcacagagaagttaagcctaaggtctatcagagcctgtgaacaaacttcagttatctgattccagagacagtccatatgttcactaccatacactgtttcggagagataattttgatagttagcaatcctttcctacactgagtttaaatctattcccctcacagaggcagattagtatcacctaggggatctttaaatatgtcacaatctcacccatagaagttatgatttaattggtctggagtgagatttgggtattattctctaaaactctgtgtgtggatatttgaaaaatatataacagagaacttatatttagagtatgtaacttataaagaacaccaatagtacaacaagaaaacaatagacaacccaatagtatgtgggcaaaagatttaaactgatacttcatgtaaaaggaaatccaaataatcatggccatgtgtaaaggtatatctcaattaaaataacagtgagtgaccaccacacacccacacaaatagctccaattaaatattctgaaaatttcaacagttaatgagaatatggaaaaacttaaatgtatataaactgttggtacgataaattgttaaaaacactttgtaaaacaggttagaaatatttccaaaagttaaatatatccatgccttatgcttcagcaatgacactcttggttacacatcctagaattgcactgtccratacattaaccactagtcacatgtggttgtttacatctaaataaattaaacattttttaaatttaaaacttcattcctcaggtgcactaaccacagctcaagtactcagtaaccagatgtggctggtgactactgtactgagcagcacccatatggaacaggaccatcttgcagttctattggatagtgccacctaaatcatatttacatgctggcagctctttttttttttcatagagttagcatttaggaatggaccaaaagtccatcaacattagaatacattgttgaattatttttacaatagaataccacatgcggaattgtatttttcatgaagccagtgaagctgaaactttgggcaactcgcttgtgctgatctcttccaaggctgggaggatccctatcaatgtgttcatgggaaaatatgttttcataaagttagcaaaaaagaagatttctatacttttttaaagaacaaagctatatatgctttcaagccccttgaaatctggttctacctctaactaaaaaagaacagaacaaaactaaagctaacaaaacatgaatgagttttgcaaacatgacagaaatgtagcataaaaagcgctgacaccctcaagccctttttgcccatgctactgcctagcataaagcatcccatattgtacatttgtcatctgttgtttggacccaattatgtcttatctctgttaaatttcatcctgcttcctttaatttacyctttcttaatttcaatagcctttcctaatgctgtaaaaaatgctttcagatgctgctcctaagatctggcttctatactatgataccaaaatttgtgtcacctatgaacttaataagttatccttcatgtttctatccaaaccattgattgtggatcaagacagggccaaagacagaagccctgctatacactactagaaacaagtcctctcattcatttttatttatttaaaaacactgttaatattttgggttcatatagttattaatttacttagttgcccttgcaatcaatatgtttttcctccctcttgttcacaaagattccattaggaaattacaaaatgctttaatggaatactaacataaaattttcaaatgcatttctttcatctgccattagtttattcagtaaatatttttcatagaagcactgtggatataaagatataagcctcctgctttcaagttccacacaggcatgtatgtgaagaagattttcaaacaattagctgtacttcagtgagaaaaaaagtgtacaggatatagacaacgcacttacagaccacagaaggtggagtggtaagtccagcaacattgaggaagaaaggaattgatccacaaagacttagttgtagagaaatcataccgtgttttgggtcttacagctttttttttcttggctttcaaactctgtcctttcatcttagaaagatggatcttagaaactttcatggatctttgaaactttcatggatctttgaaactttctaggaattgatgtaaatatcacttgtctactttgttgaattcactgctttctattctatatttatttatttatttatttatttatttatttgagacagggtctcactctgccatctaggctggagtgcagtggtatgatcatagctcaccatagcctccaactcctggactcaaaagatcccctgccttarcctcgtaagtattgagattacaggtgtgagccatggtgcctggcctgcttcccattttaaaaactgaaaatatttgcacagttttaatgttcccatttgctttaaggacatcagcaacaaccatattcatacagcaacttttcatggtaactttcagtataattattttcagagagaaatttgcacttctgcagtagcaaggatctctcattatttttattttaaatttgtctttcttaatattcacaaatactttcttagtgctttaagattcatttacaaaggatacagaaacaagtttggagctgaggatatcagcttcttctttgccatcccttgacttgatggcattagctgcaagaagtgggcctattccttattttgaccttttgatttaaacataggtttccaaagacctactttgttgctttagtatttttgcaagccacagattattayatttatttagacttcctaacatcaaacttcccatcttttgcaatgagtaatttgttgcataggtctccctcaggccggatctgatctgcactaattttaaagatgaaattttcctttatcccttaactgcatcacttatgattatacagccaaaattgcagtcttgacactcacatgtaggtttttttttcctgtttttccccccagtttgccttctgaaagttgaaatgtatctagcctactaagttcagcatttttcttctggatatcacatactctaggaattaatagttgtttttctccttaggtatccaactcttctactttcactaattatttctctcttattgataagaattatattctaagaaactgttccttcttgcttcctgtactctctgtgagatgaagctgtcagcaaggcaaggcaaaaatatgccatctgatttgctttatagtttaatagatcccagcagaatcatttgaaaacattgccttgctactgggcaaacacagattctctccaccttcaaaaataatctctattcaagagccaccttttctataccttaagctgtgatttagaaatatttatttagttcagtggcactatctgcaaagccagaaaagtgtcaacacaaaaagcaaattaataccacttgctaacaattattagcaatgtataagagtcaccaattttaagcagttataggaattaaaagagaaaattttcagaaaatagctcacagtgttttgcatttcatcctttaagataaagataaaatttgaaacagctttcttctctcatgaatcatacaacactaagtggtaaaaccaggactcaaacgcattcgtcatcctgtgatacaacaaaaaattctataatattttagtgtaaaagtctagtgtgtgtccattcattttggaacaaatattactctagataaaatgatatttaatatcctttgttttaatcactaattatcatgtgttttcactttagtagtggctagtctcttatgaaatgttgcaggtagagcacgggctttggaaacaggcaggcctgagctttaaatcgccttcaaatatttcaagattatgactcttattaactgcgtataacttaattctgtaaccttaggagggtggctttacaacttttgattcattgcaataaaaatgaagcagaaattactcagagatgatgtcatgtaattcaatagaacatagtacagtggtatcaggggaggctctgggatttctacatagagagagcatcagaatgacaatattgtggaaggagtgtctagagaaattatcttaaagttctttgcatataaagctccttggttttcattagagagcatgtttattgaagtggctttgagaacacagtgaagaatattgaaaaggatactaagaccctcttcgaggttacccattgacacaaccactacatattatatgaaatattacttaaggcaaataatataatttctgatccttagtaagcttataaaactactatgaggattcaatattatgataatttgtaaataatttcaaataagggccgggcgcggtggctcacccctgtaatcccagcactttgggaggccgaggcgggtggatcacgaggtcaggagattgagaccatcctggctaacacggtgaaaccccgtctctactaaaaatacagaaaattagccgggcgcagtggcgggcgcctatagtcccagctactcgggaggctgaggcaggagaatggcgtgaacccgggaggcggagcttgcagtgagccgagatcgcgccaccgcactccagcctgggcaacagagtgagactccgtctcaaaataataataataataataatttcaaatacaattattgacacacgtatatgataatagtacagaagtactattgagagaacctccagatatgcatgtatttcatagagtaggggctctataatatgctgttaactgaatgaataaatttcagtgaaagcaactgtgtttttcaagctggagtgtggaggtgatttaggtgtttgtaacagagttgtttccttgctctttggtaaagaaactcaaaggatatcaaagacttcctaataatagtgcaccaaagatacctcaggccatgccttcaacttctaacagttttaaatgactaaatggaccatcagtctctagagcagaggaaagttgctaacaggcctgaaaacgctgagggaattttgattccaatgtgaagacttaagttccacactgaatttaaagttctacctggaactctaggttcaaagtaggatacagagtgattagaaagaaggattacaagcttagactaaggagaaaggtgatatttactacaccaagtgatgactgacaatttttgaacatttttggggaaagaaaggttataactggccatctttatgtgaaaaatattaatttataatagcatttattcgttttctagtattacataaagtttaacttttatatgagagttgcagtattttttacaaaagtatgaagaaaaagttattgtaacatgaatctttgacaagatattcacattacaggtgtaagctctgacttgtctttaatgaacctgacctctggagaagtacttactataggaaaatatcataaatccagccagtggttctcaacctcctccagacgttaaaacttaaaaaaaaatactaataccaaagcccaacttccgaataaccaaatgaggatcccagcaggttgggactagcatttagtgtttcttaaattaatgattccaatgaacatcttagactgaataacactagtttgccttttataaatcaaagttataacataatgagggaaaaagtgttccaattttaattagagtccttctcttatgtttattggagttacrttcagctctgtgaataggatgagacgtcattttgtacgttaatttgagcaaatggtgaaaattaagcagagttgacttgatccaatcttcctgctgtttgccaagtcatcaaggggtaataatcatgagcatccatgaacaaatggtattggtttctctgagttagttcctacattgatgaaatgagtcatggccatttttaattatttaagatccaagagcacatatggaaatagttgggtttttgaacttgtcatttcagccaaatttcaattttagtaattattctgcttacctcatttccccatgatattatagggttgttgttgtttctttctttctttttaaattgtactcaaagcttcctgttctcagctgtgtaaattgaaaaaccacaatggtttcaattcagatgcaaatagaaataaccattctgaatgatctattttatagtttaggataaaagaccattaaaataagcaagaaaaatatcagagatagagaaaattgacacaatttactaaaagcaactttcttctccagtgaaactttttttgtttcagaaagtcaagatattgtcattttaaaaccttgaagaaagcctggaccacaagaggaaaggcggtttccctaatcattaccttaattgttatttgtgtagtacttagcagtgtgtaacaaactttcacatgcattgactaatttcaccctctttctagatagtcagggaagatgttttcttcctctttgactgacagttgaactgagattaatatcccaatggtgtgttgataaatgtttaacaactgcaactggcattgtggggaaaatgtgtatgtgtataagtgtgtatatatataagcttatatgacctttactgatataaagaatgtgtagcacataatttacaaataatattaacatagatattaacatagatattactttgtattgtaatttccatacaactacctgattctcacagaatactttggttgatttttacaaaaatcttataaccattgccaacctgtagttacaactgacaatataaatgttggttaacatttatatatactaatgagtaagataaaaattaaatarctaaggtatatgctaaactcacttgtcaatgagtaattttttattgaattacacaatagttttcaaatatacaatttcctgtgcatctcttcccaagtctgcattcaatgatgtcacagtgctagctttaaatcagccatggtgggagtatttatagcatgcaagtcagaaaatgcgacaaattaggactcgtgatgtgcagcaacacaatattatatagtattttcaacatayagatacaatagatggaaataatctcaagaacatgagtaataacaaaatatattagaataattgggagtgatgagttttgagtatttattgcctttgtttttcatataattcagtttaagtttatataatttatttttaataatcagcttgcaagatttctaaaaattgcatgagccagtttgagccaactctagcacactcctgacataatccattctttaagaaaatacagcataaaatgcattcaaaaacaaccaaagtctgatcatataagccataatccctccaagctggctgtcctcaactgctctttccctctctgccctctcttagactggtcttttctgacccttcttaaaatttgattcttgctctgttttttcatytatgagcctgtcctttaccagacacctcacctgagagttggtttaggtgtctggtcttcccaatttgactctcaactttccccaattaataggagttggatttgcttccatttcaaattcaagctctaattcagcaacacttacttctctccttcctctcaccatatccaaaagacacaataatcagtgggaaagactcaaacacccaagttacaaggctggcattattatacrttttaaactcaaggtcataccttctgactcaattttagtgctcttaaaaacaacaacaacaacaatgacaaaaaatatatatataatataataaaaataaaaaccctttctttaaaataaggagataacagaaaagaccatctattttttttaacctctactccctcactactccagtctgatagtctgatagaaatgattcatgaagagctaaagtgttaaaaagacaaagggaagagcaataggaactcgcacctacaaagttcttacatacataataaagtctgatcttgatatttatattcctaaaaatattttgttgatatcaagctttatttgtaattgtgttttatagaatcatattttgtttacatttagatatattataatttagatttaaactccctaaaaatgataccctaccaaattatataatgattaatttaaactgtctaaaaatgacaccctaccaatgccctcatactaagtcacaacaaatttagatttgtggagactttgaagcaaaagaagagtaacgaagtcatctaactacagacagaaacattttaagcctcccattgctacaagttaaaattcataaatcaaaagaaaatgtattttaaacagatatatttataatcaagaatactgttgctttagtaatgtcttaaacaaaaatgaaaatttcttaataatggaaataaaaaacatgtgaactctactattcctcaacaattaattaggtgcttgaatttgtttcttaagtgtctgtgacctgtcttgtaaaatgagaattgttagttgatcccacactaaacaaacatttcctaatttaaaaatgggagttgatccgaatgaaaaatttatgtaattttatatgatttataagttaaaattcagctaggcaacgttaaaaaaaatctgtttggaacaaaatgttccaatgagaatctcagaattcagaccacctcagtgctttttagacttaggttcaaaactagacacacattagcatatttataattcttgattgctggttcctctatctgagcctaaggaatcaggaaaaatattgaatagtcaagaaattatacactttcaaatattaaatattttgaatcccttggctgtgtttttctataaagaaatcacatttggtttgtttgtttatttgtttgtttgagacagggtctccctctgtcacccaggctggagtacaggagtacagtggcacagtcatagctcactgaagcctccaacttttgggctcgaggatcctcctacctcagcctcctgagcagctggaactacaggcacacaccaccatgcctggctaaagtttagtttagtttattttygtagaaacagggtcttactatgttgcccaagctgggctccaactcctaggctcaagcaatcctcctgccctggcctcccaaagtgmtagggttacaggcatgggctaaagcccaaaaagtaacttataaatgatttcctgctttcctactatttttaaaattatatatatatatacttatatatatataattttacatatattgtgtttttagaatcatattttgtttacatttagwtatatatatatcaaggtttaaaaaacattacctttaactggtagagtgtatatgttctttaaggtattcatggttttagtcttgctctagaaattacgataaaacttgattttaaaggtatttcccaaaatctgccttcttaacttgctgctcacrttctaagaataagtcagttcttcttagaagtattatttattgctttttttggtcagtatctcaatcttcatatctgttctggttttttagcaagttggtatcccagcactcactattctttctaaaatcttctgatatttaaaaatccttcctcattatagttttttacctacatgaactatagayttgctgatttaagacaatatatttctgccttgtaatctgtaagaaggcaattatttgttttataaataaagaagggaggagttaactacaataataaatagtagatggaagctactaagagttggaatgctattagaagatcattacaatagccattctaacacatgtgaagtgatatctcactgtgattttgatgtgcatttttctgatgactagtgatgttgagcatctcatcacatatctgttggccatttgtatgtcttctttggactaatatctattcaaccccagagcatatttttaaaagttggttattaattgttgctttttctatgcattgagttgtatgagttccttatatattctgaaaattaacctgttatctgatattaacctcttatctgatatatggtttacaaatattttcttctattctgtaggttaccttttcatgctattgattgtttcctttgctggacaaaagctttttagtttcatgtatttccacttgtctgtttttcgttttgttgcccatgcttttggcattacatccatgaaatcattgccaatagtaacatcataaagttttttccctatattttcttctgatagttttacagtttcaggactyatgtttaagcacttaaaccattttgagcaagggtccactttcattcttttgcatgtggatgtgcaattttcccagcaccaattattgagaatatgatactttccccattgtttattcttggtgcccttcttaaagattagttgattatataaatgtgggtttacttctaggctctctattctgttccatttgtccatatgtctgtctttatgccagtactatatcgtttaaattactatagccttgtaatgtattttgaaaatcaggaaatgtgatgcctccagttttgctcttccttcttaaaattgttttggctatttggtgttttttgtgattccatatgaatcttagaactatttcttctctttctgtaaaagatgtgattgggttttttggtagggattgcattgagtctctacattgctttgagtaatatagacattttaacaatattaagttccaacacaaacatggaatatcttctcatttgtttatattctttaattttttgtcagtggtttatagagttcagtatattagtctttcatctccttagttaagtctattcctaagtattttattatttttgatgctattgtaaacaggattgtttgcctaatttcctttcaaatagctcattgttagtatatagaaacacagctaatttttgtatgttgattttgtatcctgctgtattactgagtcatttattaattataatagttctttggtagagtctttagggttttctatatataagatcatgccatctgcaagcatggataactttmactttttctttctcacctacatgcctttttttcctgcctaattactcaggccaggatttctctactatgctgaataaaagtagcgagagtgggcatccttgccttgttcctggtcttaaagaaaacacttttaaaagctcttcactattgagtgtaatgttagctatgataatctcatgtatggcttttcatgttaaggtaatttccctctatttctagtctgttgagagtttttaacatraaaggatgttgaattttaacaaatgcttttttgcatctattaagatcatgtggttcttatcttttattctgtcagtgtggtgtattaccttaattgatttttatatgttgaaccatacttgccttccagggataaattgcagctggtcatgggtgtctgatcctcttagtaagttgttgaacttggtttgtcagtattttcttgaggatttttgcatctatggtcatcaaggatattggcctgtagttttcttttcttctgatatttttgtctggctttggtatcaggcaacactggcctcataaaatcagattgaaagtgttccatcttcctcaattctttagaggagattgagaagaattggcattaattcgtttttggatgtttgttcaaattcactattgaagccatttggttctaggcttttctttggtaggaagtttttgattactatttcaatccctccactgggtataggtctgttcagattttctgtttcttcatgactcaaccttggtaggttgtatgtttctgagaatttatctatctcttccaggtaatccaatttattggtgtatagttgctcacagtagttttttacaatctttttattaatagtttggttccatcagttgtaatgtctcctgttttatttctaattttatttatttgggccttccctctttttttttaatctactagtggtttgtctattttgtttatactttcaaaaaataaactcttacttttgtccatttttgtcacatttttatctctatttcatttagttttgttctaatctttattatttccttctttctgctaactttggccttagtttgttcttctttttcagcttcttgagacgtaaagttaggttgattatttgagagtttcctgctttttaaatataggcattgactgctataaacttctctcttagtacctcttttgctgcatcccctaagttcaggtatgttggggtttttttgtttgggtttttttgtttgtttgtttgttttcatttgtcttaagagactttctaattttccttttgatttcttccttgacccattagttgttcaaggtgtgtttagttgtcacattttgcaaattttccagtttttcttcagctactgatttctagttttattctattgtgattggaaaagaggagaakgtatattctgctgctctttggtgaaatgttttgtatagatctgttagattaatttgttctatactgttgttcagatcctgtttccttattgatttttttcaaatgttatattattaaaagtgagatattgaagtctctcacaattatcatattatttatttcttttatcagttatgttrcattttgcattgtatatttaagtgctctgatgttggatgtgtatacattcatagttgttatatctttttggtgagttgatcattttatctttgtataatatccttctttgtctcatgacagtttttgacttaaagtctattttgtccaatataagtatagccagtctttcttttggttaaaatttgcagcatgattttttccatccctacacttttggcctatatgtgtccttaaatctaaacttaataagtttattaagtttattaataataataagttatgtaaacttaataagttgtcaaacttaagaagtttacataaattgatccaayataagttggatcttgttttttttcatccattcagctacattatgtcttttgattgaggagtttaatccctttatatttagagtaattaatgtacttccttttgatgggcgagtacttactatagccatgtttttttactaccttgtagttgttttgttcatctttttttccttgctgtattcttctgtattttgttttgtatttattgctatactttgatttccttctctttttttatggctcttctgtatgtactttctttgtggttaccaagaagcttgtataaaacaactcatagtcataacagtttattctaagctttaaacaacttaacttcagttgcatacaaaagctacacttttacttctccccccacaaaccccccacacacgttatgttcttgatgtcatgatttatatctttttatattgtgtatcaattaacacattttatggttataattatttcagtacttttgacttttttatattatgattaaaagtttacccactaccattacagtattatagtatttgtctttatatttacccttaccagcaagttttatactttcatatattttattattgctgtttagcttccttttgtttcaacttgaagaacttcctttagcatttcttgttaggcaggtctggtaatgatgaactccctcagattttatttgtgaaggaaagtctttatctctcctttatttttgagatcatttttatcaggtatagtattcttagcaggggtcttttctttcagcactttgaatttattctcatctaccttctctggcatgcaawgtttctgctgataaatctgttgataaccccacggagatttccttgtatggaatgagtcacttttctcttgctgctttcaaattctctctttgtcttcaaattttgtcagttcaattatgtgtctcactgtgaatttctttgggtttactctatttgaatttgtggaacatccttgatctgggtgttcatttccttccctagatttgggaagttttcattcattatttctttgaataagctttctgtctctttatctctatttctccttcttcttacactcccataatgtgtatattagtccactcaatggcatcctataagtcccttaagctttcttcattcttttttctctttgcttttctaactagataatttccagtgacctgtcttgaatttcactaatcctgtcttctgtttgatctagtctgctgttgaacttctctagttaatttttcatttcagttatttactcttcatctctatgatctgtttcacattttcttatattttctatctctttgttgaaattctccttttgtttatatgctttgttctcctgaactcactgagcacctttacaagcatctatttgaattttctatcaggtaaatcatatctctgtttcattagggttggtttctggaagattatcgtgttgctttgtttggaacatattttcctgtttctttattctcgactctttgtgtttatgtccgcactcccagtcttcatggattgaccttgtacaggagaggatcctcaccagtcagaccagccagagattccaggggcccctcaaatcctcatgctagataaaactgtgacctttgttctcactgatcatcaggcatctagaacatgctaggtcttatcagagttctgagacagataagacagatgtcaatgcctctggcagccctcagcacaatcagagttttggaagtatggtccaattcttttcttccctcacaagagaaaatctggagctaaggatttttcctacccaaacactttgcatkgagcaagggagtggggctgtggcatgtgttaacttactatttcaaaccacagtttctggtctcattagctcccaggtagctataatatgccagatttcattaatcctctaaggcaggcaagacaggattcagtgctttgggaaccctccaaaaatattagagcattggattcattgtcctattctttcttacccttcccatagagacactgggagctcttttgtttgtttctgcttgtttcccttgtgctgagctgggctgcttcatgtgttagcttgccatttcaaaccacagtcattattctcagtagccccaggtggctgtagtgttcctggttccatcagctctccaaggcaagtgagacagargccagtatctcaggtggcctccaaaaaaaattcaaatgctgaatgtatggtcttgtcctttcttccctcctcagagaaaagctgggagctaggatctcccccagttgtatggcaccatgaccatgccaggggtagggcccttggcaagagggtgtccttgtctctcttgctggttttcatgtagttggttttacacttgctccaggatgcaggagacttgtaactagtttctggatttctcacaaagtaaattagtttgtattttattatagaatcattgtttccattgaggaaagatggatccagggcttctattctaccatcttgctgacattactgattgaattttcaaatctttatatctccaagagcctagtatagtgcctagtgtgaaattaatactccataagaatgaacgaatgaatgaatggatgaatgccctggggttcaaccactttctcccrtattttcctacaagtgatttacctttttatggagctttgaggaaatccatttgctcttcctcctcacctggattaactcccactcccattcctgaggaagtgcttttatgcaagatgaagtggttctttktgtgtgtgtgtgtgtgtgtgtgtgtgtgtgtgtktttcatatgtgtgaaatgttaccataaccctggttcttctgacagtagtcaatttatcagaaagaattctcctttctagtgtctgtggtatgaatgataaagttcagtgttaggatggtcaacctccagcacatacagatagactggggtcaagttaagggcaatagagtcaggtggaatagagttagggaaygctgagtaatggattatagcctgcctgcctctgttcctgcctgtcagctccacaggcattgctgggaaggaggcaaggactatgctttctgaatgctgtttctaaggtaccagaaaattactcctaaattagccctcaggtaaaagcacaattggaggctcaagtatatagaaactaagaaaaatacagaaatagtagctaagagaacagtggaaagctggggagaaagagagacagagacagaggaaaaaagatgtagagaaattgaattctcctaacacacttaggaaaagcaaaaggaaaattggattccaaattggcacttttcccacaaactacagtccataagggtgtgtgtgtgtgtgtatatatatgtgtatatatatatgaatactgctgtttactcatcaatttacagtgtatttttcacaactaatttatagatgaaaaaacagtaaatgtaaaagcactataaatgtaaggtaacatagatcagtggatttttctaaataactcattaactaaagcatacttttccaaaataacctgaaaaacaagtgtttttaaaagtattttattaraatctatatagttcacatatcaatatgctttcctgcaattcaaaataggcaaaaatgattatttctttattttaaatatctctgcacattgaggcaagttataaaaatcartgtccccacacattaaaaaaataagctatgcttagacttgtttttcttgctgtttgtcttattattttttcagtttttttaaggtcatgccatagaggttcacaagacgtgtattgtttaataatagaaacagcataggtagagtaaaaatgtttccagttttgatttgttttgtttttcctgagggtagattttttagcactctggagagtgcccggagcttgcttgatataatgataataatgtactctctaataagaaaccctggttctttagatgtgatctcatttatttttcaccattcccatgagatggaagaagrcacagatttttgaagcttaattaagacaaccagagatagtagatgattgaactggggaaataatttaggctcactgactcatactctaccaaaattgaaggagacatgggatctgacctatacttggctccagacaggtttgagcttatgtcaggctcactgcatttcaacctcagacaccgtgagaagaatatgagtatgcttctgacatggcctatattattcactcaacaaacattcattgagcccaaggctgggtctgaaacattcagtgccaaataagaccaagcccttgttctcaagtaactcagagatcagaaggaacaggagggcacagataatgacagtacctcaagaaaattgagttctayagtttgtgcaaaagtgttacaggcacgggtaattttgccaaaaagagaagtgaagtcattacagctttcactgtgagccttgaaaggaataatagttcaccctgcagaaaaggtgggaggaagagagtgtgctcaacacccataagcataaaatgtccaggaacttttcgcatttcttttcagtataaaatgtatattcaaaaattgtcatgataggtattgttttatatatattcagttaatggttttaaatgttaacatatgttgtagcataatcctgagattctctcggctatttcccttaatagggaaaaaaaaggagaaaaatatactttagctccttcttccaaaaaagaaaagctgaatttatcccagttgaataggagggaaatacatacattattataaaatttttaaaatattggctcttctattcagatatatttaaccttattattgggaattgttttataagaaaaaattataacattattttttagctatccaaatcttaacatcagctatatgagaattcaatcgcagtggttttgcttcyttttttgtccttaatcttttgttttcttcrgcatgtcttttacaggagtagcttgtccatagaacacagtctccctaaggcaggttctaggtgaaatcaaagagtagaaggtgatatctcctgaggggatgacacatgttgcttgaaggaattggtttgcactacaaagggcttcctgtgcagtaaggagatgaatacaagctcaaccttgaaactctgatcttctgtttttaaatgtctgtacmaacagccttttcttatgacaacagagtcacactatgagacagtgccacccaggtttctcaacagagtatgcccttgacatcaggtatgaatctctggtgggaattcgtcaggctgagcctgtactgttgcaaacaaaggtagacagacattcttgcgtctttagaaatgatgtgtagctctttgcaattgtgtaagttataattgcaggtctttggagtcagaaccaggtacttcaaaactggtattgtctagtcctgattcacaactattgttagacctctttttgactctcaattcccttaactaaaaaggaggatgaaaacactcacttcaccagatattaaggtaaaacaagataaaagtatgaaatatccttcaaatattagatatttttattcattaaatatgtatttaataatgtattcattcaactaatatttgtcacaagccattagtcattccccttacctgtacctgaagagtcagagagttatagaaatttgtgtcatgcctgtaatcccagcactttgggaggccaaggcaggcagatcacgaggtcagaagatcgagaccatcctggctaacagggtgaaacccccgtctctactaaaaatacaaaaaatagctgggcgtggtggcaggcacctgtagtcccagctactagggaggctgaggcaggygaatggtgtgaacccggaaggtggagcttgcaatgagccaagatggcgccactgcactccagcctgggcgacagagcaagactcctyataaaaaaaaaaaaaaagaaagaaagaaagaaagaaatttgtgaaagttattgcattggagatctttggatgtgtgactgtcccttatacagctcctaagagtgaagttcatgtgtagatgtgattgtataataaaaacgaacaaaccaaaaagagtttccttaaaatcacacagctggtaaaaagcctaatcaacatcytacccagagtgtcagactccagtattcactttcaactctttttgccctgctcactccccagaagacaaggcagtaattcacaaagaggacaatgattggtttattggaattttacaaaacatttgtacccaagggtgttgttsctgtagtaagagtgcctcttctgattttcaagcttcttattgttcacaaccggtacaaaaaatatgaaagcccgctctraattttccatctccaaagaattygcagggattggggatgaaagccaggtgaaataatctccaattccatcatcctgccctacagcagacatagcacaaatttcttttyagcaaattagctgaaaatctagtcatctctagctaaaaatatctaaacaccaagcacaaacagatccaagttcaacacataagctcagctatgcactcacacttttatcctttaggaaacacactcatatcctttgagaaatagtatttctgaagcacagacacacatactatcacacgcaaaagatattcatcaaaggctttatttatatatccatttggagaaagtccataggagaatttgccaggaatgaagatgaagaggaggcagcaatgattcrtattttgccctcttctgcccaagagaaatattgataactattctatagttgtgccatagccaaaaacagtggtcatcctgatgttagaattccaatgacaagccctaaattagctctaacctggcacagagtaattctacaaaagggcacaaaaaccccagaactttggatggcttccttgttgctgggtagattttggactctagctctggctctgggactgattaattgtgtaacagtgagcaggctctttgcctgtgttttctcatctgaaaaatgaggcatttgagaaaaacaggaagattggagctaaatagcctcaggtctttttcagccctaaaaatgctatagtttgtaattctttcakacattgcacagccccaagttccactttgaaaagcttctgtctccagagtattagagttttccccatcccagtcatatcaacacaacttttaggcttccatggttactatataattgtctcagttggtatttctcactgatgttgtttagaacagctgtagaggtatgtaccttgattattggtgcagttactgatgaggcaaataaccttggtcttgaataattctttttatgcttgaggtgttcctaattgctatatgtaattaaagagcctgaacatatagaagctatgagaaagtgagtttagtttactgaaaataagatctcaccsgaggctttatgtaaacgcctggggctttttaatcttcacagttttctaaatgtcctttaagtttcagcactctgagtgcaaagtacattgtctcaatgcagtatcttgtatgtaaatttctctcatcttgtcttagttggctcaggctgttataacaaaataccataaataagcttataaatagcttatttcctccgaatagcttaaaaacaacaaaaacttatttctcacagttctggaggctggaaagtccaagatcaaggcactggcaaagtcggtgtctggtaaaggtctgctttttagttcagagacarccgtcttctcactgtgtcgtcgcatggtagagaaagggcaaacaagctcccttgggctgttttacaagggcactaatcctactcatgagggctctaccctcatgacctaatcatctcttaaaatgtcccccaataccataatttgggggattaaagatcaacatacaaattttggggggacacaaacatccagaccatagcatctcctcaaatatcaaggaatgactatagtacctctgttttccaagcatatgcccatgaactctaaacactgaaaaatttgccacacaaagtataaatcagaactttgtcatggaagtgtccataaatgacttgaaaagagtctgcaagtgtccacatatgactgtatcaagtcaacaggcattttttttaactacttcgatatggcaagcagtgtgccccatattcactgtgaaggactcgcacaaagtaagaaatagaaatactgcttccttcctaggaaataaatctatagaatcaggtgcccccaatctcagccaaacctaacttgaatcatttcctttaatggaactgcccatgatttcaaagaagcagagatgatatgttaagtctgagatggcataaatttggcctgctcagtggaatgtctcgcccccattcctgtttccccagcttctgcctgccccagttctcccacagctgggtcaactcatttaatcttctacagatccagcctcactatttattttcagagcaatttgagttttagcaggatataaataagtagcctcaagcccaatgcctccatttatctaggcttattatagcaccccttttcctgcaggctggccccagcaatggacacaggcactatgtcctaggctgccctcacttcattctcaacgagagccattctgtattgtttccagatcccaccaccctcatcccarccctaatcctgccscactaatttcagtccgcrttgaaaacagaccaagtcatcaaaaatcagttccctgaaggagcaattttttgaatgactaattcactgaatgtaataaattttctagtgtgccaacaattttgttgaaacatttattttgagtatattaaattaatttgagtatattaaattaaaacaatattgaagacacactttgtttagatatgattaagaatgtattcttcttgagtatatgaaatatgaatattctcatgaacctattcttcaggaacatactcatactcataagaaaactaaatgactcgtgattttcagcatttataaatttgagcattatttaaaatacagctgagtaaaatatattaattgaagatattcaaaaggactatttttcaatatgatattttgataattgaaaaatttgatcaagtggtcatttgacatttgaccctttagtgaattagctttctgcaaattgacttgtcaatgggatctcgagccatctgagtgctgtgttcatacttctatacttaccagcagccttcctggatttctgagtgtttccccacaccatccaccttggttgagctctgctacatctgacccctggtgttgactggagaatgccattccctgaagtagctgggtcttacttatgtgactgaaacaccattgctagatgccttgccctacccaaatggtgccacatagctctaagacccaactcctcttccaatctcctgctcagcatcactggtgaatcttgagctatgacagaaccaacagcctgtgctcttctactttcaaaacccagattttaaatgtcttctagtctctcataatcatgcaaaggggataagaaaacttgaaaactctcagagatatgtattaagattgactcactatgtagaaaaaaatcttctctggcttttaaccaactatctctattagaaaaaaccttatcatttagggtatgatagaagtagctgggcaagaaagtggatcatttttagcatctatttgacgcatctgggttaagaataatattttcccttacttccttataaagacaaatatgtattcctaaacaatttatgctaggaagtaataacatattttttttaatagtgcacatcaccaaattcaattttggatattatgacttatcaacaaggctttcctggtctttcataaacagacttcaaataattacctttatttcttcaaatagacctacataagttgttagagtagttccaccaaacatcctaaagtcttttttaccttgcagatcctcatcctcaccacagatataatgactttatattaaatatcttaaaccaattagagatttctggtatggtatgaaacatttcaaaataattatcagttataaaaaaactaaatcctaaaaacttgacgactaacagagctgtattaatttgtaaatacagccattaaaatagtaaaaccttatttttcttggcactcaagaaaaatgctagtttaaaaagcttgatttctcagataaaaatattgtagcaattgttgaactgccacatgtataaggtatagttatcagaaaagcaagtatatgaggagcaaygagaacacatcagttctttgggttattttctgttagattgtgacaatgtgaatggaacggatgagatcatgtgaatagcaacaggtgctggggtccagtgaatacaccatgatggtctacagtgaccttctccaagggtatccatgttttattcagtataagtattttaacctggaaaaaaatatttcaattgcatccatcatgatggcatgcttaactgccttttggaggctttatttataataatggttttctaaaactgactacacgttagaattatctaatgatgtcctgtttcatatagactaattaagttaaaaaattctgagtgtggakacctgatcyttgtattttttaaattttctccaagagattctgatgagaacctaggttggaaaacactggttttgagcawaatatctgctggattcaaaaaataaaatagctataggaattttctttcagctctttctgctaatggagcctggtcattggctttaatgttcctccttttaaaaccccatatctgacattggcttagctcaaaagatactgagcttgaatttgcttgggatttatktggacacctggtctaatagcaagtggttaagctagtaggttttcatttaaaaaaactctatatgaataatttaattcttaaatgcttttatagagttggatattggcagtttgaatttaattgatttcaaggacaaaatttgaccttgaaataatttatagggctgggtacagtgactcttgcctctaatcccaacactttgggaggctgaggcagaaagatccacataaataatttagtgcaatcatataaatgtaggaatagtgtagaggcagttccgttgcaaaatatggtttgtgcctttctcgttaactttattttgttgtcttccttatttctgttaaatgactgggacaacagtggggattaggagagatggacatcaattcaaatagtagagaaacctttacaccaaacaataattttttgattttgagggtttctgctgtgcgatacaatgcatgcagttaactttctggaagcacagtgaaagcataaaagctagttccagtccactgcacaccattgatacttgccagtttagccaatggaarattctctctctctctctctctctctctctctctctctctctctgtctctctcacacacacacacacaaattttgtcagaggtgttaatraataagagctagcaaatgtaaactgtgtaccaaaacaaaatatatatatattcacttaccatatgagcctaattatttgattctctagacaatagaagatcattytgggttttgttgggggagttgtttatttttatttgtttgcttgcttgtttctaccaaaagatgaacagaaaacacacatacacatatatatccccaaatttatcctgtgtttaaatcttatattttaagaaaaaatacacagaacttacactatctgacttcaaaactcgctataaagacacagtaattatgacagttcatgactggcataaagatagacatatagatattataaatgaaacagaattaragttcttacatttatgggcaattggtttttcacaaagatgccaaacaattgaataggcaaagtttagacttttcaacaaatggtgctgggacacttggatatcaatattcaaaaaatgaaaacaaaaacttaggccctttcctcatactatacacaaaaattaactcaaaatgggtcaaagatttaactgcaagaactaacaaaacttatagaagaaaatttaggaaaaaattactgtgaccctgcattaggaaaagagttcttagatatgacaccaaaagcacaatccataaaataataaattggtaaagtttaacatcaaagtaaataaataagagtttaacatcaaagtaaataaataaataagtacatttaatttataaaagaaagtaaacaaataactttgtgctccaaaagacatcattaagaaaatgaatagataagccataaactggaaaaaaaaacctttgcaagtgatatatctgataaaggacttttatatccagaatatataaagaactcttacaaaccagacaacctaatttagccagtttttaaaatggagaaaagatttaaacagatatttgatcaaagatataagtggctaataatcacataaaaagatcctcaaaatcattagacaaacagaaattaaaaccacaatgagataccactacacacccacaaaaatggctacaatcaaaaaggtacagcaataagtgttggtgaggttaaaaaatgaaacgtgcattgctggtgggaatgtaaaattctaaatttctgtacagactattgcacaacctgtttggaaaacaaagttgtacaaattaattggaaaatagttgagctgtttccttaaaaattaaacataaacttataacacaagccaggaattccactcctagcattctaccaaaaaaaattaaaaacatgtgtccctacaaaggcagctacatgaatggttacaacagcattgttcataacagccaaagattgtaagtaatccaaatgttcctcaagtagagaatggattaaaaatgtgttatatagttccggtgtggtggcttacacctgtaatcccagcactttgggagcccaaggtgggcagatcacttgaggccaggagttcaaaaccagcctggccaacatggtgaaacactgtctctactaaaaatgcgaaataataataataataagccaggtgtggtggtgcacacatgtaatcccagctactccagtggctgaggcacaaggatcactggaacccgggaagcagaggttgcagtgagacaaaatcatgccactgcactccattytgcatggcagaggggactccatctcaaaaaaaaaaaaaggggggggggatatatcaatataatgagatcctgttaagcaatataaagaaatgaactcytgatacatcctaccacatgaaaaacttcaaaaacagtatrcaaagtaagagaagccagacccaaaaaactacatattgtgtgatttcttttatataaatgtccataaaatttaaatatatataaccagaggcatgtcagtgattatcagggctgggaagctggagctaggaattaactaaaaatgggcatgaagcaatttctgtgggatataatggaactgttctaaaactggattgtggtgatggtttcacaactctataaatttactaaatatcattgaactgcactctttacaatgagttagtttagtggaatgcaaattatattacgaagaagttgtttgtaaaaataattgcagagtgggccgggcacagtggctcacacctgtaatcccagtactttgggaggcagagacgaagggatcacgtgaggtcaggagttcaagaccagcctggccagatggtgaaacaccgtctccactacaaatacaaaaattagctaggcatggtggcgcacgcctgtagtcccagccactcaggaagctgaggcaggagaatcatttgaacccacgaggtggaggttgcagtgagccaagatcacaccactgcactccagcctgggtgacagaatgagactcagwaataataataataataataataataataataataataattacagagcagatcaagatcttctagcccaaagttcactgttcaatattagcttmcaaagacatgctttataaatttaaggacaaaacatcctttgcctaaaatcccttttatttaatattcttgttgaaaggccacactatcaaatattcactaagtcataacacatttctattcgatttactttaaaattatgttccactggcaattcacgtctttttactttataaatacctgctatgattttctactaycctctaccccatgtattttattgcttgttatcctcttttttttttttttttaattcagggctaccagtgctaacactaatagctaatatttttgaagtatacagtcttctaaatactttacacatttgttttatttcattatttcaccttattttatttaattctcaaaataattctatgaagtggtcattattgttatctttttattatgtaaaggcaactgaggcacagagaagttgctcaagggcatccatctgtaaaatggtaaggccaagatatgactcctctacccaacctcttaaccactgagctgcactgcctctcaggagcagtgcaagagagggagtgtttttgcattttatcttccatrttataatagacatgtatatttttagataaagctctccaaaacagaaatgcccagtgaacactgctgctttcctcccgtttctctaagacaaaacatgaaatatgtgaacacattatatgaatttgttttccattcctccaaaatatttgtttggtgttggtaactggaaaaaattataaattcacatactatatgaatacatatacatgtacacacttacacatttatttgacttcattgtagaactttgacattaatcccaataactaatctctttatacatattgtttcatcctgacatcaacctgaacagggaaaattgacttatataagcacacagctactacagatgtctttttagaaactgattattgatatatagcagagaaacttaaaatctctttaactaacttgaagtcctgaccatatgacttctttacaaacaatgagatgagtaccctgagagatgctgcttccagcaactaaagattgaattaaatcattaayaaatacatgataaaaacaggaatacattgtatacattttgtattaactagggtttcctagagaaacaatagataaatgatagctagctagctagatagactgagtaatagattcattatagaatttggctcacatcattatggaggctgagaagtcccacaaatttctatttagaagatgaagaagctggaaagccagtggtataattcagttcaagtcagaaggcctgagaaccaggggagctgatggtgtgagttccagtctaaggccaaaggccctgaaagcaggagcatggatgttagagagcagggaaagatggatgttccagctaaaacagggagcaaatttgtgttttctatggctttwtgttctatttaggccctcagtggattggatgatgcccaccagcattggtgagagcaatattgtttgctgggtctgctgactgaaatgctcatctcttctagaaacaccctcacagaccacccacaccccccaaaaaataatgtgttaccagctgtctgaggatcccttagtccagtcaagttgacatataaaatgatatactttccataatcagggacatgaayatctgtctattttcaacataattcatctgttaaaatgtttgataagactgactgcaactagggaatatgagaaaacataattttattcatgataaatttcagtattaggattcattcagcatgttaaaagtttacattctggaacatacagtcctctggtaaaaataatgttttagcttcaatttgacaaaatagcctacaggtattttggacaggaatttatagggagttaataccaacaaaaatgccctgtgataggctatgatgatggtactgaatagagttcaatagaggaaatagaggaaaaaaactctcttaaaaagattacagtcatttgaattaatacaacatgtacaaaatgtaatgttttggcatggaactattgaagacaaagtgtcctcaaatcatttgttaaatttttgaaggtaatgtttcctatttaacccaaataaaattggatattgacccagtgtgcctctagtaggaaaaggagagtaaagtgaaagaaaatgaaagaaagggaagcaagtgatattaaaaagtggctcttgggtaaacactttaattagcatttcatattgaatatttcttaaggagcatatgaaatgtgaattttcaggaacaaacctctgccaaaagctgccatataactaattctaaatacttatctttgctcaaactgtaccacattatatagcttggaaggctagccagaggaaacaaggctaagtaactgtaatagcagtctgttagaaaggttggatgtgttattggaaatgccagtaggtttgcttagcccatttcaagtgtttctctgaggaccaaargctgcctcactaatgatggtatcagaaaagcataaggcaagccagcagtcaactgcttttcaatcctcccttggttcataagatttgccatgatttcttctaatatatatatatgccstttggacccatattataacccaaataaatttggcatgccaatgttcctcttctttgctttttgaaaatcagaatattaatttttatgcattttgactaaccctagtttgagtctaaaacatccctctatttctggatattgtgagggactagagagccctcaccttcagctacctaccatttggggacccttggggaatattaggacttttgggctgagtgtgttcactcatgcctgtaatcgcagcactttaggaggccaaggtgggcggatcacttgagtccaggagttcgataccaaccyggccaacatggcgaaccccatctttacaaaaatacaaaaattatctgggtgtcatggagcacacctgtaatctcggctactcagraggctcaggcacaagaatcgcttgaacccaggaggcagaagttgcagtgagccaagattgtgccrctgcactccagcctgggcaacagaaaacagaaagagactctgtctcaaaaaaaaaaaaaaaagaaaagaaaagaaaagaaagaaagaaagaaaatagaaggaaaaaaagacttttgttggtcacttcagatatatgattgagctctcgaacagctcataaattttttaaactggtcaggaaaacaaactctaagcayccaaaagatattttctgtggctgtttttgttgttttgtttgtttgtttrttttttcccttttttgttagacacaaaacttaaaattgattttcccattttgctttcatccattaattgaacaaacatttgttaagtgcctactatatgtcagacctgtatcaggcactgtgaatacagcaatgaacaatcatttactctattcatggtaggttagctttacctaaaatctcacacatcatactggtgcagaagatttgaggtatagatgcctgaataaaggagtcctgagaggagtagaagacagagaattctagatgcaacccatgtatgttcttgtctaagtcatttaagtacaagaaggtagaaaacagggtgagttgtatctcttgttctaatcatgtctgttcctaaaatatacaagcaccatatttccttgaacaaaaacatctgatgactagttctgacagatacaaacaaacataacaagagaggattttataaaattgaaactgtcagataaaacacaggctatttaattaaagtacttggcaatccgtgatgaaagctcctgggttcctttcaaaatcttccaagtgcttttcgatgtaaatttcatcagccactgtcccagtatgggcccctggtagtaaagaatgtgtatgttcatctttgcattgattccattttagtagcctgattgcttatcttgtgttccctgctcttccagggatcaatgagcttttcagttcttatcctacctgatatctaagcagcatttgacactgttctactccatccttgacttccatgacatgacacattcctgacaatcctcctacctctttggcccactttttctcagcctcctttattgtctcctttatctctgcccattctttaaatgtccatgttccttaataccctcttctcatttcacacaaactcctgattcaattttatttcaaatatatacccaaatatttactgaaatatatattccagaaaaaatatctcctgagcaccatgccctagacccaatctcctgctactgaatttctaaaattggacatccaatttcacctcaattttagctttacaacactgaatttattatcttctcctgaacccactatcccatcctcccaaacttgcttctcttctgtgtttcctgtctctgaaaataataccatcatcattcagttgcccaagccacgtacttggtctacattcttaactcctctttctctgccgcaactcacatcaaagcagtgaccaaatcctacaacctaaatatgtcttgatataccaatatctcattatagccactatttctcatctatcctcatcaccattctctctccatgacctccatactggtcctctggcctttaggtttgaaccccttgctctggtttgaaaataatggtgtccccttcaaaattcatgttgaaacttaatccccaatacaacaatagcagtaacctttggaaggtgagatattggtatatctactttatgaccttgcagcggcatggcaagggagacaggatcttacaggattttacaaattgtgtttacaaggaattggaattgggagcataggtaaggtctgctgatcacagaaaaactggtttttaacattccttttagttttggagggcggaagggagagagggagcgaggacacagggaagtttacaacaaaattttcactgttaatagctttcttgggaagaaaacacacacacaaattctgatgttaggaatattttaagcatatatcttcaatattattcatccaggascaaagtaagtcctgatgcaggaaaggagtgagtttcacagctttctgagcccctacttgacccaggaagcccagctggaacctcctctcagtctcccctctagacaggacaccccaactgctgttgggaactggacggcagtcgttctggctactttctgctgatgaggggcgaagaaggggccctgcagttgtggtgtcttccagaggggaactttttaggctagtcagagaccagtatgtcgatccaggggtccttggtagatgccgtgagttgagctcatttgaggttccatttgtaagaccatttgtaccttgatggcctcgatcctgaggaaacaaatttgacaaggaggttaaaaatgcaaggcccaaaaacgagtaggatggctgtcgcagggcctagaaaggggaggagccgaggtatccattggttaaacatattcaagcgccctgagtgttcaagctccttttttctactttctatttgttctcttatttctttgaccttttcagtaatgattcctgactggttaacaaaatagcaacattcttttcctaagaagaggcaagttcctccttttttagctgttaataagtctagggctctccggttttgaaggactactgcagctagagaattaagctggctttgtagggtcactagggagttggcaattcattccatgtcatcatttaattttagtgataatttataataaattggtggtggaggttatgcctccaattccagtcccaagcctgcccagtattccgactcctacaataaaagggacaataagggctcacgtgtggcgagattggggtataaggagactttgtaactcctgttcagtatatatggacatgggaggtgctagaaaggagagaaagcattgttctttcagagtgccatttaggcatcaataggctgtgttattatagatgaaaaaaatgcctgaagttagacaagtgaaacctgaggtcttgcactagtctctgctgaccatttgttttttgtattcctagcattcggttattgcaaggactgttacattttcttactaaamcttgagcttttaaatgtctaacaatatcctgtaatcctttgagagctttaggccttaaggtatattgcctttaataaggaaaagtgstggggtcttttagcttgatttggactggatgggcattctttgcctttccaaattgtcgttttaaggcccatacctcaaagttgattccttctttaattagggacaacaaataggwaatttgttccccatattcctgtagataatggccccagctttggctaatatgtccctccctaataagggtgtgggacttttgggcataacaagaaaggcatgtgaaaagaacaaagtctcctaatggcagctgaggaggcaagagaaatacctggttacaggctgtcttaagattcctcggatagtaatggactttgaggacagtcgttcagggcaggagattaaaactgagaagaccacaccagtgtccaggaggaagtccacttcctggacctcaacagtcaaccttacctgggactctgtgtgggtgatggcatgagctggcacttgccccaggcacmttcagtcctgttgctgaatcatctggttgggtgcctctggtccagagggccttcatcctctggagcagtgcaccttccaaaccttcctttcaaaccttcttggcatattggacatgggcgaggggacagtttgttttttgttggacaatttttcttaaagtgtccttgcaaactgcactgataacaagccctactaagcgattggcctcctcttctcttggttccctctgagccaccaaggtctgcctgtctgagggccatgtctaaggctgcagcctttatcttatcttgcttgtcccttttggcctgttcctcttggtccctgttatagaataccaaggttgccaggtttaataatgtctccaaattttgttctgggcctaaagcagactatgccagacactgattgggtgataaatttatcctttaaaataagttgaccttctacagaatatggagttagggaggtgtgctttcttagggcctcccttagcctttctagaaaagcggaggggtttttctctttttcctgtgtaattgtggatagcattgaatagttgataggctttttcctagtcttcctcaacccttctaaaatgcaagttagcaaatgcctgcggctccaatctccatgatctgagtcagtatcccaataagggtctacagtgggggctgcctgttgccctgtggggaatttttccctctcctccggggtcattcgatcatttacctggctaaagtaccacagatccccaaattgccgggctacagctaaagctgcttctttttcagtaggacttaaggtctgatcaagaagcaacatgatatctctccatgttagatcaaaggactgccccaatccttgcaggacatctatatagttataaggatcatttgagaatttccctaaatctgcctttatttgttttaaatctgagagtgagaagggggcatgcacgtgaatgggcccaaattctcctccttgtaagggacatagtcccttgtaagggagatagtttgggtgcctggctcacggagtttacgttctctttccggtgtgcctttaacacttcggtgggaccggatggaggagagtcagttggggaggagagtggggttgagggaagaggccctgagtgtggaggcaactgtgggcctctgtcatttgggcaaagcttgcaggcttggcacagggcagtattgtcacgaagggcaaagaaaacctgtacataagggactttactaaatttacctttctgtttacagaaaagatctagctgtagaagggtgttataattaatactttcctcagagggtcaagtttctccattttgtaaggaatactgtggcaaggcagtggtacagaagaaaatcagccgcttcttttttaaggtttcagggtcgaatttgtcccatcttaagggagtgtccagttttgaaggcatggtgcccatttggaattttaaacacagggattcccacacccgtggttagtcttgggactcgtcttccctatggcatcccccgagggtcaggtccagttgtgctcaaggctcatggctgcttttcctgagccctccatgtaccggatttaaccatgcttaccagcgggatggaaacttcccttgcccctgctgtgcgcccattgaccactaaatggggcacaaggactgttggatttattgtgatccttctgccaatgcattctacctgttccagggtggcaaggcccgggtctggggcaccactgatgcttgcatgctaaggcccaatttacgtgggcctggccataaaactgtccttcaaggaggaatctctgaattagcaacaggaggcttagtaagcataaaggggtggtagatgtcttctaggccagggctgagagaacagctgctgtactctagccttctgtccccacttgccatcaaaggagtaagcccctctcttaaggcagtaccagtatcctgtgtcccaactgactatattttcttccttccaataccaactattgaatggttgaaatagcaattcaacggctctaagagctgtacccatgcaccacagattgtacttgagaggccctaaggaaggggaaaacctatgtgggaagcaatggaggaaatgccttaaggtttttactattcacatgaaaattacaggcctgtctttaaattgtcctgatgtaggggaccataccctatggtggggaactggccctttaaaatagccatcaaacgatgatacctgcctaaaccctggaaggtaccatgaasagggatcctctgggcactaccccaaaaatttaagacttctaaatagggaatcttgatcctgcctagtgggaataaccttgcttgcaagatgagaaaagaagtctagccagtggacattgggacccaggagacaggggtcagaagatgtggtggtctcacgctcagtaacccttgcagggggagcctctggcggggccatggtctcaaccaggaaatctggaagactagaatgtctactgataactcccgggtgtacttcgggaccaccacagaaagtgaaagagtaggaactgggtccaaactaaccaacgttcccagccctggagggtcgggggttgttagacagcccttttccagacagcctgacacccgtgtctttagtccggcggccgcgctaatcgcctttaagtggctgacaggtgcccagtttagcctctgaattctaaggaaagacaggacagaatagcaagcgaaagaggtctaatcgtactcaccatgtgaggatcgagatgcctttcctggagatcctcctggctggctcgccaaaatgtaactccaaaggttcttgccttagccatgccaaagatttggtggggcggccgcccatggtgagagagagacatggatcagaccaagagaaaaaaagctgtaagttttattgagcagagtgacagtacaaagcttccacagcatggaaggkgtcccaagtgggtagccagtgttagatttttcaattacattttaaactctttaaggagggaaatacgtgcagtgggaagatgttaccagagcragaaacaaagacaattaacatgtctcagatcttgaggagaaccggaattgtaacttaagtttatctactttatgaccttgcagtggcatggcaaaggagacaggatctcacaggacttaacaaactgtgtttacaaggaattggaattggaagcatagataaggtctgctgatcacagaaaaactggcttttaacattccttttagtttcagcgggggggaagggagagagggagagaggacacagggaagcttacaacaaaattttcactgtttatagctttcttggggaagaaaacagaggcacaaattctgatgttaggaatattttcagcatatatcttcaatattattcatccaagaccaaaataagtcctgatgcaggaaaggagtgagtttcacagctttctgagcccctacttgacccaggaagctcagctggaacctcctctcagaagcagcgtgtagtctccaccagacaccaatcctgccagagccttgatcttgaactttccagcctccagaacagtgagcaatacatttctgttctttatccagtctcaggtattttattaaagcagcacaaatgaactaagatggaaatttgttgacaataaaaccaaactctgcaaaatatttaaagaggtttattctgagccaatatgagtgaccatgtcctggggaacagtttcaagaaatcctgagaaagtgtgcccaaggtggtgaagttactgtttggttttacagattttagagagacagaagccacagacaaagatataaatcaatacatgtaaggtataccttgatttggcccagaaagacaggacatctcaatgccagggcttataggtcataggtagattcaaagatgttctgactggcaattggttgaaaggagttaagctttacctaaagacttaaagtctgtagaaagacattcttgagttaacataaggggagttgtggagaccaaagacagatgaagctttataggtaacagccatcacagagaatagatgtaaatgtctctttttggaccttaaaaggtgttagactcttagttaatctttcctaaatcagggaaagtcctggctgcattaatggagattgtctacagatgcaaatttcccccaccaaaggcagctttgcagggccattttaaattatgtcacagaaatgtattttggagtaaagtattttgatttccttcagggtctgctatctgtcatgtaatgctgtaccagagtaggttctaatatgatatcttattgcctcaaggagatcagtcttatgatctctattttaatgtcartgctggtcagttgtgcctaaactccaacaggaagagagtataacaaggagtgtctgacctccctttttgtcatggctgagaattcagtttttcaggtttctctaggggtctgtttggcccaaagagggtccagtcatttggttgagggcctaggattttatttttggcttacagattggtaccataagtaaggtattgttataacaaatacctgaaaatatggaaacagctttggaaatagataatgggtagaggcttgaccagttttaaagtgcgtgctagaaaaagcctagattgctgtgaatggagcattaagggcaattctggtgaggtctcagaagagaaaagcagtataaaagcttcagtgttagatattatctaagtggtcatgaacagactgtgggtagaaatatggatagaaaagagcattttgaagacatcttagatggaaataaggcatatcttattggaaactggaggaaaggtcatctttgttacaaagtggcaaagaactgcctgaattatgttcatgtcctaatcctttgtggaaggcaaaatttaagggccatgaactaagacatttggtggaagaaatctctaggcaaagtgttcagggtggtgcatggcttttcttaaccgcttatagtaaagtgtgagaagagaaaaaatgctcgagattgaatttacggtcaaaagtagagcagaaggtaaagatttgaaaaaatttcagcttggttatataaagaacaaaagtatggttaaggagggaaaactgaggatgtggccaagctactcattgataaggaaattagtatgaatagagggaagccagatgctattgatcaaaacaatggaagaataactctgaaggcattttggagatctttgagactgccactcccatcacaggccaagaataccagagacttgaaggcagaagtttcaaaggaggggcccagggcacctgtggaaccttggggtttgctgcccagggtcacctcaagtctctcctcccccatactctggtgaactgctcccagctgtggggttaaaaggtatcaacattcatcattgaagtggtgctaagattgcaagcatgcaaagtacacaagctgtggaggtattgctacctccacctagatttcaaaggatgactcagagagtctcaggtggccaggcaaagaaatgccacaggagcagggtggctgcagagagtmtccagtagagcaatgcctagcagagtcrtggggtggggccactgcaaaaagtccccaccagggcaatgcctagcaggtctgtgaaggtggggccaccacagagtctctacttagtcaatgtctcatgaagctgtgggagtaaggctgccctgaaactccagaactctagaactgccagagtgcaatcccagcttgcaggcacatgactccaactcatgagaactgctgcatgagcagcatccagcaaagccatgggggtgggatcccccagggcctttggagcccaacttcagtctcagtaagtccgtaagacaggagatagagctgaagaagattattctcaagacttgatattcaacgttgttttcccttttaggttttggacttacttgaaaygtattacttctttcttcttgcctatttctcccttttgagatgaaaatgtctgtgtcatgcctatctcaccattgtattttgaaagtagataatttgtttgatttcacaggctcatagctagagagtaatttgcctgagatgatttataccttgagtctcactcacatctgatttagatgatatttagataagactttggacttagactttaaagttgattctgaaacaagttaagacttttggggtctactggaatggaatgatgtatttygtatgtgagaaaaacatgaattttgaggatccaagagtggaatgctatggtttaaatcatgatgtcttctccaaaactcatgttgtaacttaatgcccaatgcagtagtattaagaagtatgacttttgaaaggtgattagacctgtgggttctgccctcatgaatgggattgttgcagcttttttactcccatagttcagcaagcaggagggagtggcacccagtggcttcacttcttcactcccataccttggttagtaggagggagtggtgcccagcagcttcgcttcttctctcccattgttccatgagagggagagagagttacagctcttttattcctgctgcccacagctcagcacagcttccactcctgcatttcagtgagttccaggttcttgtcccacaaccaagaggaataaggtacatgaacactggagagtgagtaaggcagagtagaattttattgagccacagaaagaaagctgtcagtgggagggggacccaaaagtgggttgtcatctggggtttttatgggcttaaaataggggaatgcacgctgatttgtccatggctggtcttggaaaaagcacctttggattgaaaaggcatcattcagaaggaaccaaccaagagagactgggcaagacagggatggaagttctcactcctgtcatggrctctatccagaagtggcagcttggttttcaggttttagactgyccttggcttgaaggttggatttcactggggacttgtccctgtctgcctaaggaatttgtctgtttcctgtcactatcaggattaacatccttataaatgggctcaaggttgaagagagcaccctcttccctgtcatttttgctatgagaggacacagtgtttgtccctctggaggctgcagcaatgggacagcatcttagaagcagagagcacccctcaccaaacactaatgctggaaccttgatcttgaacttcctagcctccagaaccaggaggccaattattcaagactgaataatttgtaaattattcagtttgtagtattttgttatagcagcaaaagtgtactgagacaaccctctgatctacacatcacagcccggaataaatttgcaaaaatataatttttctcctgtcaattttatgcttagaacactttggtagttcctttcgccttaaggacaaggttaaaactccttaatgtggcttcagtgattggttcctgtggtttcatctcccctcaacctccccttgaactatttgcttcagtttctaacctattaattttatttccttgaatatgccatgctctktctttctacaagacctttgcaccctctacccagattcttcttagaggagtcttcaaagattatctgctaatgtgcattttcaagtgatctcatgtgtaatcattttccaatggaatacctctaaatagccctgatatttctgcactgaatccttaatattgatcattgacacatggatggatccaggttatataggacttgaatagtgtttgtttgggaaaaacaactgtaagaaaaagtatgcaaatcatgaatacaaaattagatacaaaaatgaatatttatttataataaaaaaatataataataagtgtattggtgccttggagattcagacacacattgtctgagatctctttaggccatttcccagatacacttacaaagaatgcattctgattgcaacctggcttccactcttcactcagggcactgccactttcaacaataatcagcactcagagtggcccatgcatgtgattagctgtggaacttaagcttcattagcttcatgataaatgtttcttccccctgaagttttgatatttttaatagtttttaagtgtttcagctaacaaaaatgcttattggcttctttagttgtaattctgactaaaacttgggaaacaggagaatatggaaatctagcaagatatttctccatgtcttttttggggtgacagtaaattaaccaagaaagtgtttgctccatgtgacatcacagctctgtcatttttttttttttttttttttgagacggagtcttgctctgtcgcccaggctggagtgcagtggcatgatctcggctcactgcargctccgcctcccgggttcacaccattctcctgcctcagcctctggagtagctgggactacagatgcccgccaccacgcccggctaattttttgtatttttagtagagacggggtttcaccatgttagccaggatggtctcgatctcctgacctcatgatccacctgtcttttttaggatattctaagtcagtagttctcagatctggctatatatgaaaataatctggagaactcttcacaaatataaattttggcttccaattctaaactactaaattaaaatttctcaaagtagagactataaatgtatctttttaataagctctgcttgtatttgtatgtggtcagttcagcaccaatctaagactrgcatttgtaaacaacatgtctaaagaataaagattagaggtctggaccctggaagaacaaataggttcaatcagtgcatttaatgttcctcgaatacttttataataaagggaattattggttctaagaaggtggatacccagattcctagacttccacattaggatggccaatttattctgaaaccctaacaagttttgatagagaaaagaaaaaaagcaccccgtactggtccaaaatttttgaaaacaaaagctttggagcatcacaaattttcaccctgtaaaattaaaatatacattagtgcatatgattgtcctatccactatataaataatgaatgtgaattaaaaccaaaactgagaaaaaatttaaatgcaaatatcttagtaattccatcaattgaaaaagcactatcaatcaggttacaaagaaacatctagattttattaggacacgtacttttatgtattcctgatgttgttgttaaaatgtgtatgctattctctccccaggaataagaagactagttgaatatgccattttcactttcacagaactcatttcccctgaaggcaagtgtctaatttctgaaaagtgtgcatatgagtgatgttctatgtataacttcatcattagcattctttttatttgagattcaataataccactagaattttcagttaattttttataaagaatctttgtaataatgtattttaaaaagaattgctttagtatctgctgtgtgggatgggaagattttggagactttgtcttctaaatcaattttagaaaagaattttccgtatactatattctgttgctatgtaggtagtgggaagaaagaatacttaaaagtggaagaaagaacagagcagtcttttcatactcctttaagacttgaaattttactttgtattttcttcaaaagagaaattagttgtgttcagttttgtcttaagaataattactttattgtttttaataaaaatagcttatgctcattatttgtaaaattcaagcagtacagaaaactaccaagaagagagaggcatctaacctaaaattatactacctagaaattactataggtctctatgcacatatgcagagagaataatgaatggatgtttggatggacagatggataatcattttgtatctccgatccctggagtagtatctgcctcatattaagtactcaataaaaatatagtgaatgaataaattgaattgtactatctatttttttctagtgccatactgcccagattggaattccagttctaccacttattggctgtttgaccttgaaaaacatacttaacatctgtgcatctcaatgttctcatctgtaaaatggggataatcgtaatacacaccttcatcaaggacattcttaagtgaaattgttggtttattttttactctatatgtgcagtgattagatatacagtggctaccaagaaaatgtgttgccacagccttgattcttgttaaaytgccagcagttttacccaccattgctttagtaccttcagtaaaaatgttaccatggtgaaaatgataaataaaaccttagtatagtcattaaaatagcttgggccatacagaccccctgaaactgtttgtaagatgggttttgaccacagatcccctgaaactgcttgcagccctcattttgagaatcattactttaaaccatctcttaccaaaatggaattcattcatagccagaattctcagattttttcaaatcgtcttctttctgggcaactgcttacagaagtggatgaatcttttgtttctgtttggtggccagcactcttagaagcttttgcatgagactggacactttccttgtttggttgctcctggtgaatctgtgactgttgtctttcttcatcttactggatgagagagattctgtgattggactaccttccaccaccttcatccataaatgtttttgggttttttaattaattaaaatcatcatatttttcttcattattttagttaggttttctcttccattgattaggaatttgtatctattaaggtttagtccaaggagcaaaaacactatgggtgttatgggataagatacttcgtttagaattgtggagaaagctggagaagaagaggacttgaagagaagtttgaggatcagagacagagttaccactcagtcagcttgagaaaccaagtatgtctagccagcaaagtaggaccacaaaggggaaatttgtggagaggtctatgaaaagctgttgcctctgaataaccacgacctctgtgggcccatagccaagcatctggggtggattggaggctctgttggtcaacaataccagtagtcaagaaaagctagatgtggagcagaagtgagtgatgacaagctggcccctctctggtaccctttcttctgtctgtctctgattctgcctatgagaagatttttcaaatggttatggccattgctttttccaccttccaaatagcatgtaacttcctttcttggccaacttcaatctgcagggatacaagtaagagacatatggaaaatgtaattaattcccagcttagcttcactgacaagaatacaaactaccagagtataatgccatatgttatgtttttaaggcataaatattaaacttatcaaattattttctagataagaagtatcacagaattttctaaagaatgtcccttattttgcacaaaaaaaaactgagaagaaaattccattgatttaaataatgcatactacccgtataggctctatggagttaaacgatttttttcacaagggttaaaattattaaagttatagtgatatagaagtcatccttaattttctatgacctaaggcacttcttggtgcatgttctttagatatatttcaatagcaaaatgaagcagtaatgtattatttctatcaccagaaaagagttaactatacattatatatacaaacacccaygcacaaatacataagacatgcacatccctgtatatgaccatatctacaggatcttacatggtctcttacctgtattcgagcttaataagtgtttcctattgaaagagggtataaattagaagtgtataagcatcattaaatcatccttacaggtttctttctagttcataaaggtctatraaactcataaacatgggtttataatctgctttcttttcattcttgttgtatcttcccacctcagacattttcattgtaggctgcgtagtggctttgatttcatatattttggaaggataaaaatattccttcaacaacaatgctttattgataaataaagtttcttttcaagtatcttggatctgtaatttctttggggaagtttttaaaggtttggtgattttaattttttttagaagagcttttatacttagatatttttcaaggaaaaaaagtgatttcattgaggctactttgccaaaatagccatagaatgytggaataggaagacataagagatactttggggtttatttagcccaacttctttcttttatttttatttttatttcttcttatactttaagttttagggtacatgtgcacaatgcgcaggttagttacatatgtatacatgtgacatgttggtgtgctgcacccattaactcgtcatttaacattaggtatatatcctaatgctatccctccccacaccccccaccccacaacaggccccagtgtgtgatgttccccttcctgtgtccatgtgttctcattgttccattcccacctatgagtgagaacatgcagtgtttggttttttgtccttgcgatagtttgctgagaatgatggtttccagcttcatacatgtccctacaaaggacatgaactcatcattttttatggctgcatagtattccatggtgtatatgtgccacattttcttaatccagtctatcactgttgaacatttgggttggatccaagtctttgctattgtgaaaagtgccgcaataaacatacgtgtgcatgtgtctttatagcagcatgatttataatcctttgggtgtatacccagtaatgggatggctgggtcaaatggtatttctagttctagatgcctgagccatygccacactgacttccacaatggtcgaactagtttacagtcccaccaacagtgtaaaagtgttcctatttctccacatcctctctagcacctgttgtttcctgactttttaatgatcgccattctaactggtgtgagatggtatctcattgtggttttgattttcatttctctgatggccagtgatggtgagcattttttcatgtgtcctttggctgtgtctttttgatggggttggttgtttttttcttgtaaatttgtttgagttcattgtagattctggatattagccctttgtcagatgagtaggttgcgaaaattttctcccattttgtaggttgcctgttcactctgatggtagtttcttttgctgtgcagaagctctttagtttaattagatcccatttgtcaattttggcttttgttgccattggttttggtgttttagacatgaagtccttgcccatgcctatgtcctgaatggtattgcctaggttttcttctagggtttttatggtttyaggtctaacatttaagtctttaatccatcttgaattaatttttgtataaggtgtaaggaagggatccagtttcagctttctacatagggctagccagttttcccagcactatttattaaatagggaatcctttccccatttcttgtttttgtcagatttgtcaaagatcagatggctgtaaatatgtggcattatttctgagggctctgttctgttccattggtctatatctctgttttgataccagtaccatgctgttttggttactgtaggcttgtagtatagtttgaagtcaggtagtgtgatgcctccagctttgttcttttgtcttaggattgacttggcgatgcgggcccttttttggttccatatgaactttaaagtagttttttccaattctgtgaagaaagtcattggtagcttgatggggatggcattgaatctataaattaccttgggcagtatggccattttcacaatrttgattcttcctacccatgagcatggaatgttcttccatttgtttgtatcctcttttatttcattgagcagtggtttgtagttctccttgaaaaggtccttcacatcccttgtaagttggattcctaggtatcttattctctttgaagcaattgtgaatgggagttcactcatgatttggctctctgtttgtctgttattggtgtacaagaatgcttgtgatttttgcacattgattttgtatcctgagactttgctgaagttgcttatcagcttaagaagattttgggctgagacgatggggatttctagatatacaatcatgtcatctgcaaacagggacaatttgacttcctcttttcctgattgaataccctttatttccttctcctgcctgattgccctggccagaacttccacattcaaattcagtgactcacagttgaactgtgagtcaattaaacctcttatcttcataaattatccagtctcaggtatgtcttcatagcagcgtgaaaatggactaacatagcccataagtcatccacttcaagtgagcaagtgaatgatttctagtaagtttaccaagttgtacaaacatcaccataaatcagttttagaacatttcatcacaccaggaaggtcccaagtgctcatttactcttattccctgtcactagcctcctctaccctaggacactgcctactctatttgcctctttaaatttgctttttagtttgatgctctttgtatcccaatatgatgtttgacgaaagtattcttgtcttccatacttacatgaatatcatcaatgtaaactttaacaccttttctggagtatagcaaccttacaaaaacattgtatttatcctttgaaactgtcttacgaatgaaaatatatcatttctgacctaattctggtgaattaggtatgagaaatttttttcttgcaaacattttttgtaggatattcctaacatccaattgaatgagtgcttatcattaggatataaaaaattatttcatttcttaggattcatttattcctgatgaaattttattttcttgttaaattasaatcagtgtatgctttctttcaagctagtttatcctcttttattttgttagaaaaacagaaataaaggataaaatatggaaataaatttggatacatatcatatctgatttgaaatgccattctaagagataaaactagaggtttcgtttctattagaacagagaatgaaaaaccctgtctaataatcccaagagaaacaacacacttaaatccaaaattccctaaggatttattgcagtctgtgatgattgtacacacggattcacacagggctaaaaagtatgaattgaaaatatgagaatacaaatttccataataagaaatgaagtggccgggcgtggtggctcacacctataatcccagcactttgggaggccaaggtgggtggatcacgaggtcaggagtttgagaacagcctgatcagcatggtgaaaccccatctctattaaaaataccaaaattagctgggcctggtggcacggacctgtaatcccagctacacaggaggctgaggcaggacaaccgcttgaacccaggaggcagaggttgcagtgagccaacatcgcgccactgcactccagcctgggtgacagagtaagactccaactctwaataaataaataaatatagtaacttaagtatcaagatatattcatttcagaagcttacgttttggccataaaatcaatgtaaaatgaggtttcatgcagaaacttgatcatttttcatcagaatgattcatcattttcaatatcagtgtgatttgagtaaagcattaggcccagcttccttccatgctgtcactgcccacaggtarttgtggccactgtgcgtggagggaggtggtggccagtaatgcctgggaaactccttggggcgacattatggagctgaaaacacccttggaggagtccgagagccagaagaaggacaggcaaaaggtatttattgaacctaatttgtactatactctttgctgagcaccgaggggcttaaactaagaaatggtccctgccctcaaggagcctgtagaggagttgtagagtctttcctcctcccacccgcctgccctccaaaaaaaaaaggaaaaggaaaaaaaaatcctgaaacactcagaggatcacagggtgctggaaaatgcacaggtaaaatttttactggaaacatttgacctgcaaaaaagaaatcagctgaagaggctaaggtggcagtatttgaaggctgacattcaacaaaagaatgagacttattttgtatagccttagaaagcagaatctaccccctgaccttatcactaagagctctatcgatattgcaatttcagataagggattatagacctgtacttcccttatagggttgttatgaagatttaaacaagataagctgaaaacacattacacagtgctggagtgacagaaggaagtcaaggcaccattatgacccagatgagaaatcaaaaacaagagaaaatgttgttatagatgacctggatgcttccaaggccaaaaaaaactaaaatgaaagagaagctaaatggagacactgaagaaggatttgtagactttcagataaattctctaaatctcataggaagaaaagatctaccaaatggaaatattgatgaatatgaaaaaaaaaatcaaagcaagtatcatccttagatagttctactcataaatcaagtgataataaactagaggagaccttaacatgtgaacagaaagaaagagctttctcctatttccgtatttctgaagagactgtaaagcttctgaaacatcaaagggtaacatatctctttcctattcaagttaggaccttgtcctgtatttgaaagaaaagatttaatagctcgagcatggacaggaacaggaaagacattcttttttgccatccccttgattgaaagactccaaagaaatcaagaaacaatttttaaaaagctgctcaacaaaggtacttgttttggctccagcaagggaactggcaaaccaagtagccaaagacttcaaagataaaactaggaaactcagcatggtgtgtttttatggtgcaataccatatcaaagccaaattaatcatatgcaaaatggtattgacatcttggttggaacccctggtcatatcaaagatcatctgcagagtggctgattggatctttctaaactgtgccatgttgtgcttgatgaagtggatcaaacgttagatttagattttaatgaacaagttgaagatgtgattcacaaatcctacaaaactgaatctgaagaccatcctcagactttacttttttctgcaacttgcccacagtgggtatacaaagttgcaaataaatacatgaaatccagatatgaacaggttgaccttattggataaatgactcaaaaggctgcaactactgtggaacacttggccattcagtgtcattggtctcagaggccagcagttattggagatgtccttcaagtctacagtgggtctgaagggagggctattattttctgtgagaccaggaagaatgtaactgaaatggccatgaatccacacataaaacagaatgcccagtgtttacatggggatattgcacagtcacaaagagaaattacactaaaaggcttcagagaagatagttttaaagttttggtggcaaccaatgtggctgcccatagtttgcacattcctgaagtagacctggtgattcaacattctcctcctcaggatgttgaggcccgtatccatcgctctggatgcacaggtagagctggacagggatttgtatatgtttttatcaaccaagagaaagaggtcaactaagatatgtggaacaaaaagcaagaattacttttaaatgtgtaggtgttccttctacaatggatttagttaaatctaaaagcatggataccatcaggtttctgacttccgtttcttatgctgctgttgattttttctgaccatcagctcagagactgatagaagagaaaggggcagtggatgcattggctgcaactttagcccacatttctggtgcatcaagttttgaaccacagtctttgatcgcctctgatgaccatgactctggaaagcctagaggaaatacaggatgtcacctgtgcctggaaagaacttaayagaaagctaagtagtaatacagcgtctcagattaccagtgtgtgcctcctgaaaggaaatatgggtgtttgctttgatgttcctacaactgaatcagaaaggttacaggcagtgtggcacgattccaactggatactctcagtgccagccaaattacctgaaattgaagaatattatgatggaaacaagtcttctaatccccaacggaggaatggctggtcaagtggctggtcaggcgggtcaggccagtcaggtggtccatctggtggcctatcaggtagacagagtcgacaagggagtcactcaggaagtcgacaagatggtagaagatgaagtgggaatagaactcgatcaagaagtgggggccacaaatggagttttgactgaatatttgatacttaatctaccagtgtgaacttgcctatttgtgcctaattatgtatattatccaccaaaaattagctcatgatagttgaggtatgtgtctgctatttgcacagaagttggtcgtattttttttaaaaagtgtttcacaagaatagctataaacaaatctacctattcagttatacctttgaattaaaaaacctccttttattatctttttagaaaaaatgagaatattagataattaaagacatttgaaaagataacattttgttcttcattttatacagctataaaattggattttgaggggtttctattattycttccactgaaattatctcctctacttctcttaattgtgaaccctataaaataacaaaatttatttgtccattaaattatttatccctgtaattttaggactgtaaggagccaaacagattgtctgtcttttgctattcaaagtatggttcctacaccagcagcttcagcrtcatctgaaaacttttagtaagtgcagaatctcaggttcaacaatagactccctgaatcaaaatttgcatttgcacaaaacaagtttttaatttaatgaagtccagtttatcaaawatccttttatggatcatgatttttgtgtcaagtctaataaccccttcctagccttagatctcaaagattttctcctatatctttcaaataaaatttttagttttacattttacatttaagtttacaattcattttgagttaatttttgaataaactatgaaacagatgtagctggttatttttttttttttttttttttttttttttgcatgtggatgtctaattgccctagcactgttaattgaaaaggctaactttcctccattgaattgtttttgtacctttgtaaaaagtcagttgggtatatttgagtgagtctacatttggattttctattctgttccatttttctgtgtctctatccctctagcaacaactcaattttgattattatagctatattgaaattagatatcctgattcctcccattatacagtcaactctctgtatctgtgggttcctatatgtgaattcagccaactttggatcaaaaatattcagatacaaaattatgcctgtactaaacacatacagacatttttcttgtcagtattccctaaacaatatagtaaacagctattgacatagcatttacatgatattaggtattataagtaatctagagatgattttaaagtatatgcgaggaggtgcacagattatatacacatactatgccattttatataagggacttaagcatctgaagattttgctatccacaggaggtcctggaaccaatcccccacagataccaaagatcaactgtatttattttttcaaaataattttagctattctggttcatgtaccttttcattttaattttagaatgatcttgtctataactgtgaaaatatcttgctgggatttttgtaggaattatattaaatgtatagatcaatttctacagaattgatatctttactgtcaagtcttccagtctatgaacacaatatgtctcttcatttattcagattgtcaactttttaaagtgtcatgtagtttccagtatattagtcctatacatgtttcataagatttacatctaaatctttaacctttttagcaattgtaaatggtactgcattttttattttgatgtccaagagttcattgctagtcatagaagtacaaatgattttgtrcatgtatcttatatcctgtgaccttgcttagctcaatcattagcttgaggattttttgtcgattccttgggattttctacataaatcaatcatgtcatctgcaagttgcaaaagtttcatttcttcctttctggtctgtacaatttttgtttccttttcttttcttttttatttttgagacagggtttcactctgtcactgaggctgggtgcagtggcatgattatggctcactgtagcctcaaatccccaggctcaagtgatcctctcacctcagcctcctcagtagctgggattacaggcacacaccaccatgcctagctaaatttttttattttttgtacagatagaggtggaggctacagtgagctgtgagcatagcactgcactcagccttggtgacagtgcaaaaccctatctcaaataagtaaagaaataaatattgatgcagccttgaatttctgaaagaaaccctgcttgatcattgtacataattctttttatagattgctgaattctatttgctaatatttgttaaggatgcttgcatctatattcatgagtgatactaatctatagttttatttttttgtagtgtctgtagagtttgattattagggtaaaactaggtttataaaatgaatcaagaagtattcctttgtcttgtattttctgtaagagattgtgcagaatttatattaatccttacttaactatttgctagagttctccagagaaaacataaggctgaagagatttctttttgaaggttttaaactacaagtttaattatcttaatagttacagggctattcaaattacctatttcgcatttggcacattgtagtagtttgttttacaagggatcaatctatttcatgtaagttgtcaaatttgaatgtgtaaaggtgtttgtagtactcccttatggtactttcgatggctgcagactctgcagtgatatcctgtttcattcctaatactggtaatctgtgtcttctctttgtcactgctgctagaggcttttcaattttattgatctgttaaaaaaataactttttgtttcattaatttcctctttgtttttctgttttcaatgtcattgatatcagcttttatctattttcctcctttatatttgctttcagtttattttgctcttctttttccagattatcaaggtgggaggctagactattggtttaagactattactcttttctaatgtatgcatttagtgctttaaatttctctctcagatcttccctagcaccaatttcaatatgttgtattttcattttcattcacttttttttttatttccctcaagactacctttttaactcttagatgatttagaagtgtttagtttccaagggcttggagattctcttgctatctttctgctatttatttctaccttatttctgttgtggtcagagaacatactgtttaattgtgtttcctttaaattccctagggtttgtcttatggcttagatagggtctatctcagtatatggttcatgggcacttgaaaataatgtgtattctgttgttgttggatggagtgtcctataaataaaaattttctatctataacattttctacaaatgttgattagatcttattgattaatgrtgctcttctacactcttgttgattttctttctagttatcctatggattgttgcgagagaggggttgaagtctccaacagtatttgtaaatttgactatttctcctttcagttctatcagtttggctttatatatttaacagttctgttgcttgctctatacatatttaggattgctatgtcttctaagtggatggatcactttattattatatagtaattttccctgtctctgataactttcttttgtctgaaatctattttatgtgatatcactatagccactcttgttttccctttgattgatgtttgcatgatatatcttctttttttactttcgacctgcttatattattatatttgaaatgagtttcttatagacaatatataactgagttgtgtttttaatccattctgccaatgtctggcttttaattggtttatttagactacaagaataaactactgcagaggaatctgctgtctaattcagagataaagattgtagaaatcaagttttattatctacctcttcctagtctcaactactggcactagacactaggattagaaagcttaaaaacatcttggattcctctctcttactcagcttccaataataactaacatttatggagcacttactatgtatgaggcactcccctaatcatttcacacgcattaactcatttaatctttatattttgcaagtgagacaactgaggcttacagaagtaaggattatagagatagtgactcaggtgtatgcgactccacagcagtacttcaccactaccctccacagcctcaatagttttgcctttgcaatacttcaatagtccatcccacgtttgccatttttgctacctactgaagttcagatcttgttttttctttccacgtatgattttaaaaaccttctattggtgctsccttccaccacactctcctttctccaattcatcttagatcctcagtggcatcatggaaaggatttggaatgtgagctgaatttagatcacagttaaaactttaccttcctatattacctgggcaagttagttaatstcttcacatataaatttgtttgtctgtaaaatgtaaataattttaccacccgtgtgattatattatatatttcgcatgtagtagatttcacatgtaatatggtttggyggtgtccccacctaaatctcatcttgaattgtagttcccataatccccacacatcatgggaggaacccggtgtgaggtaattgaatcatgggggcagttacccccatgctgctgttctcatcatagtgagtggattctcatgagatctgatgattttataaggggcttttcccccttttgctcagcacttcttgctgccactatgtgacgagggatgtgcttgtgtcctcttccgtcatgaytctaagtttcctgaggcctccccagccatgctgaactgtgagtcaattaaatctctttcttttataaattacctagcctcgtgtgtgtctttattagcagcatgggaaccagctaatacaacatgtaaaatgccaagtgcaatgccagcatatagtacacacttcatatatattcattaccttcccttattacctccctatgactcaattatatcatctatgagttcaggataattactatctctattttataaggttgttgtgaatattaaataagaaagtgcatagacagtgcttaggaagaaggttgatacaaggctcttattcagcaggatcagtaaatattttgggggatggatatcaakcctaaaaatctgttactcagttgttagagttttcatcattaaaaacaacaagctggccagatgctgtggctcatgcctttaatcctagcactgtgggaggccaaggcgagcagattacctgaggtcaggagctcaagaccagcctggccaacatgacaaaaccctttatctactaaaaatacaaaaatttagccaggcatggtggggcacacctgtaacactagctactcgggaggctgaggcatgagaatcacttgaaagaggcagagattgcagtgagccaarattgtgccactcactccagcctgggtgacagagtgacattccatctcaaaaaaaaaaaagaaaaagaaaagaaaagaaaaaccttaatttgtagyttgaaggcctttgaggattaaatgtgaaatgtgttaaaattcttagcacttttcatgcctcttacagacccttgatgaaggccctcattttcttgcccttgttctctctttccttgaggaattcttgtgttttctctaatttgtgttcatcaaacatttaaatgaaaatgacagaatgacacaaggtatattctgcgagttgaatatgtgaaaacagtaacgacatagttttgcatattgaataaaaaataaattccaaaaagtaaattattaaaaatctacttttgtttttctcacaaagttcttgttcttagtgctattttttccctctcaatgtccttatctctactaaccatcttaaatggtcgtgttccacttaaattcctcaatgtctgtactttaagaggcctaaagtcacctaaattacctaacgatcatctatatgagtttaattgggattaaaattgtcagtcatttgggttactcatgagttagtgacagaattctaccttctagggcagaaaaccaacaactgactcttagctagagcagatttcttttaaaataamaacatgatacaaataatagaaagagcacttaactgagagttaagaaacctgagtcctgatgccagtcctgatactacctatgtgaccctgggcaagtgtttgacctctctggctatgagttcttttttcataaaataagaaattaaaatgccatggtttctgataagtgccatgatcctagrtgctatataatgtctttctaaaattgaatgattcagattatcaacagactacttcaccttcttaggagaaaattttgctgcaactctttttatattataatttcaccctggattcacctggaggctcgtagtgaagaaatcaaaacattcaatgtgccgaaggtcagtaactctgaatcaattatcacaggagattatgtgtgctagtgtgtttacatggcatgctgtcttctcctggagcatttgtgtggcttaaagactgctctttattaccaaataaaaagctccttgccacctacactcaagaatatagcaataatggattatcattattcctgacagcatatgctaattcatagacttttaaatgaaaagaaagcagagattacaaaaggaatcgttttatgctctctgaatgtatcattctttgtcattcaataactttcacataaaattcagtgccataatattttattttcataaaaacaatctattctaatatgaccttctgatgtacttgtaactatcatcatttattatataaggctgtttaagtataaattttaaacagcaatgttttaaaagatgatcctattttttgtgcgaaaagttaaaatatgaaatctgaaaaggacataaggtcagtgttgccaatttatgcacacttttgtttgtccattcaacaaatatttttgagggcctgtcatatgccagacactgttataggtagcagagaagaaaaagatcaacaagagaatgttcacttcttttgaagagattacatcacatgtggatttgacagaaagggccacatagccccagtgtccagaaaaagatggtctgttgcaggacttttaaaaataagtttttttcgaaatgtatttttgtactgtttgcatacaaaattgaattagtttcccaaggctgctgtaacaaactatcacaaattaagatggttgaaaacaacaaaaatttgttgtctcgcatttctagaaaccagaagtctgaaatatggtgttgggaagaccatgctccctctataagctcttggggaggatcctttcttgcctctccctagcttctggtggctcccagcaatccttggtgttccttgactggtgacagcataactccaattgttatctgcatcttcacatgactgtcttaccccaggtacatctgcgtccaaatttccctcttcttagaaggataagagtcattggataaggcccatcttcattcggtatgacctcatacaacttgcttacacctgcaaaaaccctatttccaaataaggtcatattcacagtttacagggggacacgaatttggagggggatgctattcaactcattacaaacatgaacataaattaaaccaatattaacagtttttgtatcatattctacttctttcaattaatgttcattttctgttaagatactattgccttttacttttgaagtctctttttgaagttgtccttaaactttttgaatgattttcaaatctgttggctacactgtggtttgtgactcaagttgtatagtattttcttgtttgttgttattgtttcctgagatgagactctttatttgaacttcacattgacagcttgttggactcaaatgtttataacagttttctagtaaaattcgtgaggataatctgacttattacagacagtggactctttgagagtgctataaatatttgtcttactagaaccataggattatttaatcacttttcctttcagataattttaaaatatttctttccagtcatgagtgccattctctacattttttctttttctttctttttttttgggggggcggtggggacaaggtctcactgtcacccgggttggaatgcagtggcgtgatcatggctcactgcagcctctatctcccgggctcaagtgatgctcccacctcagcctccgyagtagctggcactacagaaacacacactaccatgcccacctaatttaaagaatttttttagagacagggtccctctatgttgctcaggcttgtctcaaatttctgggctcacgtgattctacttcttcagtctcccaaagtgctgactgacaaagggattacagggatgaacagtcgcacccagcctctccacccttttcaaatgtgaatgggaaattagctataccccagttgagactctcattctagtcaaccaaaccattagggcaaatttttgaaatagtgccctctacccaacttgtctyctgtctcttaacctaaaaatagaacaaaccccaacacatactccagatgatgaacgctgaggctaactaccagcatccagcatcagcaacacacactcagtaccctacccctacctcctggatgcctttctagtaatattttgtaatctctgcctccctcactacctaataaacttccttgatcaaaagagtaatcatgataataagaaaataatttagaaatatagaaataccgaaagtgaaatgccaagccactattcactcccagaggaagaaattcttggtgtgtagcctctcaaacytttttctatgactgtcatatacaggtatgcttgtatgtctgtgaatctattttcattcctatacatgcttaattttctgggctgatttctcatgactatttttaacaagaaaactagatcatactgtacacattgttttgcaatttgcttgcttttatatcttacaatatatggaaattattttacccaggcagaacttacagccttacctcatctattcaagatagcttttcagaacataactgtatcacaatttattaaactattttctaaatgtagatctttagattgtttctaatttggggcttacaaaagtgctgaaataaacaaacattatgatgttctggtatttggaggaaccgactcacagacataggatcaatggtaagtatacgtagtttttattttatagtcaaatacacartcaaaatatactctaaagatggcatcaatctttttatttctgctggggtttttttctgtttatgttttatggagggcattctgaaaagctaaaatgaccattgtttttacttacttttaaaattatttgtaaggccaggcatggtggccatggctgtaatcctagcactttgggaggctgaggagggtgaatcacctgaggtcaggagttcaagaccagcctggccaacatggcaaaaccctgtctctactaaaaacacaaaaatgagccagtcctggtggggtacgcctttaatcccagctacttgagaggctgaggcacaagaatcacttgaacttgggaggtggaggtttcagtgatctgagatcgcatgtaccactgcactccagcctgggtaacagagcaagactctctcaataaaaaataaaataaaataattggtcaaattgcacatatttttatgtgtttactctccatttttctttaattgttttgcccacttcccttttccatttttctgctagattgtttatcttactggttgagaagaattctccatagcatcactattaaactttgttytatatagactacaaatatatccttctgagctgcctttagtctttcacttttgtttatagtatatatttctatacagacatttcaaagttttttgcaatcaaatctgtccatcttttactttgtggtttccagttttcattccagatttggaaaggtcttattcactcagcactttaaaagaattattaagaattttttaaaatttttgcatgtaacatgagataggtatctaacttaattttgtaatggataactaataatatgtaagaagtttatttgattaactcattctgttttttgtttgtttgtttttaaagtataattaccctgcttattttgaaatgccatcttcagggtatactatatctactttcttggctggctgtcttccttcatggatttaccaaatcttgcaatgaacaccctgtattaattgctgtagctacatattatacttgggaatccaccttrttgtttgtttccaagttttcttggttatctgcaagcatttacccctgcaactatatcttaagagaaactttcaaaataaaatttcagtggaacttttattaatattgtattaaatcaataaattaaaagaaaactgccatagttgcgaaatagttttctcatgcagaaacattattctttctctcttactttttcaagacttcttttattattgctgttttttcttcataaggtctcacatacttctatagtattgttgctattttggatggtaccttttaaaaattatttttgattggcaatagctattgatttcttaacatttttacctaaaattcagccaccttactaaactctctaatttttttagattacttctttagaattttctaggaagataatattttcatctgtaaattacaataatgtctcttcctactcattttatatatatatatatatatatatatatatatatatatatatatatatatgtcttatttttttcttgattttttgcacagctaggacctccagaacaatgttagacaataatatggatattatctataaaaactgagccctgctctgggaaggattctcaagtcttcttttttctcaccccatctaagttaggcaccccagcctgggtctattgtttcagtctttgataacaaaaatgttttctcaggatggaaarttttcaatataaccctttaacttgtggtttatcactcagaaagcaaggttttaaaattgtaaatcttggccgggcacgatggctcacgcctgtaatcccagccctttgggaggccgaggcagggagttcatgaggtcaggagttcgagaccagcctggccaacatagtgaaaccctgtctctactaaaaatacagaaactagccaggtgtggtggcacgcacctgtagtctcagctactcaggaggctgaggcaggagaatcacttgaacccaggaggtggaggttgcagtgagccgagacggcgccattgcgctccagcctgggtaacagagcaagactctgtctcaaaaacaaacaaacaaaactaaatcttttcttgatttttaagatcaatttcacatgtcccccctccacaatatgacatctccctacccgagatagtcattccttggaccttatagaacttggtaactatctctcaattactacatttagaactaaaatttttattttgtttatttacatccaatcatctgtggggtcttaagagatagcatctccatacatccaatgcaagctcagaatcatgtacatccttacttagcaaatgtttaataagtggatgtataataataggaatgaaacctacttctcttttgccaaaagttgccaccactcaaatattaatagtagtctgatgctgtgatgaacctgtgtggtccctctgtctcacttatttcagccagcattacacatgtagagtcaatgaagttctttgccttggcagacggctggactgaacattatagtgtaaattttcaaaatttccaaaactttatcgtgcaaggctctacagttaggttcctaggtctccttatgagtaaagagaattcaagaccactccacagagaataaccaggaaagaatgatcatatgtctcacacagcccagactgtatttttttctagtctctcaattcaagaagtagagcgtgggccgggcacggtggctcatgcctgtaatcccagcacattgggaggccgaggcgggaggatcacaaggtcaggagatcgagaccatcctggctaacacagtgaaaccccgtctctaataaaaaaatacaaaaaaattagscgggggtggtggtgggtgcctgtagtcccagctactcgggaggctgaggcaggagaatggcacgaactcaggaggcagagcttgcagtgaaccgagatcgagccactgcattccagcctgggcgacagagggagacttcgtctcaaaaaaaaaaaaaaaaaaaaaaaaaagaagtagagcatgaaggcacccccaatgaaactcattctttttcaaacttctttaaacagaaaataatctaaactgttctccaatagtgagaacctgtcttcgtctagccactgttgggtccagattgaaaatgcccatagcaagtagggtgatcaatctcccactgccccgactcctgcccatttgtctaactaagactgagggatttcctgggatgcagaaatttcagtgctaaatatgggacagtcccaggaaaattgagaaagctggtcatcctaaattggaaaaataccattatctcccatgccaattccccaggtggacagacacatttaggccagtccagttagtaactgtaggttttacaagtggtaagcacttatataaaaagtgtctgtttatctccaccattacccctttttttctggactacaacatttctttagttagagcaatggatcccaaactttactatgcaacagaatcaccggaaaggcttgttaaaatacagattgcttgaccctgtacctgggttgagacctaattgagtaggtctgggataatgctaaaaacctgtatttctgacaagttaccagaagctgctgacgatgctgggttggaaactcagttttgagaattactgctctagaagtttggtacattatcatcttctgggactaacacataatcaaaaatcaaaacatgtcagttgaaagtatgaagacatgaatcagcaataaaaagtacagactattttaagaatcaatcttattttcttcatttctgaagcacctctcagtggtaagtacagttttaaaaaaatcttaatacataaagcataatagaaaatgtttacccttttaggcaagtttttgaaagaggtggaatagtattctttattattgggtttactttaatgactgatttctctgtggaaaagtacgctctttgtagcatagttctggtgacattcggttcctgttatgtatgctcaactctaacagttgaagtatcttttgtccttaagccaccgtttcacaattatcatttactttggcatactaaacagaaaaaaaaagttcatgttgataacacagtctacatttcttccaacttttgcaaacgttttaatgtaactgagtatgtaacaaaaatataaaagtaatttcagattgtaaatatgcattcaattttatgttcaaattctgcctttgaaaacatctattgcttcccatcagtacacacctttgcctttaactggggaaatatgcccctcatcttcaaataaaggttcctaactaccctcattaaatgtctgatttggcctaggagaaactgaggtatggtgctttggtggcagtatttaaatcccgtatctgtaaaatgtttctagggaaatggatctgaaatagaaaacctttatcattctgatgaacaaaatgaatttctaaatgtctcaacctcagaacctagctttcaacaataacamttttgtttttgtccccagcgttccggttatgcccttgccattcccttgtgtgcattccaggggactgtgtctctccatgcacctacagggaaaaccctatctctttctacctatgaggtaagcgcagaagggcaaaaaataactccagcctctaagaaaatagaagtctatcgatccaaaagtgttggccatgaaccaaactcagaagattcttcatccacgtttgtggacaccagtgtgaaaatacacttggaggttcttgaaatttgtgataatgaagaggccttggacactgtgtcaatcattagtaacatcagtcagtcctccacacaagtcagatctccatccctacgttactccaggaaagaaaacagatttgtttcatgtgacctaggggaaacagcctcatactccctctttttgcccaccagtaatcctgatggtgatattaatatctccattccagacacagtagaagcacacaggcagaacagtaaaaggcagcatcaagagagggatggctaccaggaggaaatccagttgttaaataaagcttacagaaaaagagaggaagaaagcaagggtagttagtgggtatttggtctaacaggagcaagaatggatctgcaacgtcaactgtgaaactaacacctttgttatgagactgatttccttttatttgttggcttacattagttttactgatttaatagttaatttttttgtgggaacaactggaactagtgtaaacacttaagtgcatttgatgtgttacctaaagatcacacactgtggtaatgaaaagattttacttcttatctgacttctaaaaaatattttctaaatcaaatcttggcctagtttaccaatgtttttgcttgtcaacttcctagtaaacagaaaattgtataaactcagtgaatatactgttccatgcatatgtttctatatacaatgttggcctttactgcaaaggggaaaaaagaggaattctgggaatggaagaaatgtaacaaaaccccaaattatatttgaaggaacttgcctaaatgtggctagcaaaacaagcttattacacttactgctttagctttacattcttctgtaaaatgaaaaattagcttccaactgagaaacacgcaggttcctagtctataaatagttgtttccttcatttctaccaaatataaattgtttactgttttttctttttttcttacctataacagttttcctttcatcttttcagtatgtcaagactgtcccataaaacaaatatgttgtgtgttagaggtggaattagaagtatctttaactcaaacattattggaaaaaagttgtaattgtgtaattgtatactttatcctaaaattgtttttttttttaacttgagtggaaattgggagaaaatactggcagattcagttatgagaggtacatccaaacatggtaggcttctggatacagcagagcaaaatcctctaagtctaaaacaaaagtatctgtttttaaagctgaggattgggcaacctttcttagtcattcttgaaatagaaaagtttacttcaaatattatatcaagtttagctgcttttttgtttcttctctaaagacgtgttgtctcaaagaaacagttgaacctattttattaagtgattgtaaggtatacatttcaagataattctagaatgcattacattgcaaaaatgcaggaatcaccttggcagaataatagtaagatgtatttcaaaaattataaagtgattttccttcaaattgctttattctaaccttcctgtaaacatatatgaaatgtattacctaaaagtttattttccaaagttactgagttgacactttacatagtcttagactttgtgcccctcacatcactcacatactttatttatttatttacagattgaatgaattgtgttttagaatgatttattttggtttctgttttattaggttgaattagaattcaaaattacttgacatcggctttcagaatgtttcatcttttgttgccacaagcatgagtcattttcaaaataattatctcaatggactttctcaatctttaacttctcaatatctagttatctaaatttgggaaacatatgtattaccactaataatgtttgtaaagcaagcctcaaataatgtgtaacatataaattcaaagtcaaatgtattctcgttacaaatatattttattttaaaagactgtatcaccaatattaacagctattttaacacagtgacaaatggacagataaatcagatattataaatcagtagcattaaatgtctttataaaagaaaaattgaattgaatattctcataatgctttgtagaagataggctttgatatcttaaacttagatgtataattttctgaaagagaaaggtgatattgctgctttaaaatgcaatttcaggcaaaaaggaaattagacacaggatcataataaagctgaagaaaatagcaaagatttgaaggcaaacaaattctttataactgcacagcaatttgaatgggatggagattataacagaaatcaaggtttaaagagcattaagaaatagatagaagacaataatacccattttccgtctcattttattttaactggacaagggcttaaactgggggaattggaaaaataattaggatattcccatttaattgcccttggttgttgaattaactgtataatggatgcacataaaaattctgctgcattgaaacaacaccagtattatttagcccaaagtcttagtttgaaaggctaatcagcaccatattactaacctgtaacacttcaaactccaagccaacaatagctgaatatacaagaaaaatctactagagctgtgcctaagcatgaatgacgctccaaatccttgttaagggaggagaaggttaaactacataagtttacttaagtctgcttactctttagagtgattgattataaaagtgtgtttctagtagaggaaatacctttctagatatcttgtgatatagccaaataccttacccttgtatagttatattgttcttcttattaataaatactatattttgtatagttttctcttttctctataaattgatgtatctgaaggcaaaaacttattacctaataaaaatatcaccatctggtggtgactcctataaactgcaaacacgtaatccccgagactcccaaatagtataaacacctaatatataatccctaagacttctgagagttgtgactgacagaggcaactctttgaagatagcaaatggcacaatattacttaaaaatataataaaagagtcttagttatgcattttttggaagcttttcttgatgtggttctataatattggattttacaaatcgattttctcttaatttcttatacttttcagctaccttcattcatttcttcattctaatatttaataaatgactactacatactaaaaattgttctagatacttggttttataacttttgaacaaaactcaaacaaaacaaatatatgtttttacatttactgtgagtttgagacaaccacaaagtcagagaacacagtccacaaaagattgctctcactcctgacacaaatcgcaaattcaaggaattcccaaaaccactgctagtttcaataattcactagaaggactcacagaattcatagaaaactgtgtactcatggttatggtttattacagcaaaaggatacagaataaaatcagcctagagaagaggtcatagagccaagtccaggaaaagttgtaaatgtggaacttctatggtactctccccatggagtcatggacggcattactttctttggcgacgatgtgtgacaccttgcacagactactgccaagcagaaaatctcaactgaaccttggtgtccagagtccttcctggggctgcatcatggtaggagcaagggtaagcatggttgactactcacatgactgatatctctttctggctctccaggaggccaagttgatacagaatgcccaaaactcccctctcaaaaacacattgttactatctgctggtccaaggcccccagacaaacaaagatactattttcggctatgacattccaagggcttagaaattacctcccccaaagccaaggacaaaggccaaacctctctttggataggttaagttctttactatatatttacatatatacatatggtagtgataagtgtgtggtacatatatatgtatgctggtattaagtgtgttgacagaaaatagggaccagaggtaacaatggccaaagaataaaattagaataaagggacaaagatgggaagagtgcttttttcaataatttagtcagaaaagccttcactgataaagtaacatttcatcagagtctcaaataaagtgaggaaacatgctatgtgattatctagggaaatcatagtcccagcaaagggaacagcaagtatccagaggtaggagtgtgccttttgtaatctgtgaaaccattaaggaggtcaatgtgaatgcagctgagtgagagaggtagagagtggttggagataaaggcaaacagataatggcaggaggaaactggcgttgcagaccaggtatgaacatctagtcttgttctaaatgaagtgaaaaaccattggagggttctaagcaaaaaagtgacatgatctcatttcaaaaatgattgtctattgcaagggtcaaagactgtacagacacaaagaccaccacagaaagaacagttaggctattttaatagtccaggctagagatgatgttggttaagtttagggtggtagtagtcgggatggcgtcataattgtattctgattcaataagtggagaggatttccttggtaacatgaaataaattacacattttttaaaagcctatctatgaagtctgtagctcaagggaaaaacaattatctcatttattttctgtcaatactctgcaatatctcaatgtttctcaactcctttatgtatcacagaggctagaagacagaaaactttatttccaagaccctcttttcagcaaagttcaggtttcgcatctaaaaatgagaggcatttgtacaagatttggaaggcagagagcagcagcagttaaatgaatgttccttatcagtagggcctttcttctttaagatatggttaaggggcctaggttcatgtagttttacatttttaatgtacggttcttatgatcattatgctcatctgcatcagctgacagatgggaaaaggacatgaaggattctgcactggagtgcttagtgtgactggcttggaagaactgcacctcagtcattgcagcttctgctattggatagaactcaatacagaaccacagctggttccagagaagactaggaaatatatctagctgtgtacaggaagaagaacccaaaatatggtgaagagctagctagcctgtctctgttacatgccctgtaatcaactagacaagcacatactataccataacagaatgtaaatagcgctccctgcccatttttataagctgcagaggcagaggcactgcacacggtaattgaacaatgatacattttcccaactttgaattgtatggtcttaaccctgaatctgtgacgtcaacactctagttcagactatactgctccaaatgtatgttagtttatacaatctctttcatagtttaatatacaaagaagatcatatctactagtctttcctacagtcttgaagtcttaatttcaaatacatagagaatacacatacacaaacattcatacacacgcatagaaacatacattcctctcaagaatacacagtcactttccggaattgagcagtcaaagatccaaatacaaaaaaactttgaacacaatcttttgcaatgtcatatagagcagtttagatatccggaggcatgtcgtttttgcaacactttgttacagaggaggatctttgctctaccttcacatatgcatagtctcactgggtaatttttcaagaataagggaaaaaacatgcctcagaggtaaattgtattctctaccatttagtagaaatacaacttccaaaaactttcttttttctttttttcttttttttcttttttttcttgagacagagtctccttctgtcgctctggctagagtgcaggggtgcgatctcggctcactgcaacctctgcctcccaggttcaagcaattctcctgcctcagcctcctgagtagctgggattacaggcacctgctaccacacccagctaatttttggtagagacggggttttactacgttgtccaggctgatcttgaactccttacctcaagtgatccacctgcctcggcctcccaaagtgctggtattacaggcatgagccaccgtgcccagccccagaaactttctaatgtcagggtcaaaaaatattagagtttagacaaagccatggttgcctagttagagtggcaaagttacattatctacttgctaactgaaaactttaggccttatattttcattatcgtttttaaatttaaaaagttctgttcattaaataaaattt

SEQ ID NO: 97229 - DNA, 13976 bp, Homo sapiens
  misc_feature (1)...(13976): n = A,T,C or G
tggtgctatgtacagtctgtgtgtgtaagttttggtaaattttaactttttataaaaggtttgtgtatattttatggtagtaaatgataaactagcatctacctatattttatgcattcatgacataccttttttttgatatttctaggctacacggttcatctgtgagttttttcaaattgtccaaatctccatgatattttctaatatatttatttttaaaaatccacccataaatgggcccttgcagttcaaacctgtcttgttcaagggttaacagtataagtaatcatccacatgaactatttcaagtccttagcacacacacatatttgggatttgccattctgaacatacagagtgacatgtatatactgtaagagggtttttgtaactagaaaagtcctagtgtttctcctttaaaagacaacagggcagtgtctcagtagaggatttaaattacaggggtgttttattctttcaagtctagaaaacttaaaagatatatgtttcttgacttttcagctataatgccaaccagcattaggaagacattacccaatcccagacttgtcttgctgcctcaaatccaaccattctgaattacaggagacagagattatcacctgaaaaggtgatatagcacagacatgatgaataggggcctaattgtgaggtgggcagccagtgtgatttgtatctattctggaaatccctctatggatctcagaacaggtgaagatcatccaggtacagctccgacttctggtcatcagtcaccagaaatctcggaaactcagtggcatacggcctgggctgcttgtcccagttggaggtacactttaatctgcagtttatctgatattgtcatttaactagatctgtatgttagctcacttagataagcaacttgagtacaggactgtattctttgcctctgtaatgctgtgtattttagaaggcaactaacagatactggtttgatgaaatggactagagaatcacacaaggctgtatcaaaataaaaattctacaaatcatttatcagaaaaaattcttgaaattcaaaatgtttggatcatttttaaaaaatagatgcatgcataaccattacaaaatagtctagaaaattggatattaagtgcctacataaagagatccccaaatttacttaaggttacagccacccataaaactgagtacttaaaaaagttggtggcaaaaaagtcagtggcatttgaaataaaaaagactctatgataataaagaaaaggaaaactagttacaaggtaaactgctacaggacagacacatctttggagtcttccaaggtgcattcagagatacagctgaaaagggctgtgtgaaaacaaattctgtttatgttccagtttttaaaattgtgtagtttatatatttttaggtagtaatatgcaaacgagctcaaactcagttgaaagcaacaccaacatggttgataggtttctctcctctaaaaatgaggttctacattgcctccaaaatacccccaaacttcaggtttctgagtctataaactccactgcatcatatagctgtgtgcttttttccagataaaatgaccttctgtgaactgtcaggtagattctcctagctcattgtcacagattcactcccactataattacggtgccagctgctgctgttttctttgcactccaggctccagatgagagctgtgcattttctgtgaagtcctagaaatgaaacacaggagctttctaactttggaaaatcacatgttctctttattagaattctgctgaggctaatgtgatgggagacaagagtggagtatttaaactctgtagctattaatacccctaatcaaagagttttagcttgcctatagggcacttctctgttactgatgcctcctgttttagcaactgagacagaagatgcctagaagcaaaaagtctgacctgagcaccaaaaggatgtcataattaaaaaaaaaaattctttgcagagatgcggtatcgccatgttgcccatggctggtctcaaaactcctgaactcaactgatccgcctgcctccgtttcccaaagtgcagggattacaggcatgagccaccgcgctcggcctggttgtcataaaattaatgttatattgcctcctcttccacacctggtaataactgcaaatgtttatcatcttttatctctttccaatattctatcaaaagattactggaagtaaggctgggtgcggtggctcaagcctgtaatcccagcactttgggaggccaaggtgggtggatcacttgaggtcaggagttcaagaccagtctggtcaacatggtgaaaccccatctctactaaaaatacaaaaattagtgggacacagtggtacatgcctgtaatcccagctacttgggaggctgaggcaggagaatcgcttaaacctgggaggcagaagttgtagtgagccgagatcgcgccactgcactccagcctgggcaacagagcaagactccatcttccaaaaaaaaaaaaaagagagagacaccccccaccctccgcccaagcagctcaactgtcctcttccccaccatttttttgggtggctgagcaacttatcacctgagttttaggcttatggatttgaagcatgtactcctgcatttgagtattagttctcctgtcccaccttcccagaaaaacattatcttttatagagtatgttaatcacagtccacaaaaccaaatatgtcaagttgcctgccaccactgaggccaccattgtttttgtaggctcctgtggttctccacaccatcccagcctcctcaacccccaaattattgctggactacagaaatcttgaatctttggcagggttgggaacccatgggcctctaaagcagactccctggaggcaccaatataacccttcccttttggtgtcatagttttcccccactaggacccgaatcatctctattttaggggcaaacaattctttctgcttctctcaagcattcggcctcttccttcaaatattttttcttttttttcaggttgagattctttattctggaggtaggaagggggtcagcatgctcaggtagggagggtccagcccagctcctccagccccccagtgcttgcccagccccaataagttacccagttaatcagctgccctccctcctgggtccgtctgtccttctgttccaccctagacagggccaacctggctcaatacaagggctgcttgtccccagcctgtgggcagtgccacatggcaggctgggggagagatgaagcagcaggaccatgccctgggtctggaggggcagaggggccacttctggcttcaagcggtcaggacttggaaaaccacatgctgggcaggcctggggcccagtcccacaaggtctgtgcctgaaaagaggtggtagttggggtggggccgccatcacacctcaattgctgggtctgagccctggccctgccgctgcagctgctccttctgcttcatcttgggcttcgctgtccgtgtatgtcacaccagtacccgagtgcagttggcagcccgtggctccaggtccttgggatccacaaggtggcttagaagactgctctccaggtggctccggggagcagtggaatcaaactgggcattgggcttagctaacagcaagggcagggccacagcaaatccggccatatccacagggaagggcccgttgggctcccatgctgtgtggaagcccactacccggctgtcctgtacctgagggcccttgactcgcaggccacccaccagccccacaggccacactgagacaccacgggtccagcgcatctcctcaaacagctcccagctgtaggtgttgccactgtcagcaaagtacacgactccttgggtccctggtggtgatgggtccttcttcccacccacagcactccctctgccccggagccagtccagggccttgttccgctgctcgacaccatggggatgaacccagccaggcttgccctcccgaagccgctgggctttgggcgtgaggaccaccaggtgtgtgaagaggaggccagaggcagccagcagccctgagaccagcggggtgggaccctcagcatcctccaccagcagtcaatgcagccggggcaccaggctcagtgtctgggacagccgtaccaactctgccttctgtaccagcctggcataggtgggggtaacaacatagatagtaggcagggcctcgggttcagggggctgggcaggggcagggggtggccgtcggagttccgcttgcagctgggaaatcctcagatccttctgccgtagctgctcagctgctgcccgcaggggaggaaggcagtcacatggctggccagcgcgtagaggaggccggcgatcgacaccaggaagtaggcgagaaacacgttcttcaccttcagcttcatggccacgccgctgccgcctgcgccccagcaggcggggtctctcaaatattatttttctccatgggctcaggctttttgggaaacaacagccagtaagtctagtgtgaggttcttcagttttcttgctacatacataaccgttttgaggtaagaaagcacagaggggaaaacaggtgaaaaacattaaagctcagaaacattttcagccatattaattcaattccagaagcaattaaactttgtttaaagacaataatttaatagaaatatagtacatttactgctatggaaaaataattcataatacgttgggtttttttgtttgtttttgagacagggtctcactcagctgcccaggctggagtgcagtggtgtgatcataactcactgtggccctgatttcctgggctcaagcaatcttcctgcctcagtcttccaagtagctgggactacaggtgtgagccaccactccggctaattattttattttttgtagagctgggttctcactttgtggcccagactgctctcaaattcccgggctcaagcagttcttccactttggcctcccaaagtgctggaattacacacatgagccaccacgcctgtcccacatgttgttttgacaggaagttacaaagatgtctatcaggatgactccaatgtttaatagaaaatgtacataaagtcaaaacgaatatttaccaccatgaaacagtagctaccactacaattcacacttcataagcaaccttttaaggagctgaattggtgaagctatctgagattgactaaggcctaatattgccttactttctgctttatatctttaatattttctgtaatttactgaataaaagcctaggacctggatgtactgcaatgtgcagtatatagagctcatagcttttttttttttctggaatgcagtggtgccattttggctcactgcaacctccgcctcccgggttcaagcgattctcctgccccagcctcccaactagctggaatgacaggtgcctgccaccatgcccggctaatttttgtatttttagtagagacggggtttcaccatgttggccaggctggtctcgaactcctgacctcaggtgatccacctgccttggcctccagaaagtgctgggattacaggcctgggccactgcacctggcctagagcccatatctttatttagcacattagtaaacaaaatgactttatagttattggaagttaaataattcaaacttaaagctgttggaactttattccgagccttgggaggaatgtggctacagcctgagtcaagcagcaggcatctgcaacgtctgccttttgtttctataaataattaaaataggaggaccaaaccataccagagatacaaccccctgagatcactaccccccctcatggagtaacaaaatactttttcttggaatgtagtaatctgtaacctaccaaatagctgtaagtatgcactggtctcttaggggaaatgaaatcctgttaaaatttgtctctggccacctaggcgaaaccctaacttcttcactttggaatgctaaccccatttggagctggtgtctcctgggtggctaccctcaagccttacgctggaataaactctatccttaatcatatttccagaacctcactatttaaggttgacaggagagggaagcggtgatgtcttgagataaagctgaataaagtttctcaagaaaaaaagggaaaggaacctctaagctgtacgttgttttctaactctagggagttagaggtgaagtaggaacttgaagttggaagtgttgagttggacagccctcatctctaggcaatactttcataaagtggaaaaacgggggaagaggacgaaggctagggagagacgcagggatcyacccaacccagtcctgagtttcccactcgctcttggagttgagtacaaagagcgctccaaagccccttctcctgtgctcagcccagtgctccggtgggtcaggtctccggaatgcgtaaacaaaagcaaacagctgagcggcggagggcgcaggcgacagatgtgggtgttccctgagaatgtgtggcgacttcccggagcagcgggtctgtgaggcaacgatggaagacactgcgctccacagcatagcaggaggccccgccccgtgtggcgccaagtaaaagataattcctcagaagccgtcggccaccggcgcttcgcctcgtcccgcgccaggcccagcctctcccccagaccaccggtgccatgcggattccccaggcgggaccccagctcacgaggcccactggccgaagctccccacaggatagagagccgctcctgcgaggccaagcttccgagaggcggcctgcgcctagcacgcaggcgcggaaagctgggcgccagccttaaactgactcccgccacctgcctcgggccgcgccgtccaccgtttactttcgaacgagcccagcaatagttcccattggccgatgccttgcagttgaatgttgcctgcagactgcgcctgcgctrcgaggctccgcgaggccccgcccggtctgggcacctgaagcccttcggggcagaggagggcggggactcggggcggctctcagcatccgcctggagctcgtggcgctgtgtttccgtgctgtggagttgcctggtccgcttcctccccgcggtgagtctaaggacctttacggatgcggagaaggtggttctgagtcctttttcttttcctgtagcacagtctggtgtgcctagtgtgttgggcggggagtcctgggggcgcgacgatggagggagtggcttgggacctgcactcattccctcttgtcccatactggagtttggggagccactttcccgtccctccactgtggagctgcgttcctgtgagggaggaggycctctgtggtggcgagggtgagctgagcggacgccgccgagtcggtcagtcccgcggggttggggacgggcgggtgccgaggyggaggcgcgttaggagggaggcctgggagagtggagctttgagaaggggaagggaagagtactgccattttgagcccctttgtgggaggtgctcgcaggacttaagtgaggtaggtgcagttacccattttacagatgtgaagcctcacttttgagaggtatttggtaatactgacccaggtcccacagcattgaaatggcagaacagagagatgagcaaactatactaaatcagttataatttagagctggcaaggtattttactcccatggatgcttttgtcttgcagttaattttaagcactctaaaatgaccgtgaatgttttttctgccatcaccattgttgggtaatattgtcgagagctcataagctacttgacgttgtgaaaagaggtcctttgtgacagtctgtttggtcagagttaggattttcaaggaacaagcgatacctctactgcagctccagcaactgtgttggtgtttgtggcttttctgaaaacacgatgaagcatcgtgaagataaatatcaaagacagtgaactaacaaccatttttatgacatgagacaataaattgaaaacattaaagataacattattttaattttagaataagaataaaagattctggaggagttggagaagagtgtattcagcccccaaaccacgagatcaacaaagtaggtaatctgggagattaaataaatatgaaaaacaattaagtttttacagagtgtatgatttaaactacaaagtgaaatttagaagtcttttgaaaaaacattgtgttggcggtgtataaaactccaaccattttatcgaaggagcggagcataaagtgaaaaataaacaactcccttctctgatctgtaccttaaaagtagtcacttaactcttttgtacatccttctagaaattttacaagaatgtgtacatctcaaaacacatgcaaagttgttattttatacatacagatctgcagaactacacaaaactgcaaattaagttacctggatactttttcactatgcattcatgtattggtctttttaaatgagtaagtagctatttaatctggcaaggtgaaattttgattttaggtgatgttagttttgacattgcctttcactaaacacgttgatgaatatttcccaccagatatatttttactttgaaaagtacagcaaaagcaattaaagccttaatttctcaagtcaattccggttaaattgaattaatagtctttttttgttttgtttctagtttttatttttattttttagtttagggaaacaggttgatatcaaaatgaaagaaaatagtacagatggacaaagagatttaaaatcagctgaccataggatttttttaatttgaaaaagttaaggtgatctctcactatttttgtatatttatatgtgacagaattatttttaaaaatcttgtttctcagactttctgcgataatgttaaaaaaatcttatatatgtttataaatggtgcagttgtagttatttcttaagtaagtcttgacttgcatgaaatgtatttcttctttatcagttaggtccacaaagatgtgagccccagtttgggtggtggcaccacttgaattttcccatacttaaagctgactcactagaagtcttgggacaagtcatcgaattctataatgtaataaatatattttcctttcagaggttgtgaaatgtaatgaacgttttacaactgttcatgtttagagttgaaaggcaggaaagcattagtgaattaaaacttaaaaactggtttacacaggagaatgggtaatgatattttcggtgctatttaatcatctattatactgtctattacctaatatgccagttagacatcagggaggctcactagtgaattggccctctggagaaagacttaataaaaagtttggaaattcagaaatgtatttgttttgacacttaaacacactagacattagtgaaataatttgtaagtagagtgatttagcctcaggtttctttctgagaagattcatttttttatattaatatttctcggttttaaaagagaagcaggaaatcttgaacttggtttttacatgagcttagtactcactagaggaaaatacattttacatggattattttacttttttgctttttaaaaacatacagtagtataaattgattcaaattcatttagcaaaaggaagactggataataggcaagacgcttgaaaattttttaaagttttttttttattgtgtaaaatatgctaaacataaaatttaccattttaatctttttaagtatgcagtttggtggtattaaatacattcaaattgttttgtaattatcaccatcaactatctccgttaactttttcatcttcccaaactgaaactgtgtacccattaaaccagcagtcctcaacctttttggcaccagggaccggtcttgtggaaggcaatttttctgtggacgggtgggggtgggtggtgcatggttttgggataaaactgttctaccgcacatcatcaggcattagttagattctcacagtgagccacaacctagatccctcgcgtgcgcagttcacagtagggttcacgctgttatgagaatctaatgctgacactggcaggaggcggagctcaggtgggctcgaggcggagctcaggtgggcttgcccgccaccatggtgggggcgcagggtgggtaggaagggttgaggacccctgcattaaatgataactctacatcttccctgctctcaagccctggcaactaccattctactttctgtctttgaggactgcttattggttttgatattatatatattatatgcttttttcacatataatgtgaatgtaaattttttttccattgaactaattgactgaattatattaatagatttttcgttattgaattaactttgtatttctggaaagaaccttatttagtcatggtacagtgttttttttaatgtactcctgtgtttgtttttgctaacattgtatttagaattttacatcagtgtccatttttgaaattagtccatttttagtttgtattgtctcaggttttggaatcatgttatactgtcttcaaaatatttagcaaacttttcatatttgtattctggaacagttgagtagggcctagtccacactcaagggagaggagatttcaagagtatccagaaagtgtaggtcattgggggccattttagaggctacctatcacagatagctaatggcttgtttatttacttaaagaaccaattcttagactggtcatggtggctcacagctgtaatctcagcactttgggaggctgaggggggaaggatgtcttgaggctaggggtttgagaccagcctgggcaacgtagtgagaccctatctctacaaagcataaaaacattaggcatgtgtgttaacatgcacctatcagctacttgggaggctgagctgggaggattgtttgagcctgggaagttgaggctgcagtgagccatggtcacaccactgcattccagccctggtgacagagcaagactcagtctcaaaaagagccatctcttgggtttatcannnnnnnnnnnnnnnnnnnnccgcccccacccccaaccgccccacaaaactccccccccttcactcaccccccctaccccctccactcacccccccctcccccacaccttcctaaatccccacccccatctcacacccaccctagaccattcccgcaaatggtccttaacccccccctaaccgcgcccccgatacacccccccacccccccgccgtacaccccacacccctcccccgacctgtctccctccctcacccacaccctctcaccttcccccctctcaccctaccccccctccccacccgatccaccgctccgcctaccaacccgccaaaccccaccaccgccatatataccactataacccccagcccctaccactactacgcccaaacccctcgaaccatcccaacccactctatcccccccaatcacgccccccttaaacacctaccctccctccacctctttcccctcctctccatccccataatcccctcaatccccccattcccccctactctccatccactcaactcccccatcccccctacttccgccccttctcaacccccacccaatacccccccccccctaataaccaccaccaccccccccccccctcccccccccgcctcctcccccaaaaaaactccccccttcccccgcccctcccttcccaccgccaccccttcctacccccccccactccaccccatccgcaccatactaatccccatccaataccagcttcccacgcctaaacgcttctcctgcctcagcctcccgagtagctgggattataggcgtctgtcaccctgcccagctaatttttgtatttttagtagagatggggttttgtcatgttggctaggctggtcttgaactcctgacttcaggtggtccgcctgtactcggcctcccaaggtgctgggatgcaggggtgaccacagtgcccagccagttctagcaatttaagttttctagttcattatcatcttccatttatctttattctttttttattttttgagacaaagtgtggctctgtagtctaggctggaatgcagtggaacgaccgtggctcatggctcattgcagcctggacctcccaggctcaagcaatcctccctcctcagcctcctgagtagctgggactaacaggcgtgcgccaccatacttagctaagttttttattttttgtagagatggggtttcactgtgttgccagggctggtctcgaattgctgggctcaagtgatcctcccaccttggccttccacagtgctgggattacaggtatgagccattacaccaggccaatttttattcttttttttccacttttcctcttttttttttttagttgaattattttatattccttttggtttggtaagtaaagtgtatggtgtcagctctgcccatgtaatttttttttagctctgtagattttactgaagagtatttctgttgtttcacatgaataaattatgtcgtggctgtgtacagaattctcagctcatatccctttccttctagtctttgtggacattgctacattctgttctagcattccttgttgctggtgatgttctggttatttcctgctgtgtaacaaacatctgaaagcttggctggccagatattcaagatgtctttttcactcatgtgtctggaaactccttgcccttctatttggcctgtctcttcagcaaagtagcctggacttcttacatagcagtttgtggctccgaggcagcaacctgccaaactagttaagggctatacctagaactcaccacatcacttatactgtatcctattggtcagaacagtcacatggcccacacatattctaatgggggagaatagatttcatctccatgtgcagggagtagcagcaaagtcacattataggacagctcatgtgggagataattattgtggccattccaattttggaaattccagtctcccagaggaggattctgagacctttggtttagttttccttttttcatccttcttttctgtgtggatacttgtagaattgttcttatttctttaaaattgtattatatttttaattgcttaatagttaaaagcgaaaccatgatttataatgaaaaacagattctttccctctagaagccatcacttttatctgctttaacatttcttttggtattttcttttatatttctagatatttattttttgtgggttattttttaagtatgtattgactttcttataaggaaaaattaagatttagttcttaaactgtttccttcccttattttccccctcaatataattttgttactctttggtaaaatcagtatttgatatttacaatattatgactgttacagtgacagctgagccatatactataatattaatatttcctctcttttcatgattctatcacgttttttccctaaatttagttacctctcaatatgtttcatatacatgaagcatttctgtcagttccatttatttacttaaagatctgtcttctgcatgcctgaaatcacagcactttgggaggtcgaggcaggtggatcatgaggtcaggagattgagaccaacctggctatcatggtgaaaccccatctctactaaaaatacaaaaaaattagctgggcgtggtggcgggcgcctgtagtcctagctgctcgggaagctgaggcaggagaatggcatgaacccaggaggcggagcttgcagtgagaggagatagcggccactgcactccagcctgggcgacagagcgagactctgtttcaaaaaaaaaaagatctgtcttttggatctttcttcctcttctagagtgactcttccctaggctttcacagttgtcctggacttcatttcgccattatgctggcgaacattcttgc

SEQ ID NO: 97230 - DNA, 12983 bp, Homo sapiens
  misc_feature (1)...(12983): n = A,T,C or G
acacaagcatccacgaaaagcaggcgccagtttctgactgttgcattggaaacattgccgacacgagaatgcccagtgctgccatggcaccactgactgctactctcagcaccgtagcaggggaagcaaattcgggaatagtttgtcatgatacacgtcataggacatcaaaatcttcacaacctttaactcttaatagtttacgtacaacggatgtaatggggacatttacaaatgaagaaagaatcaacagataaatgatttagaaaatgatggtttatccaagcaatggagaagagctataaaaatctgtatgaaagggaatattctcatgtgcataaaaaaagaaacagggaccaatccagcccctaaccctcaattacgtacacacgtgtgtatccaaataccaatccagcccctaaccctcaatgatgtatacatgtgtttatccaaataaaattattattattattttttgagacagggtctccctgtcatccaggctggatcatagctcactgtagcctcaacctccctggcttaagcgatcctcccacctcagcctcccaggtagctgggactataggcatgtcgtgcctggctaattttttttttttttggtagagatggtggtctcaccgtgttacccagactgggcgtaagcaatctgcctgccttggcctctgaaagtgctgggattacaggtgtgagccaccatacccagccacataaattgaaagacatataccaagtgtttcaagagttggactgggaacaggggtaatgtgtggctgtgtattcccctttataccttctcaatgttcccattttctctcctaagcccctataacatttgaaatcagacaggtgtggtgtcttatgcctgtgatcccagcatttcaggagactgaggcaggaggatcacttcagctcaggagttggagaccagtactgggcaacatagtgagacctcatctctattaaataattttaaggccgggcgtggtggctcacgcctgtaatcccagcactttgggaggctgaggcgggcagatcacgaggtcaggtgatcaagaccatcctggctaacacggtgaaaccccgtctctactaaaaatacaaaaaattagccgggcgtggtggcgggcacctgtagtcctagctactcaggaggccaaggcaggagaatggcatgaacccgggaggtggagcttgcagtgacctgagattgcgctactgcactgcagcctgggaaacagaggaagactctgtctcaaaaaaaaaaaaaaaaaaaaaatataaaacaaaaaaatttgaactcaaccaaagtaaaacgttaacagaaagggatctggcctaaacacagcctcatccctaaccaggtctagacaagtgccagggtctgaacaggagaggcagtgcaagtgatccctggagggcaggatgtctccaagtcaatgcttgagaaagacagaaatattcaccatccaccaccccagctgctcctggacactaggtgctggcttatgggtcacttgtgagtggtggaaacacatctttcaatggaaaaaataccacagtctgctctcaggcagttacgatactccatatgcaaaggagacgaaggaccaaagaaggaaaggaagcacctgtcggctttccagtcaggaaaattcaatttgtagacaaagaccttggtcaaaggcagaaatcctcacaccgaagagtgtggagcagtggccccatggccaatcaagagcaggactctcccatcaggcacggcaccttctaggggccaattcccaccctacaccctctgcccggctagaccacccttggagaagctgctcagcgacaggaatgctgcctttgaaaggagaatgtgggtttgcttccttctgctttttggtactgtccatcccctctctattgagcttatagaaattttaaaaggacacattttcttgttaaagaaatcaaagggccgggcatggtggctcatgtctgtaatcccagcactttggggggctgaggtgggcagatcaagaggtcaggagttcgagaccagcctgaccaacatagtgaaacacgtctctattaaaaatacaaacattagctgtgcgtggtgtcgggcgcctgtaatcccagctactcgggaagctgaggcaggagaatcacttgaacccgggaggcggaggttgcagtgagctgagatcacaccactgcactccagcctgggcgacagagtgagattccgcctcgaaaaaaaaaaaaatcaaaacacccccacggcagtctgagggtggcccaagctcatgggggccaatgccccaatgcccctcttgctgagatccttagccagtgggcagcagcctgcctccagctccccagcccaggagctgttcctcggcaggttaccactcccaaggccactgttagaaagcgctgtctgtccctgtcacagccctgcagggaagtccacctggcgctgaggactctggccacaggtgaagctcccaaggcactcccacacctgctagacacaatcacagatgtaccaacaacagtaactaacaccctaagggccttctaagggttccgagcagccacaccagagtcagcaccaccctggtgttctcaacggtgtcggggatttggctgttcttcctgaaccaaaccttcactgacaggacgttttcctggttctccagctgcctcctgacccatccccagtctccactccccctgccctcctccctgaccccaatcttctcagcctggtggtgcccaggactaggcctggccccttcttccaacgtttccagaggacacaaaccacctatacctagggactcctaaaacctgtctcccctggcagactctgatcctggcaccacctgcccaccaaggtctccatggcgcctcccagacatctcacagtgggcagatccaaaacggagctcctcagtgtccccaagccagagcctgcacagcctttgctggcccctccacccggggactcaccctccttctcccaaggcccactcctgcggagcactcctccccccactcagcttttcccacggccaggcagctctcctggcctcctgccctccactgtgtctccacccagccagagcagtttcacagtaaacatctcagacctccagtccacgccaaaatcttcccgcacacatcaactggaccctccatgctgcctccaggacctgcaggaccacagctggactgagccaacccctgctccctctcccagccctgggaatttcaccttcccgcatatgccaaggtcctccttgcctcaggcagtttcactcaggctcaagtctgcctctccccaccttgcccggtgccagcagcttctcagccctcagatcttgccctcagtgccacggcctcccctgaaccctcaggaccagccactgttcttcaccagcgccctgctcttttccacataggatgtacaccatgtgccatctgcctctgcccatctgtgcctggcttctcaccagcctctcctaccagctgtggcctcttgagaggaaacaggtctgtcttattcaacactgcacagtcagaagtaaaaccggaactggccatggctggtcttcaaaaagaatgaagcaaagactacgcctctctttccccaagtattatccgaccagtccaaaacgagagagaggtaaacacgtggtaataaatggtaaaggaaaataattcttctcaatcttcagtggtttgaaatgcctctggattgaaccccagttataaccccacaccatttgctcaaagtacctgtgacgaaatctcaggtaagttctcagggtcggtgtccgccttctgaggagctggtaagacgggtggatttgctggttttaacccagcaatttctggcctcatcttctgctcttcctctagcctgaaagccagagctgaataacagaagctattttatttcaaatatgccacaaggcctacaagagatttaaactgctttataaaaacacttggcaggcactatccattacaaatcaacattatgatacctgatagtcactgaaatgaattcaacaatgtcccaagggaatgaaatctttttcaaaacacttggcagtttgtgtccttgtccataacacagaaccccacatcttttgccttcctattttccattcagggacgttcagcatgtggcaggtgggcaggagccctttagctttgctccaaagagaagcatcttagaccaagtgagaagagattctccacatcctcaccagaactctgcctggtcttttccaaacacacgctaatgagtgctacgaaatttgtgtggttatttaggctgagtgttcaagcccaccagctgacttactctataagggaggctggacatatcagtacttacaccagagacctagaaagtagtcagacagcatcaaattaacatctgtgttctagccaggtggttacatacagctctacctttctctttatcttgatttcttgccaattcgttgccatatatgcctcctggagctgtttaaggtagaatgcaagattgcttctgcccaatcaaccctcaacacagatatcgttttcaagtacacgtgtttctgatacctttccaatggtcagccaagttgatgtagaagaggagtccacagaaaagcagaaaggcaaggaggaagagaatcatattccgctgcaatctcgacagttgcttccatttctaagggaggtacagagaatgacatttcttactgaatatatcacacggaacgtctcaactgtcacaaactgtgaggacaataaggaattcttctggaagatccagtgttcagctctatttctttttttttttggaaacagggtctcattctgttacacctaggctggagtgtagtgggtggaacgcgggatgagccaccgtgcccggccagctctatttattttgaatggggagaagttccctctcagcagggagtaggaacattgctgggacaatactacagatgtcgttaatacagtggtgcagatgagacgaggataagaaaaaagcagaaacatttctgtcacatttcatcaacagtggagaaagactcctgcgactcccacagatgtagcccaggcaccgcccaggcgatgcacagtccgcatgtggttatcaatgcccttcggcctgagaccaccacgaacagaccaggagccaatcaagaggggctcatttctcactgtaccgaggggagcatacaccacggggaacctccggtttccgctccaagaggggcaggcgcctgggccaggaccttgcagaaaagcgaacgaagcccagaaaacctgctggggctctgagccctcttcccaccaccgccccgcagaatttgggccgctgagaccgctgcaggcgagccgcccacggctgccccaaccaggaacgcacatttgcccctttttgcggggaaggggtggagagggcggcgcctggggagtcgagtccgcccgcccaggtcccgctcggagccgcagtctgggagggcggcgggcacggcagccccgggccccagtcagcccggcgcgaccctcaccctccagcacgagcgccgccgccaactcttgctgttgtcatagctctcgccaaagctcagcgtcaccgagatgaagtcccgatgaggcggcggcggcggcggtgggtacatgactacagtggtggcgacggcccaaggggccccgcccactggcggcgtcaggaagtccgactgagaggaaccgagagctccgcttctcctgccctcgcaggcagccatcgcagcgccgtcaacagcccgcccatcacacggatacgcgactgcgcgtgcgctgcgtctctatgcggccagtgcgcccgcgcctgtctccgctgcgctccagcgtacggggctgcgtcctacggcgactgcgtcagacaactgctgcgactccgccctgccctcaggttcattgcgcatgcgtccggcagcgcctgcccaggtgtgctmsgagcgtagctrtagcaacggggcgggccttggttcgcctggggcgtggtcgctgtctggggctcccacgtggttcgcctcatgggcctggagctgggcttctctcgcctcctgtcgtctggctgcaccgactttgcccacgccctcacgggagacgcagacactagggacccggggaggcgcccgggcggggccgccatgttggcagagagtcccagcgtcccgcgcctcggttccggaacccgcggcgcggggatggagctgggctgcccttgggcgccgtcctgggctggtgcccaccctggccgcgtggtcaccggcaagaagcccagggcctcacccaggcgtgggggccgggggaaggaccggaccctcccgaagtcgcggaccaggccgggcggcacccgggctggggtggctgctaccccgagctaagctggctgcgccgcatctcacggtccccggggcccgagcgctgcgcctggaccggcgccgagcgaggcggccaatcggccggctggacccacagtccccgcgccataggcgggtcggggctttcagacccggctcccagccctcgaactcggtaaccttggaggtcagcttgagatgactgcgcttcctgcacgcgttgtcctccccagaaacgcccaaaatggcaaagcggcgtccgtggccgcccgaggccctccctgcctgggttctccccagccgaacctcacgcccggcccctccttcattctctcctggccaggctgctcctgcccttgggcgaatccgctgcgtcccacggtcctgactgtggcatttctgcgtgtctggagagctcccccggcagcgacgtcctgcttagcacntggctcgtctaactctgttcccctggcctcctgctcttctaggggtcatctttaggtttctgctggtctctgccccctgtgacacttgctggtacccaaatgaagtcgtttatgtcacactctaacaagaggccctgaagaagccctcacaaaaacattagcaacggagcgcctgcggcaaacccttctaacctttggtctttatggtttcaaagcagtttatgggaacttctcttttttaaaagattccccttggggccaggcgcggtggcttctgtaatcccaggactttgggaggccgaggcaggtggatcacttgaggtcaggagttcaagactagcctggccaacatggtgagacacccgtctctacaaaaaacacaaaaaaattagcagggcatggttggtggcaggcacctgtagtcccagctacacgggaggcttaggcaggagaattccttgaacccaggaggtggaggttgcagtgagccgagatggcaccactgcactccagcctgggcaacagagcaagactctgtctcaaaaaaaaaaaaaaaaagaaatttcccgtgggcggggcacagtgactcatgcctgtagtaatcccagcacttttggaggccaaggtgggcagatcccctgagctcaggagtccaacctgggcaacatggtgaaacccctgtctctacaaaaaataaaaaaatgagtccagtgtggtggtgtgcacctgtggtcccagctactctggaggctgaggtgggaagaccacctaagccccaggaggtcaaggctgcagtgagccatgattgcaccactgcactccagcctgggcaacagagtgagatccagtctcaaaaaaaaaaaattccccctttcctcaatccccaccccacccccccaccatatgcctgtgacccactgaggcttgcatactctgcattgcaattatgtgttattcttgattaaattcatttattctggagagcctgagtttctctttaggttgacaccactcactcttgtcagtccctggagtaccccaagcatcctcacgtggttagcagggaaaccttggcatctcaaggatgcaggtgcaggagagtgagtctccaggctgtcagagctgagcatgcagaagcctgccctggagagcgccccgaggttcctgaccgcaggttgtctcaggccctcctgagaccctggtgaagagtgggatgggaccgcggggggattccttggcaccccaagtagtcttggccttcatgtgtgaactcctgtccctaagggggcccccagtgagctccagccctgggacacagctgtgaacacctgatccttgttcccaacacccgtgcactgcccaaaaactgcacttgccagagtagcagtcaattacggcaccttgtgtttattggaaatattccacctacagaacattaagatgccagcaaccggcccggcgcggtggctcacacctataatcccagcactttgggaggccgaggtgggtggatcacgaggtcaggagatcgagaccatcctggctaacacggtcaaaccccatctctactaaaaatacaaagaattagccaggcgtggtagtgggtgcctgtagtcccagctactagggaggctgaggctggcctggaggttgcagtgagccaaggtcacgccacttcactccagcctgggcaacaagagtgaaactccgtctaaaacaaacaaaaaaaaagacttcacccaactaactgtgcttgtgtagaaagaggttgcatccctgttccagtcatggccatgaggaacagctatgagaagggccctaaggcacagcatggtttgcagtaagaagggcagagccagggagagagaagtaaacatcatcttctgggctttggtttcaaaaatcacaaggtgtgggcctgagcctgctgcctgcccaggtctgggcgcctccactcagccactgtcctcccagtgcctctaaatctggaaggctgcatctgaacctgcccttccagacaacacccctcccctgggaaaccaatggggatgagtagtggccctccactggggactgtgggtttcgaggtgggggcagaggatgagttggcagcagtggcatatcatagctctcttcatgtcagcagggagagggaggtgccactgcctcccctgagatgagaaagcaggcgagaatcaccaggggaagaaccctggggcagctggcttgtcccagccatgcctgagtgcaccaaatatggaggctgcgtcctcactcggagagccaggcagcctgagcaccaagatccgtcagaagcagcaggcagctggggtgaggggtggtgcctctgactcatgaaatcccggattagtcagcaaccatcacagaggccgccggcattgatcccactggttcttggggaagcacagaaaactcagcagcctaaaccgaccatggaagaggctgagaggcagaggccttggggatagatggggagaaggcaggagtaccggccgcaggctcaggtgtccaggccaagcttctcagagccacctggatcatggacatcaggctctttctgtggccttgctgggcatccagggtgtgtgggctgggatgccccagccttgcccccattactggttcgtctgctaaggaagagggggcagccctcgagtgggtggaattgtccccctcattctggttctgcatctgtaggctgcagaagcacatcctgtgtagcttatgcagcttctagtgctcggtggggtgtggtggatccacaaggcgggctcccaaagggacatgccctcctgttctccccagatgacaccacacctcccttgggccccaacccgaagcctcctctcagccccattctcccaggtcccaagtccctctgcctcttgactagaccccacagccaggaatggagccacagagcccccagcaggctgtcgccacttgtgtccagaggcgacaggagaggccctgccctcgtggagtctaccagcatgtttcattctgtgttctgcaggctggaagcatggggcaggctgctttcccacccagagctcaggctgggctgtagcccccagctccaggacgccggggctggcaggtctggggggagtcgggacttccaggatgccggggctggcaggtctcgggggagtctgggggcagtctgggcgggtcaggactcctgcagctgcggctccctggcctggtcttcatccaggatgagcggggactggaactcccggccttgcaggtacacttctaaaccctggagacgagcaggggacaatggccaagtacccaccttttggcgggtcacagcccctctggccacaccaagagccacagtccccaggtgcgatcccaggtctgcctggagtcagggaggggtggggacagaaaggcttccagggccaggagcagacacacactgcaaggccacccaagaccacactcaagaccctaggccagcaggggaccctcctgtcacgcacaggtctgacctgaccagagaaaggggcaagggcagccgaggtcagggaggtagcagaggccggtgtcctccctccgcaaggcccccaccaaggcctgactggccccacactgggctcagacctgggctgtctcatccccatgccctcccaggacctgcaaaggcctctggatgcctcaccccaccccaacccatatcttggaaagtcttctgcaaatttaaaccaccgaccccattggttaaccgaggtagagctgtgccgtctccacccgagcagccacctctccccagatggtattccaaacctgacaccagaaaagccccagatagggatgggcagctctcacctctccagagtaagacaccaagggcgatatctcacagatggccggagggtctccatttgggggcaagctagggaaagtccacttgtcaatatctccttgcagcacctgcccagagccctcccccagcacccccagtcccgataggagactgagctctacacacctggctccccacagctcctgtctcagcaagctcatcttcctctggacaccccaaaccctgagcacacatcccactgccaagtgacaggacctgatttggggtagaaagcacccccacaggcctcccacgcagagcctaggcagctagatttaggggtggccctagaaaatcagggagatggaagccaaacgtccttttctttcccagccctgaaatcaaactgtcctgctactttctaaattcatgcccggggctcagtttcaaagcctgtgaataaatgggaacaacgttggttgggtgatggatcccctaaaagccctgacctgactgaccaaagttgcacacacaccccacaaatgtatacaaataagaaaaataaaaataaaaaaatagccgggtgaggtggctcacgcctgtaatcccagcactttgcgaggccgaggcgggcagatcacaggtcaggagtttgagaccatcctggctaacacggtgaaaccctgtctctactaaaaaaaaaaaaaaatacaaaaaaatgagccgggcgtggtggcgggcgcctgtagtcccagctactcaggaggctgaggcaggagaatggcggaaaccgggggagggtggagcttgcagcgagccgagatcccaccactgcactacagcctgggcgacagagcgagactccatctcaaaaaagtaaataaaaataaaaataaataaataaaagccaaatctaagtatgcctttgtaaacaaaccaaaaccttgtggataagttggggagggagttggggagcccctgcctccctcagtgcactgagcacaacttgaagggtcgggccaggaggctgtgccgacggtcaccgtgtgacctggagctggctgggcacaaggctacctgcacctgcggtggtgccgggaaggaagacccctccccagcatggctgtcgcagagccaacagggctctggagctgaagattgggtcctgacagccctccccttctggctgtagctaccccagggccacactcacctgggcagctctgggagccaggccccatgggcatccaggaagcgggccccggcccgcagagcccaccggtagtgctgggtgagcagggcctggcgagcggtgcggggactgtccctgtcggctggctctgcgttcttcagtggggaaaattcctcctcccgcagcacttccaaggcagcaaagttcctggtggggaaagggctagtcacccacgtcccggcacagaggccctgatccgggcaggtgagagctgggccaggtttccagtgacagagtgaaggtctggtcccatgggcagcaagtctagggaggagcccccgcaggtactgagtgtttttgctcctgagacgccagggatggcccaatcccagcagccatttccagcagccgaaggcccaaccctgggacccctgcagtgagggccaaaggccctgcgagccgccctggcaacctggccaggagacctctcctaaccatgggtgggggcagtggaaggtccgggaggtggcactactgtcctcccaagtccacagccccaaggactccctatgcccccacctcaggggctgcttaccctcagggccaagagcaccctctggtcttctccctgagacttgcccgcggggcccttggctccctcaagcctctacttccctaccagctgcgcctcagttcccaccaccaaaactgagagaaggaagaaggggaaaataaatgagttctactactaacttagcaaaccggaacacatcaaacacaaacttctccatctttatcccgttcggttttagcggctttaccagattcccctcctcatccacatacgggaccttcttcacagccacgtgtggcttcagcaaaggctcaaactccctggggcacgggagagcagaggggaggaaagaaacagatcagatatggcaccgctgggggctctgtccccacttctgagcacacccagctgggtgggacaggatggcagaaggacactacagggcacagaagcggcagagtagggccagatctccagggagaagcaggcacag

SEQ ID NO: 97231 - DNA, 19285 bp, Homo sapiens
  misc_feature (1)...(19285): n = A,T,C or G
nnnnnnnnnnnnnnnnnnnnnnnnnnnnnnnnnnnnnnnnnnnnnnnnnnnnnnnnnnnnnnnnnnnnnnnnnnnnnnnnnnnnnnnnnnnnnnnnnnnnnnnnnnnnnnnnnnnnnnnnnnnnnnnnnnnnnnnnnnnnnnnnnnnnnnnnnnnnnnnnnnnnnnnnnnnnnnnnnnnnnnnnnnnnnnnnnnnnnnnnnnnnnnnnnnnnnnnnnnnnnnnnnnnnnnnnnnnnnnnnnnnnnnnnnnnnnnnnnnnnnnnnnnnnnnnnnnnnnnnnnnnnnnnnnnnnnnnnnnnnnnnnnnnnnnnnnnnnnnnnnnnnnnnnnnnnnnnnnnnnnnnnnnnnnnnnnnnnnnnnnnnnnnnnnnnnnnnnnnnnnnnnnnnnnnnnnnnnnnnnnnnnnnnnnnnnnnnnnnnnnnnnnnnnnnnnnnnnnnnnnnnnnnnnnnnnnnnnnnnnnnnnnnnnnnnnnnnnnnnnnnnnnnnnnnnnnnnnnnnnnnnnnnnnnnnnnnnnnnnnnnnnnnnnnnnnnnnnnnnnnnnnnnnnnnnnnnnnnnnnnnnnnnnnnnnnnnnnnnnnnnnnnnnnnnnnnnnnnnnnnnnnnnnnnnnnnnnnnnnnnnnnnnnnnnnnnnnnnnnnnnnnnnnnnnnnnnnnnnnnnnnnnnnnnnnnnnnnnnnnnnnnnnnnnnnnnnnnnnnnnnnnnnnnnnnnnnnnnnnnnnnnnnnnnnnnnnnnnnnnnnnnnnnnnnnnnnnnnnnnnnnnnnnnnnnnnnnnnnnnnnnnnnnnnnnnnnnnnnnnnnnnnnnnnnnnnnnnnnnnnnnnnnnnnnnnnnnnnnnnnnnnnnnnnnnnnnnnnnnnnnnnnnnnnnnnnnnnnnnnnnnnnnnnnnnnnnnnnnnnnnnnnnnnnnnnnnnnnnnnnnnnnnnnnnnnnnnnnnnnnnnnnnnnnnnnnnnnggggtttggagggaggggtgcctgtgggcgccacgggaaactgtcagtgcctgagctgcttggcttaggggctggcaccagagtgggcagctgcctccagccccgcctttccagcctcccatgttttcggtgatgaccacagtggcacctgggcctttaatcccaccccagcgttcctcctctggcagggggcccccggggagccacaccttggcttcagcctcacaccaccccatctcttctccttgaaacagacacccggcggcagttcctgcaggaaggaggctgtcctgccacgcctgcgggtgacccggcctctggtgccagagcctgccatccttcctgtttgtgctgccaggctggcagggtcccttgccaccgacctcagccgcagccacagcctgctccctccctgggtggatttgaaggagcctcccccaccctccgcccctagcttgctccttgaggaccctgggcagggtggctgccatggggcccaatcgtgcgtgggaacctgcgagctggcaaacggggctcgggggttttgcccagaaatgggtcagaacgaaagcctctcagaggaaagaaaagggcatgagtcaaagagaaagtcggggggcaggggctccccctcatctcaccccacccaggcctcctgactccctgggtttgtgcggacccaggcaggcagccaaccccagctccgtggtgtgtgagcatcgtgatgatcaggacacaagctcttccccgctgagccttcactgtgggccagcttcccggtggatgcccactgaagaggcctcaacccagtgggccccactccagaccaagagcagaccattggccagctgccccctgcagacagcggcacccggggcagcagcaaggtgaggggcacccagccccagccccaggggcgtctcagggagcgggctgagcctggctgtcttcctgagccccacctgcttcatgggttggcttgagcaaggcagtccagatgcgtgtctcgagcgctccctggcggcatgctgcaaagctacatggctccggcaacaaggaagactgcccttattctcagtaacaggtggagctgggggctggagagcccctcggacctcgccttgggaaagctgggtgggtgcacggagcctggcaggtggccaaggggacccccaagtggagggattggtcgaggggcagcacagggtggtgcagtgggtgagctcagcccctcccctccaactctcatcccattgagccccaaggcgtggggggatcacgtctgtccttgttctcctccaggtggagctgctgggtggggctctggtcctccagggacccactctgcaccccaagttttgccgggacccgctcctctgtgttgtgtggctgtaggggagggctgcagccagggactctgaacccggggccggcccacccagccacccagggtggggaacaagatcgcctcccagggccagaagctggggatgtccttgcttcctaggatgttggctaggggatcacacgccccacattctgggtcaagcatggtcctgccccagcatcttgctgggttgggggcatctctgcacagatgagtgccaccccagcgtctccgccagggtctgggcatgtcactcttgggcatctgtgctcaggaggtcaccaggtgtgggcagggcaccaagcagggaggtagccgaggctggaagatgcacatcagtgccccgctgggcttcctcaagtgggaactggtggagggggcgctaggctgccgggccagggtcagcaggctcaggccggctcagggctcagagttgagccagaaaccaaggtgaaatctgcctcttactgccgccagggcccttgggacagggacaggaacagcagaaggtaaagtggaaaggaattgagtaatgggcccccaggcaaggctgagccaggccccaagcccaggattggggtctccagagtccctgggggccccagggcagctcacccacagcctggggcctatgggagcaagggggctcctgatgggtgggggcaggagcttggacaaagttgaaggccttctgtctgaattggccaggggccaatgaaagccaaaaagctggtgtggtggcttatgcctgtaatcccactttgggaggccaaggcgggtggatcacctgaggtcaggagttcgagaccagcctggtcaacatggtgaaaccccatctccactaaaaatagctgggcgtggtggcaggcacctgtatgtaatcccaaatactcgggaggctgaggcaggagaatcacttgaacctgggagatggaggttgcagagagccaagatcatatcactgcactcctgcctggctgacagagtgagaatctgtctcaaaaaaaaaaaaaaaaaattccaaaaaggcgagtggggagcagggtgctaggctgcatgggggcctatgcccccaccggaggacctagccccctgccaacccttccccagctcaggcccaccagctcccttctcacacagctgctctgggagggagtccttccttgccaatacctaagagaatgggcagcagggaccctgaggacaggttggggacacccagaacaagaagaagatgggacacactaggaggctcttgggcccctgcgtcaggccagcaggataggtgtgtattgtgacctgagggactgaacgtggagctccaggggaacctcccagccagtgacacgctggccttgggccagacgctgccccgcgcccttgagtgacgctcgggcctccctgcacccacccgctttccctgtggctaatggcttagagtgaaggatggtgggcgtgggcgtgggcgtgccacgtgggctcagcgtccaccctgccccatgcacgcaggcacccatcacaccagggcccacacacaggctcccatcacaccctgccccatcacagcagtgcccagagggacatggggctcccagctgagggccagcccaaggtcacaggtgaggagtgagaggtgagaggcaagggggcttcctggtctgggtgggctgtggcccccaaaacatgttgcttaggtcaagccagtctcccccagcaggggtgaacaattttcccccagcctgcctggcccaccctttctccagggacggtgcccagtgggccttatcttccccatgccaggtgtgatggttaatactgtcaatttaattggattgaaggatacaaagtattgatgctgggtgtgtctgagagggtgttgccaaaagagattaacactagagtcagtgggctgcggaaggcagacccacccttcatctggtgggcaccatctaatcagctgccagcgaatgtcaaccagaaaaacgtgaaaaggagacgacaggcctcgcctcccagcctacatctttctcctgtgctggacgcttcctgccctcgaacatcggactccaagttcagctttgagactcgggctggctctccatgctcctcagcttgcagacggcctattgtgggaccttgtgatcgtgtgagttaatacttaataaactccccttcatatatatatgtatttctttttttttttttaacacagtcttgctgtctctaggctggagtgcggtggtgcaatcttggctcannnnnnnnnnnnnnnnnnnnnnnnnnnnnnnnnnnnnnnnnnnnnnnnnnnnnnnnnnnnnnnnnnnnnnnnnnnnnnnnnnnnnnnnnnnnnnnnnnnnnnnnnnnnnnnnnnnnnnnnnnnnnnnnnnnnnnnnnnnnnnnnnnnnnnnnnnnnnnnnnnnnnnnnnnnnnnnnnnnnnnnnnnnnnnnnnnnnnnnnnnnnnnnnnnnnnnnnnnnnnnnnnnnnnnnnnnnnnnnnnnnnnnnnnccgtgtgtggtgactcacgcctgtaatcccagcactttgggagaccgaggtgggcagcatcatctgaggtcgggaattccagaccagcctggccaacatggcagaaacctcgtctctactaaaaatacaaaattagtcaggtgtggtggcacacacctgcaatcccagctactcgggaggctgaggcaggagaatcgcttgaacctgagaggcggaggttgcagtgagccgagatcacgccattgcactccaacctgggcaacaagagtgaaactacgtctcaaaaataaataaataaataaataaataaataaataaataaataaataaaaagagatccctgattaataacacgaacacgccagggctgtctaggtgcctggacctccagactcctaacaaccactgaggggcttctgaacccagtcctcctacgtccccagcatcagtgggacagagagtttcagcccctgcacgctgacctggtactggcctgatctgggcacttttgaccacatgattccccttcctccctcggggccttcttgctccaaatttaggagtggccaagtcccagctccaggcgtccaggcccctcccatcacacccctcacctggccccctgggtccacctggctctgcatagctggtatcacacaggtacctctgcctgccatccctcctccgtgtgctgcagggcctggcggccgtggtccccatgagaaacccagactcaatgtctgcattgttttccttctgcctggaggtggtgggcacccacatccaggtgcgtgtggactatcacctgctccagccctctttatcacacaggatggggtcttccgggccgcagagccaaccctgggctggcccagccctacactacacccttcccctctcccacctgcgtagaagggtctgcaggggtgaggcctggctgaggagggtggggatgatcccgtggcctctcctccagctccacgggatgggaaggtcctcctaatgagcgaacagaaaggcctcctccctctgggggtgcaagagcagaccccaggccccccactcaggggtccgtctaccagggccccaaatgggagatgaggcggtggaagattaacccaagctggcaacacaggcagaagccgcaggtctgaaatggactttaattggcttttgtctctagaattacccacccgttcctgcgctctacggttctccatgccccctccagtttgggggtctaaaccraacaggagaggtgcaggggaccaggaggtgtcctggcacaaaggttcgggggtctccctggcaaggggtcccagggcctggagccsraggcccagccaaaagcacacagcatcaaaacatgtttttagtgggaagctccaggccctgcccctccccgggggcctcgaggtcggggagcaggtgggcgtctgtctgcctccaggtcatggcagtgcaggcggtgagctgggggccggcaggggcgcggacagtgcggcgtggtcgaacagagggttgcgcacctccatttccccggtctgcgaatgtgggtgtcaggctgggcagtgggtgggctggggggatacttgctgggagggaaccccaggagatggttcgcccctccctgcaccctgasgcactcaccggggccaggcccgggcactcgtacaccgtgaagtctccgtcctcattctcctcatccgaggaggccgtgtccagctccttgggtggctctttatgcctgggtggggggggatcgctgggtcctccccatgccctcgaggtgccagtggcccagtctggaagtgggcactcagcccacctcagccctggggtggcaggggagcacagcccagggtgaagttggccaggggaggtgagggtgcagggcggcgggggaggtgaaggttagcgtgcaggtgagggtggcagggcctggggtaaagttggccaggggaggtggaaatggaggtggaggtggggatggggggtcatgcctgctgtccctcctcactggccttccaggcatgggcgctggctggggagggatggaagcgtgccctgccgggggtgcccctcggactcggtcttgccattcgtgttcgggcctgnnnnnnnnnnnnnnnnnnnnnnnnnnnnnnnnnnnnnnnnnnnnnnnnnnnnnnnnnnnnnnccgctggtccccaggctgtgggaaggaggaggcgagggtcagttggcggccagagttgggcgggagcctcagggctgaagggggccacacaccgagatccggggagctgcaggtgagccaggggccttcgcagtggcgtagtcggccttctgagtcaggcggatctcacgctgcagcctgtggggagtggggcctgagacctctgagcgtgtggcaccctccctgccctgcccgcggccactggctcacctgcaccagcagagggaggctacggagagggcggctgcaccggccacacagaacgccaggatcagcactgcaggagggggcgtgtgagggcggccttctgcagggcgccctgctgcccctgcccacccccgaccaagacctaccaagggcgaggccgtcgccttgccctccccggggctccaggggcgacatgtgcaccgggtcggatgacacaggggagcccakggaggtgtggggcgtgggcgtgggggttcctggagtggaggggaggcccagctccagcccctgcccccgtgccgagaagcccagggtggctgcgagagaggacaggttagaatgagagcactgggctagggacagggccgtggggcaggggaagcgggggtctcaccaggctccgggagccgctgtcggtccttgggtaggggcggagttgagtgtccagactccttccgggcaagctcctgggccaggaagtcaatctcatcttccagtctgggctggggccggcccccgcctggggagggtgaggggccatcaggtggaggggtccgtccaggaggtagccccaggcccggcctccccgcttctggcaggttcctcccaggagcctgaggactgggtacacgcctggaggccctctccctcccagattgccatggtgacagcgcgggcgcttcctgtgaggggcagtgcttcccggaaagtggaggcagggcaagggaggaggygctagggaaacgtccaaagaccgggcacggggaggaaggagtggggtctctcgccccaacccatgtccataaagggctggccagcacagccccttctgcttccccacctccaagcaccttctcgggtagaggggcagggactccccaaggagtggggggaagccgaaggaagccaagcacccgggacccctccccaggtcattgggagaacgggggcagctgtcaggggtggggctggtggcagggctccaccggtacccactgtgggctgcacagtctgggtggacrctcccaggttggcaggaggtgcatccacacagacccttacagccacttctcggtgctcctctcaacacctcctccaggaagccgctgctgctcccacccccagcacctctgagcaaagccctcaccacacctgaagtcactcagtgactggccatcccgacagatgcggctcaggctggcgagcggggcatccccagcacccagccagtgctggcacccttcaacatttgccaacaggcggacaggacagtgagtggtggaaaagagcaagctgcctggggacggggaagtgggggcctggagggcttctgggcagaccctgcagagcccaggcccggggagaatgggcccttcctctcccgtggccatcccagcatttcacatcgtgcagcccttctcctgggagggcctgactgccccaggcctgggcccacctccatttggaaaggatgggaggcttcgtggagagtgaatgaggatctcccaggccttggacccaacaccccacaaggtccaggggccccaagaccacctggcacaggcctgggcattgaggctgcaggctgctgcttttttttttttgaggcggagtctcgctctgccgcccaggctggagtgcagtggcgcgatctcggctcactgcaagctctgcctcccgggttcacgccattctcctgccttagcttcccgagtagctgggactacaggcgcccgccgccacgcccggctaattttgtttttgtatttttagtacagatggggtttcaccgtgttagccaggatggtctcgatctcctgaccttatgatgtgcccgcctcggcctcccaaagtgctgggattacaggcgtgagccactgctcccggccttctttttttttttttttttttgagacagagtctcgcactgtcgcccaggctggagtgcagtggtgaatcggctcactgcaagctccgcctcccgggttaaagcaattctcctgcctcagcctcctgagtagctgggactacaggtgtgtgccaccacacccggctactttgtatttttagtagagacggggtttcaccatgttggccaggctggtcttgaactcctgacctcatgagatccaacagcctgggcctcccacagtgctgggattacaggcatgagccaccgcgcccagccggccgcttcttacagggagaggttcatgcagggacatccccccatcgacttccccctttgctctcgtacctggaggccggcgcatcctgggcacacagagcccttgctggtcctcctggaagggctgaaggcagggcccacaggcatgtgcaccaggaggacaccttgcccgcctcttcagggcacagtccaggctcccgggacaggcggctacatctgggaaggaagcagaaggcagggccggctcacggccccgcagggctcggcccctgcacacggcagcgctgccccagccacccgcccccgtcaccccccgagctggccgggcctggttctggccattgttctggacatgcccttcctccctgacgccagggctcagaacccggaagcgaacagtcctaggacttatcagaactaccctgccccacccctccccagggtccacttccaggcctgatagagccctcagctcagaagctgagcctcaccgtccaggcagtgctgagttctcctgggcagggccgtgcagccccacaagcccagcctccggcctcaacatgccccacagcaagccaggaaccccgtccagattgggagtcccagagggaagggcccaggtctgtctctggggagcagcaaacgatgccgccagcgacctctccttcccgtgcggctctccccagaacccggcactgacaagtgtgcagcctggaagggatgctgctcctccagcctctggcttgtcccccaggcaccgaggacacctaagatggagtctgctgacctcactggcctcagacacagaacccaggcaggtcactcccaaagccaccacaccaggggctgcagtcaggggccaggtggcacccgagggcctcaggaggccgaggttggcagtgctggggatggcaggccaggccctagttccctagttcctaaccacactttcatctcgctgatgaggggcccaggccacggtgccagctgacacatgtggctaatcagtcttatcctggtgctggagaacggggcgagggggcaatggccctctgcctcagtttcccctctgggatatagctgagttgcctcaaagctaaggaatgtccccagtcacagcaagccagtggagccaggggaaccccagcagggccatcaaccctgcctggggagtctgcggtggcacctctggctaaccaggactcttcctctctgcccagccccacactgcacactgcaggcagggccacgggggccacacggggcatcatccttctccagaccttggttggctggcttggtttccttggtaacctgacactcagggccctcaggctgtccgccttccttcaaggcagttccagcagccgcrgtggcaggtgggcacaggagccaacgccaggcaccgcacaccctccacaacctggggcagcagcctccagtatcagtgggccgggacttgggcacgttaaacattaaacctstgccagcaggtccacctgggcccacccgccaacttggcacctggggagtgaggcagtccccgctcctgtgctgataccccaccgtccaccacgccaaaggcaggggcctgaggtacaaagctggctctagggtctgggttccaggcccctcctagcccttttccccagcccaggagcctccatcccccacttcctcctcctgaaaagaggtcgcaggaacaagagcagctggacggtggctggcacacccccctccacccgccaacgtctgggctgcctgagggccctcccttccaagcactgggcactgggaatgggaggagttgcctagggagggccctgccaggtctcccggtgaggcagacacgaagctgcagaggccggtgaactgaggactggcaccygccacccacccgggctcagcacagcagctgcagccccgtttcctgaataggtggcctccgcctttcctggctgagcacactctgattctcggaagcctctcctgttcatgcccacctcccatccaggggcactgagcccaggaggaagccggcctcactctggccccttgaggccacacacacagaaccaggctgcccaggacagcgcctcagctgtgccacaatccacttaacttctccatgcctcggattccttgcctgtaaaacgggctcacagcacctcttctgcagggctgccaggagtactgtacgaatgcagtcgcaaagtctcccagttcagtccccccagaaaaacgtcagctttgcatcctgggttcctgcagggagctctgctctctggaccctcaggacccatctgtgcaggtgagagggtgtcccaggaccctgggcttatcaccctcctccggagtccacctgcagccctcagtcccaaagacagaatgccagtgccctcgagggcaggggatgcaggcggaggctctgaggctgcaacagtctccctcctattgaagctagaacagcaccccgagcctgcgccataagtgcccccagaacttcagcgcccaccatggcgcacaaggccggtgcccagcgccacccaaggcgtgaggacaggcagagcagcactgaggccccgaccccgggacgcgcaccggcagcgaagccggcgggcactcagggccagccccacacccgcaggagccccgaacacggagacacagagacgcacacaggcagactcccggcgggcccgcccagagccagatggccgcggcgcggaggcctgagccagacgcgctcccggcggaagaagccatgaatgtaaggtacgcctctgggaaccggcagaagccccatccggcgcggccttttggaggctccgcgctgcgccctccggccaggcctgtttattccatcgtgggcgaggcggggccsccgccaccagcggaccaggcctgcagggcctgcgggcctgggcaggacgagggcggcggcgcccggcaacccggtccccgcccggcgatcccggccccggggcgccccgcggcctgcgcccagcgcgctcgctcacccgggtggccggcggcggctccacgcagggcggcgccgaggacgaggccggagagcagcagccgcagcagccgcaggtgccgcggggagggcggaggcagcggcgtcgccatccttcagcgccgccgccggggcagcatggcaccgcgaggccaggggctcggcgcgggctccgggctccgcgtcgggagcagcggaggcagcgggggaggacgcaggaggaagaagaggcggatgccaaggaggaggaggaggaagaggaaaggcacgggcggcggcgctgacgctgcagcaaggatccgggatggaggcgccggcgaggcgcgcacgcggagactgcgcctgcgcgctccacctgagggggcgggagggcggctccagactgcgccccctccccctgctccagttctggtcccctctccgggcctcgctggacctctctcggcctcagggtgtctcggcacctgcggtctctggggccggtgcggttcccagaagtccggctgggtttgggccgcgggtgggcttctccaggatgcgctcccttctggcctcttcccggtaggactccgagcccctcacccgcacccgcgatggggcagaggacctgtgtgggcctagcctcgcgagcgcacagagacacaggagcgccgggcgcacgcagacaggtgctcacgagctgggcaggtgcacaggaaggcacaggtgtgcccacagaggcaggggcacccccactcgcgggaaaagcaaatacaggaacacagaacggccccggccccgactgcagctttggctggagccgcggcggccgcgctcagtgaggccaccagggggcaagagtgatccggagccactgaggaccggagctgggagctgtccaaggtgttcagggtccccaggtgacagccctttagctccctcaggacaatgggcatcttttttttttttctttgagacagcgtctctgtcgcctagcctggagtgcagtggtgccatttcggcccactgcaacctccacctctcgggttcaagtgattctcgtgcctctgcctcctgagtagctgggattacaggcgcgtgccaccatgctgggctaatttttgtattcttagtacagacggggtttcaccatgttgcctcagctggtcttgaactcctgacctcaggtgatacgccagcctcagcctcccaaagtgctgggattacaggcgtgagccactgtgcccagctgacaacgggcatctctgatgccccccttgcacctcacctgttgcctcccaagagcacgcccaccccatcccactagaaacctcctttgactagtcattcagagaacaagagtgagacctccaacccggggtgtccccttggtccttccagtctcagaactccaaagctggggctggctgccctcaggtttatcaaatgactttaaaaaaaaatggtgaagaggggagggaagagcagaataagaaccaccaccctcctcgccagggcactgagcatagagacagtgtctaagctcacttcccaggaaggtgaggaggcgagtgggcaagaccaggccttcccatcctggagaaaactggcttggggaggggctgcagggcctggctggggctgcaggatgccttttggaggtgcaggacactcagtcccaggtgagaagggcaaggtgccctgtgccattgcatggctcagctccacagccaggttctgtgcaagattcctgcctatgggtcctggtcctgatctcatctcccacccctgtgccacctcctgatgtgggcctgccctcccgccagtctctaccagcactgactgccccctaggaagccgcctggctggctgccacccactctccgccacctccctgacctctaccctcacccccaggctcactgtaccaggacccaaccttcagtctggccttggtcaccaacgcagatctggatgtgatggttttggggaactctgctggccagagaagactcaagggcccaggaacattccctcgggccagccatcctgcagctactctaggctgccacggcacaccagggcagcagccagtgccccaggcctggctccagagcagaaggcagtagggagggatggtgtccaccctcaggaccaagggcaggcccgtgcggctagaacagcgggaaggtgggggcacaggccacagcaaggatgccccaccccacagacactctcctttcacgtctctaggaaaaactttttattacaaaatttttacaagtaggtgctgggctggctgccagcccgtgggctgtgaccctccccagtacagacccagactacacagaaggagcctctaagggctgattctcaggaccaaggccccactctctggagacccagccctgaggaggaggaggaggagcacggggcctgcagtgatgcccaggctgaagcgggctggaggggttcaaggagctggattgagcgctctttgcccacccaggctcctgtgggtaccagagtctcagttcctatttcctgggctgccttaggggcagagacgctgagggtggggtggaaggatggagaagacagtggtggggtggagcggtgggggatagagggtgggtggaggaatgcaggatacaggggcggggagagaggttgggagaggggtgggtggaggggtggggatacaggggtgggaggtacaggggttgtgggaggggtgggagtacggggtggggatacaggggttgggggagggatggggcagctgcccccgtcggcccctaaatggtgcttggcagcttggcggagtgcacctgacgcagcagcaggacaagcgcagccaggagcgcggaggcgaagagcagcaggaggacgacccaggagctgaagtctgtgcccttgcgcagccccggcgggtcggcggggatcaggttggtcaggttcagcatgtagccgagcgcccagcccactgcagtgtccgcggcctgcggggaagggcgtggcctcagctcccgagaggccccgccccgcaaggtcggccccgccccgccccgccccagcccaccttcttctggaagatcacgccgccgaaggcgcgctcatcgaagccgtagccgcgactcagcagctgctgcacgaacatggccccggcgcagtagtcggccaggcgggcccgttgccctggcacccgagcttgcagctgggacgcgggcgggacaccatcaggcaggcgaccaccaggaggtctcggccccacggggagagggggccggcggcgtgcttcacccctccccagacacacacgggccgtgcgaggccagagaccaccacacaggcccggacacgaatggcaagaccgagtccgaggggcacccccggcagggcacgcttccatccctccccagccagcgcccatgcctggaaggccagtgaggagggacagcaggcatggccaccagggagcaggaggcagcaacaccttggtgtgtggccaggggaacaggacgagctccaggcctgagtctgcccgctggctcgccgcctgtccccacctccctcaccccagtctgtctgagactaggccctgggaggacaaaatggggcctcgctcaccaccccggtcctgggacgactcgtacgtttctcttggagtctccggtgggcacactcccggtgcccagacccacttccatcttcccttgtgtggtaccatggagggaaccagtggcagaagccagaaacctgggcaccggcctccccctgccctccagatctgggatgagggtcgggcctggcgaagcttctccaacccgcccgacttgttcacagcctaccggccacagccacgccacctctggagtcagcctaatgcctgccatcgcccccactgcagcgggtgctccgagaggcctgtccatgcagggctggggaggcatgcggaggcggaggctgagcccttccgcacagccctgaaggagtgggagcggggctcacctgagcccaggtctggttgcagacattcactgcggctgcctccagctgctgcagggtggccacgggcagccccatcgaagtccgcaaaaagtccacagtgtagaagaaggcagagaaggcctgtagggggcgcagtcacactgtgaccgaaccccagcggctcagagcacctgccgccacccgcctgcccctactcacgacaaagttcccagccacccgcctgcccctacccacgacaaagttcccagccacccgcctatccctactcacgacaaagttcccagccacccgcctgtccctacccacgacaaagttcccagccacccgcctgtccctacccacgacaaagttcccagccacccgcctgtccctacccacgacaaagttcccagccacccgcctgcccctactcaccacaaagttcccagccactgggggctggaagaccccattgaaagagcatcgggagaaggggcaggaggagaagctgaagagcccagaaaccagatctcggcagaggtgggggtcactgctccctgacaggctgaccctggcactgctgttgaagttctggggccgctgggccatggtgcatggtgactggtacacatccccgagcagcacttgggtggaaaagcccctcggccagcaggggtggaagccgtgggtctgggggaatcaccagcgtgacagggtggcaccaccaccgctccagaggaccagcctgacaaacctcccacaggtctcactctggcaacttcacttttgtgctcaggggcaatccatggctccccactgcctgcttgacagatcccaacgcccctgaccaggctccctctgagagccgtccctggccctcccttctccaggcccagcccagccactgggcctttgctcatgctctgaccctcccacctgtctttccagccaattaaagcccagcctggagaagccttccacagcacagtggctgtccaggctctgctccaggagggaacagtgcagtgcaggtgagccagggtggaggggcacctggagggcgctggccagcagcctctggaggacctggtcacggccatagcagaggaagctgtgggtgtagactcggtagtgctggccgtagagatgcagctggacctcgctggctctgtcctcagctggactggttgtctcaaaagtgatctgggtagaggcaccccccaggtccatggcccccagtgtccccttccgtggccggaaccaccggcccacccagccgtactgtggagaggggagtgtggggtcaaccaggggccgagggcgcccacgccccctggctctttggctggctgctgggcccaccttgatgaagttctccagcaggtagttggcagtcacccagccaaacaccccctcttcctggcccgagaggatgcgtgcaccccggaagtcaaaggggtactgggtcagtgtgtgagtcactgccatgagcacactggtcgaggcctctggattggtcaggctgcaaaacacagagaactccaagaggccttctccccaggtggctgtgagcctgctgtaggggtgctcggagtccgccctgcaaggggtcacagccaaaggccatcatggggacagggccagggcacaggcacactcacttgagcaggcgcatacccgctgtggctcccaggtagaggggtgtgcccgcgtgtctctctttgggcacatcctgaagcgcctgttcgaggcatccaacaagactctggctggccccagaagggttgtctgcatagctggagatgcccccacctagagggaggcagagagatgagcctatgcctcacgggcagcccctaggtgggccgtaggccaggagagtgagggtgggggtgggggccgtgggctcccagaccaggtggcacaccttccctgcttaagcccccagaaacgcccaggttggagacaaaggggcccaggtgccacccggagaccaaggctgctgcctgctgagagggtgtgggtgcaggtgctaggacaaagccctgggcatggtcaacccaggttggcctcctgaggcctgcctgggtgtgtccgccaggcccccagacctcctcctgctccatctggggcacagaagccaatactgggcccggcgaggctcaaacctccccacctgctgcctaggcttcctttctagaatgcaaacgactcctggccccactcaggcgcaggggcaccagcctctctctttccagggcttctgcctggagtgagccccacccaacactaagcagaaggacctgcactggctaaggctggagagggtcccagagaccctgcagtgagtgggcgtcctggctgggctgggctgggcctcacctggaacatcacaggagctgtgctggcccacaatgcctgtgtcgttctccttgtctgccggccacttgtagataaacatggacgtgtgtgaagaaccagcgtccaggacgatgccatactgcgggggagggggagggagtcagcctggggtgtccgggggccctgacaccctgacaccaaacgtgaagttgggttcctccagtttgccaccgctcccccccccacccagtcatgtgccaagcctcatgctgaagctcagaggaggccagggcctcctctgaggccgtggttggaaggagaacagggaggtgggggggaggtgactcttccctcctgactacctgaagccagcatgccagggtctgggcagcagccttcctggcaagggcagactgagggactgagtcagggacagagggacagagggtccccagggacttttccctggggcac

SEQ ID NO: 97232 - DNA, 47852 bp, Homo sapiens
gtcatggtagtgggtaaatgttaatgtgatttcttcttctgtaagcatctttcatgaataccagggtcttcgtcattttcatcagtgttaggctgctggcctcctctgtcgctggcttcctcttcaacatctaactgtatgtggttgcgattctaacttagaagagttggagttgatcatgtctttgtgtcaagcatcccacagtctgacagggcgtcactagcagccaccgtgagggagactgtaggcagtaggtaaactcaggggcttcctggcacactattgttttcctcacttaaaatatgaagccagtggcagcaagaggagaggggtgtgcatgcattttaaatgcctcagttctgtagccagaactgtactaaaaagagttttgcttaggtatccacatggttacaaggcagtttaactgactagctaggtttatgaatactgcatcttcaagatcagctggcctctttggaacaataaaagaattagatgacttgaggttacagaataaaattccctgggccgggcgcggtggctcatgcctgtaatcccagcactctgggaggctgaggcgggcggatcacgaggtcaggagatcgagaccatcctggctaacacggtgaaaccccgtctctactgaaaatacaaaaaaaaattagccgggcgaggtggcgggcgcctgtagtcccagctacgctggaggctgaggcaggagaatggcgtgaaccccggggggcggagcctgcagtgagccgagatcgcgccactgcactccagcctgggtgaaagagcaagactccgtctcaaaaaaaaaaaaaaaaaaaaaaagaataaaattccctgtagtggtgacataggtgataggcagttgcattgtttttctcctggtgagtagagaaaaagatcaaaaaaatcagttcaagtcacaagattgttccaaatgaaagtggcatgttgctaaaaagctctcaattagggagcatgaaggttggaatgctccttgtaagtgataatgtttgccataaaaaagctcttagtctaggagagctgcggaataatttttttttttttgagacggagtctcgctctgcccaggcgggagtgcagtggcgcgatctcagctcactgcaagctccgcctcccaggtttacgccattctcctgcctcagcctcccgagtagctgggattacaggcgcccgccaccacgcccggctaattttttgtattttagtagagacggggtttcaccgtgttagccaggatggtctcgatcttctgacctcttgatctgcccgcctcggcctcccaaagtgctgggattacaggtgtgagccaccgtgcccggccacccctgttaaacagcaggtgggattaggacatcccagaatccactgtgagtagaatctcataagattaaacccgggttttttaggaaaaaataatcacatcgattctcgcattttatagacaaaaatacattgcagaaagaggagtggctgcctcgagccactcacctggacactcagttttgctctcacagcagcagccaaggaataaacctctaggcccgtgctctgtgtttaaagcaaacaaaagcttttgaggatgataaggatcttcccggggaaggccatgtcttgagagatgaggtaggaccccagttctggcagcagagtttcaggaggtgcttggaagtttgcgtgttctggccgtggttgcaggtgtcgctgtgtctgctgtggctgtgcagctggtaggacccagtggaagataatgccagtgcacagatcagaggaagatgctctgcctgttctcctttcagtccatataaaatagagctgtgaacattctttgttttcagatgagagcctaaaacctccatgaagcctttgctgctgttcctagtaaatagcttgacttaaaatacattgatcagtgttttcttctttttttttttgagacagtttcactctgtcgcccaggctggagtgttgtggcttgaacaaggctcactgcagcctcaacctccctggctcaagcgatcttcccacctcagcctcccgagtagttgggactacaggcacgcaccaccacgaccggcattttttttttggtgatggggtatcgctgtgtgttgcccaggctggtctcaaactgctgaactcgagtggtcctcctacctcccaaagtgctcggcttacaggtgtgagccactgcacctggccagtgttttcttcttttatctgaatatcagaaagatttccaagagaccaaaataatatacatctgcaaagatgtgtggattggccaggcacggtggctcacgcctgtaatcccagcactttgggaggccgaggcgggtggattatgaggtcaggagatcaagaccatcctggctaacatggtgaaaccccatctctactgaaaagacaaaaaattagcctggcatggtggcaggtgcctgtagtcccagctgctcaggaggctgaggcaggagaatggcatgaacctgggaggcggagcttgcagtgagccgagatcgcaccactgcaccccagtctgggcgacagagcaagactccgtctcaaaaaaaaaaatgtgtggattaaactacagagtcctcccctttggtttaatttttcctttgattggctaaacttatctgtttgttcatgagggtggtgctgacaagaagaaagactgatagaaagaaaagaactttcctaaagatatagtccttgaatttttgccttaagaggccaggttaactattcaagtttgtatctactatgttttatttaaaaactgatggaggtttttgcccctttcttttctgtaagaggtttcttggcaattctgcctgttgttgaaagtgttggaatccagtctgtgccttgtaaagctgctttaagtttcctgggagtttccattccaggcacagttacggctccagttcaaaggtaacatcttgctggtggtcctttcagaccttaagccagtcacagtacaaaaacggagacctatgaagaggtgtgataaaaggcatttagatgaatatatttattttgcagtgctttttaaaaaaatgattgtgtcactttttatttatttatttttttaaaatagagaccgtcttgctctgttgcccaggctggaccgcggtggtataatcatagctcactgcagcctcgaactcatggacacaagtgatcttccttccttaaccccctgagtccctgggactacaggtgtgtgccaccatgtctggctaactttcttcttttgtagagacaaggtcttgctatgttgcccaggctggtctcgacctcctgggctctggcagtccttccaccttgacctcccaaagtgctgggattacaggcatgagccactgcacccagcctattttgcagcttttataactatacttcataatgctctttcatcaaagaaaatggaagaatgaattttaaacttttgtatcccttttgaaatttaaaattaacatgtatggaaagtatgatataaagttttcctttttttttttttttttttgagctagggactcactgtgtcacccaggctgaagggtagtggtgctgtcatagctcacgacagcctcaacctcccaggctgacgcaatcctcctgcctcagcctcctgagtagttgggactacaggtgtgcaccaccatgcctggctgatttttgtattttttgtagaaacgagatccccctgttgctcaggctggcctcgaattcctgggctcaagtggtcctcccgccttggcctcttaaagtgttgggagtacaggcgtaagccaccatatctggccagtttttctttcttaatagaagagttggctcttcctggatctagggatggtttacaggaaaacattgagtatctgtgggtctggtagcatatcacagcagtggtcaggttccgcactgtccctgttgttgtggcgcgggtctgcggcagcaatgggccctgtgagtagaggatcccaggggagggagtggccatctagacatactccatcagctcgcagccaggccatccagggttctcactctgtcccctgccccccagaacagttcctcagggacaggtgttctctgctggggtggggtgtaggggagagagagtccttgggatttaagtgacataaaatcatgttcaatgtttctctttttccttagttttcctgattgcagctaggactttgaatatatggattttatgctgattttctctttttcttttccagctccaattaaggaacagctatatcctgcttccttctgtaagcagcatcgacttgtgcaagggttcagtcatgcagccaccgccccagacggtcccgtctggcatggctgggccacctccagccgggaatcctcggagcgtgttctgggctagcagcccttacaggagacgggctaataataatgcagcagtggctccgacaacttgcccgttgcagccggtcacggatccatttgcttttagtagacaggcgctccaaagtacaccactgggcagttcgtccaaaagcagtccacctgtcttgcaaggcccagcccccgcagggttttctcagcaccccggtttgcttgttcctcacacacatgccagagatagctctcagggaccctgtgagcccctgcctggacctctgacacagcccagagcacatgccagtccgttttctggtgcattgacaccttcagcacctcctgggcctgagatgaacaggagtgcagaggtcggtcccagttcagagcctgaagttcagactctgccatatcttcctcactacattccaggagtggatcctgaaacgtctcatgggggccaccctcatgggaacatgcctgggctcgaccgacccctgagcaggcaaaacccacatgacggtgtggtcaccccagcagcatccccttccctccctcagcctggtctgcagatgccaggacagtgggggccagtgcagggagggccacagccctcggggcaacatcgttcaccctgccctgaaggacctgttcccagcggggtgccttgtgccaccagcgttcctcatttccccaccccgtccatcctacatcagggccctggtcatgagcaacacagccctctggtggctcccccagcagccttgcccagtgacggaagagacgaggtgagccacttgcaaagtggaagccacctggccaataactctgatcctgaaagtacattcaggcaaaatcccagaattgtgaatcactgggcaagcccagagctcaggcagaatccaggagtgaagaatgagcaccggcccgcctctgctcttgtgaaccccctcgcccggggagatagcccagaaaaccgtacgcaccacccactgggggctggggccgggtctggctgtgccccgctagaagcagactcaggagcttcaggagctctggcgatgtttttccaagggggagagacagaaaatgaggagaatctctcatctgaaaaagcaggcttatctggtcaagcggactttgacgatttctgctccagccctgggctaggccgtccgcccgcacctacacacgtgggggcaggcagcctctgccaggcccttctcccaggccccagcaatgaggctgctggtgatgtgtggggtgacacagcgagcacaggggtgccggatgccagcggctcgcagtatgagaatgttgagaacttagaatttgttcagaatcaagaagttctgccaagtgagcccctcaatttggacccttcctccccgagtgaccagttcagatatgggccccttcctgggccagctgtgcccaggcatggtgctgtgtgccacaccggagcccctgatgccacactgcatacagtgcaccctgacagcgtgtcatccagctatagcagcagaagccacggaaggctctcaggctcagccaggccccaggagctggttggcacattcattcagcaagaagttggaaaacccgaggatgaagcttcaggtagtttttttaagcaaatcgattcttctcccgtaggaggtgaaacagacgagaccactgtgagccagaattaccgtggcagcgtgtcccagccctcaaccccgagccccccgaaacctacaggaatatttcagacaagtgcaaatagttctttcgaaccggtaaaatctcacttagttggggtaaaaccatttgaggcagatcgcgccaacgtggttggtgaagtaagggagacctgtgtccgccagaagcagtgcagaccagctgccgccctgcccgatgcttcccctggcaacctggagcagccaccagacaacatggagaccctctgtgcaccccaggtctgtcccctgcctcttaactccaccacggaagctgtgcacatgcttccgcacgcaggggcaccgcccttggatactgtgtatccagcacccgagaagaggccttcagccaggacccaggggcccgtgaagtgtgagagcccagcaacgactctgtgggcgcaaagtgagctgccagattttggaggcaacgtccttctggcccctgcagccccggcgctttatgtgtgtgcaaaacctcagccacctgttgttcagcctccagaagaggcgatgtccgggcagcagtcacggaacccaagctcggcggccccggtgcagagccgaggtggcattggtgcttctgagaaccttgagaatcctcccaaaatgggagaggaggaggcccttcagtcccaggcgagttctggttatgcaagtttattatcctcaccgcccactgagtctctgcagaatcctccagtcttgattgctcagcctgatcacagctataatctggctcagcccattaacttttctgtgtccttatcgaactctcatgagaagaatcagtcctggagagaggctttggtgggggatagacctgcagtcagcagttgggctctcggtggtgattctggggagaacacttctttgtctgggattccaaccagctctgtccttagcttgtctctgcctagcagtgttgcccaaagtaattttccacaaggttctggtgcttccgaaatggtttctaatcagcctgctaatttgctggttcaaccaccatcccagccagttccagagaacttggttccagaaagtcaaaaggatcgtaaggcaggaagtgctcttcccggatttgctaatagccctgctggaagcacaagtgtggtgttagttccacctgcacacggcaccctggtgcctgatggtaataaggcaaaccattccagtcatcaggaagacacttacggarccctagactttaccttaagcaggactttrgaaaatcctgtaaacgtgtacaacccgtcccattctgacagcctcgcttctcagcaaagtgttgccagtcatcccagacaatctgggcctggggcgcctaaccttgacygtttttatcagcaggtcacgaaagatgcccagggccagcctggcctcgaaagagcccagcaggagctggtgccaccccagcaacaggcttctcccccacaactacccaaagccatgttttcrgagctgtcaaatccagaaagtctgcccgcacagggacaggcccagaactcagcacagtcaccagcaagtctggttctggtcgacgcgggtcagcagctgccccctcggcctcctcagtcctctagcgtgtctctggtgtccagtggctccggccaggcagctgtgccgtcagagcagccgtggccacagccagtgcctgcacttgcccccggcccaccgcctcaggacctggccgcctactactactaccggcctttgtacgatgcctaccagcctcagtactctttgccgtacccaccggagcctggcgcagcctccctctattaccaggtaagagtcgagtcgtatgtgtaacccacttttctgtctgtgctttgaccagttgagtctcactcacagtgtattccttagtagtgtttgttcgcttggttccggggtcacccacagtcccgcaggcgtgagaacagtattccagtaacgcttcctgaggacagggctcccggctccagaacctactctcccaagcacaggccacccttagttcacaccacgcgttagcatcttgaattgcttataatacttgcttaggatttgaaccagcctccccagcttatgtgacaaaaagagccctccatttgctgtcacccctgctcctgctggctgtctgcagaaaagttctgtcttgcatgccttgggaagctgggctagcctctggaagcttacgtcagaagcattgggtataaccatagtcctttaaatgcccctggagaataaaaacatggagagaaaatagttttggagcatgagccacacgcatcagctaagcgaggcggagtcccgcaagctgctgtcagcacgtggtggtgcgggcagcggctcggggaccggctgtgctcgtgcagaagattcttctgtgcctctttttcacagggacaccagctcatgagtgacatttgagttaggttccgcataatcctgcagtcgttcgaaaagtgtctgtgtacacatttgatcattatctgcttttcctaccctctaacccagttcaacatacaccgattgggttcaccgattcagtgtcaccccaggtagaaggattgtgtgatagggaattggaaaaccatggtcttgcggtatgtaaggccagttggaaccagacttggggccacacaggaaggccttgcagtcagaagggggcccgccccgaggagcaaggctgccgtggcttgctgggtactgccccggggaatggggctgggcctccyccatgggcctcgagcatcatggtttgtgtgcgtgtgaccaggtgcacacctgacccctcagacctgtgtaggttccagaaggagcccaggcactttttatttccatacaaggacattcagctctgctgggagccctggggtggggctggtgcagagcgacgggaagccgtggcctcacttcgggtcctttgtccggtcctcctgctgcgagccacctccctccgcaggagtgcactcctcccgccgtgcctcttgctgtggtgtccgggtggccaaggatgagtctgttttgctgtgatttcacatttcctgccaggcagcggcagcgtcgaggccttgaggctttgaggcgcttaagcgtgaattctggcgtgtgtccggggcactgcatgtcttcagatcctcatgtgtccacatgggccccgttgggaacaattctgtggccacgaattggttggtgatggggctgaagcctcccgagaataaagcacggtccgcttttagaggctgctcctggctggggctctgttcactgggaccctggttctctgacttaactgaggtggcatctgaagcgggacgcaggggttgttcaaatcatggcatctccacactggacttatcaggaagcagaaacctaacagccccttccagaagtcgccacagccccctggggttgtctgctgacatgctggtgccctgggtccatccagaggtctcctgaacagggccagggctgtgggtcttaggacaccctgctgcctgtgggtgtggctgtgctttggaggtctgtgtggttgtgtatgagggaagggccacgctcagtcctgctggagagcagccatctgcgatgtttctagctcaggctggttgttggacgagcttgctcttggtaggtatctaatgctgcccgccctctgcaatgtttccagctcaggctggctgttggacgagcttgctcttgattggtgtctaatcctgcccaaatgcttcctcccacaggatgtctacagcctctatgagcctcgatacaggccctatgatggtgctgcgtctgcttacgcccagaactaccgctatcccgagcccgagcggcccagctcccgagccagccactcctcggaacggccacctcccaggtgcggccgcgcccaccctggctgcctctctgtcctactcagacccatgtctgtgttgcttgctatggggataacttagtgactcaaaaagttctgtatttctgaagaattgtacaaacttatctaacatatgttgacattttcttggtatggacaaattgtagggtgtgtttttaaatgaaattaaacactgccccaggtggtcattagctgtgctggtcagttagcatttggcgccacccctactggggccagaccctgctcagggctgcagagaagcagcctctgacttgtctgtgagcccctcttgacggggcacgtctgttggtccggccatttgctaatggggtgttcaggctccccagagacacggcagcttttcaccggtctccggaggcctgggaggactggtcacagaggtgacttaattcttagacctgtcaggctggctacagaaagcagggcttgaaagcctgtgtttcctcttctttttttttcttttaaggcaggtctcactctgttgtccaagctggagtgcaatggtgccatcttggctcactgcagccttgacctcctgagcccaagcaatcttcccacttcaacctcccgaggagctgggactacagacatgccccatcaaacccagctaattttgttcattttttttttgtagagacgagggtctcactatgttggccaggctggtctcgaactcctggcctcaagggatcctcctgccctggtctcccaaagtgctaggattacaggcattagccactgcgcccggccagcctatgtttctccttgacattgccgcctctgcttgaaggccagccattcctctgtttgccattacagaagaggggtttggaaagacctgtggcactgtggcttcagctgagtagscctttaagccaggtcagagtcctcctgggccctagagcagaggaggctgttgttgattttcatctccactcagggaggtgcgcagagccctgcgaggggtgggcgtggtcctggccaccgcgctaggctgcgccttccagggccttagctgcacttgctccttgtgagatctgagagagactgtctcacagatagagccttcctgcaaggggatattgcttcttaaacttggtaatagagaaaaagctactcattaatgaagactttgtacctgcacttgtttttgaaaggttcctcgtgcttattagaggtttttaggagcttacctaaagacaaaggctctgtctgtgaacctctgcccacgcagctggccctggtgtactcggctccaagggcatgcactgggcggtgtgcagctggatgttggaggtgctttgtgaagcaggcggcactgtgaggcttcacctctctggaggctgtaattgtgagaaaattcccaggatttgagctactgtgtgtcaccctgtcacctgggaagcggggtttgaagttaagatcatattccgattcaaagccttcyagctccgggtgagggtgagcagacaggtgtttcctagaggccctgagaggcgagagcacggaggagagacagccagggagcattctcactgttccgttttccttctgctgctggccgccctgccaggctcacctaggaaccgattctgagaggccagtggtggctcgtgctacggagaaggcctttcaccagaggcagggtcaggtcaccacaggagtggctttgtcaccagatccgcaggcttactcttccttcctgtgttcggatcctgcggctgccttcagccctggcttgcgcaggctctggggaatcctttctgctccttcccccgctttggttggggagcacacgtctygcatgtttgttcagcctccgtgcttgtgcgtggcatggactcaactctctgggcctggtgtggtcagatccccgcaggcactgcctgtcttagccttgttgtttttgagactgtgttgctcctgatgaatgactggggttggaaaggtcggctgaggacacggcggctccttggaaaccccaagtcagataatttctccagaacctgctgtggccactcaggctgtcggtcagcagggctcgttactgtggctgagcagttggatgtagggggacaagtgggccgggccccatgccacccagcagcagccccgtctcatgcagaggtgctgcgccaaccgagcagccaacctcagcggcgggtgtgcagctcccgtgatgtctcctgaaggggcgtgggaagggtcacgttttaaaaattaaatattgtatgaaaattataaaatgctcttacatcctttcaagagtctttttaggtctcacccttttagccaggctggagtgcagtggtgccgtcatagctcactgtagccttaaaacctgctgggctcaagccatcctcctgcctcagcctcctgcatagctgggactacaggtgtgtgccaccatgcctggctaatttttttactgttttatggagacagggtctcactgtgtttaccaggctggcctttcaagaatcttgaaggtaccagaaggtctgatacttgatcattgtactaacttgtgcttctcctgtagtgagagtcaggatcatggcttggtctacaaaaccagcctttctggggcacgtgtaggaatctgacaccacgtcagctccaggagacctgagggggaggtggggccattagaatcccgctccaggagcacacacacgggctctgacgggggtaccctgcacgggtacagggagtaccaacagccagtggtctggggtcgaggctgtgaaactggcattttaggttggtttgaatggctcagtgagaccgggcactgtgggtcactcctgcaatcccagcactttaggaggctgaggtgggtggatcrcttgaccccaggtgttcgagaccagcctcggcaacatggtgaaaccccatgtctatgaaaaatataaaaaattagccaggtgtggtagcgcgtgcctgtagtcccagctactcagaagctgaggtgggaggattgcttgagcctgggaggtggaggttgtgttaagctgagatcatgtcactgcactccagcctatgcgacagagtgaaacctgtctcaagaaaaaaaaagaaagctcagtccattttgtcctctactgagcataatatcaaaaattctaggacttattttagcattgacttttataggctacagcaatgagaacacaaaaagggtcagttctttttagccgaacggctcttagttattttaccaagatgaatttgaattagccgtatggtgggaaattccacagtctcatccttgctactgttttgaatcttctaattggaatttttgtacaaccaaagtgctttgatgaatgcccattgctttgggaatgatttgtattggctgatgtcacactttaagaaataggtaatttgtgttttaacagcactgtgtgttttttcaggcaaggatatcctgaaggatactatagttccaaaagtggatggagcagtcagagcgattactatgcaagctattactccagccagtacgattatggaggtatgtcaaggaactccaagcagctggccttagcaggtgccttgtgcaaaagacactgatgacatgcagccctggccagccagcacctgctggtgacttccaggaaatgtccccttttattaatctctttatgtttttgcccaaaagccaaaatagttgaaaatactttgtatttggaaataattatattgatatttttcattactaaattacatcttaatcttagcatgagtgcatctttgtcatattggcagatttctctgattttctagtggaacataactagcagttcgagagctgctgtgtccacacgtgccttcgtaaacataaacggatgaaaaggaagtgaaatgaaaaaccatctcctcggtcccaccagccgtgtttcccgcactcctgaccacaggaggcyggcagctgctgcctggggyggtgtggacatgggccaccccaccgggcagcgacctgggtgctccctggcgacgtccagctgcagccacatctgtcctccatgcagtgtgtgcggcacagtggccatgtccccgggaagagcctcctccggtcactcctgccctggctgtggcctctagtgctctgggccctgaatccccttgacaagtatcaaatatcctctttgatatttgcacctgttttaaatataaatttaaaaaagaaaagacatctttagaaaagatgataaaagaccttttaagaactttttcttaatacttgctaaaaacacttgctgaaaatggtatatccagtttgtttagagcccttttaaagtaaccttttaatattgagattatttttgaaaaccttatgagtcacattaaggagaagaaatagtagtaaaatttacagttaggggattaactagtcaaaagcagcaaccgtgaaagagaactggctgggcacagtggctcacacctgtgatcccagcacttagggaggctgaggtgtgggagaagcacttgagcccaggagttcaagaacagcctgcgaaacatagtaagaccccatctctgtttaagaaaagaagaagaaaaaggacttaataaagaaatcttttagcaccttttctaaaaatattttttccttttaatctaaaacacttgtattgagagaaaaatcagccagttgcctttaggtagctagggccctccagatctcatggcttcctggtgtcgtgctggtttccaggaagaagctgggtttctcgaggagtccttggagcatwaagtcctggggtggtgtcgcttctttagtgatatctgaggcatttcttcttttgcatgttactgtattaatcattaattccttgctcacagatccaggtcactgggatcgttaccactacagtgctagagtcagggacccccgcacctatgaccggaggtattggtgtgatgcagagtatgacgcatacaggagagagcactctgccttcggggacaggttggtggagcacccctggggaggcagaggctgggggcagccagggcgcgctagtgcttctctgccctcatgtctgggttttaacaaagagctgtggtagtttgggtgagcatctgcctgatgttttggtccctgtctgaaaggaaggagggagyagaccctcccagggttcccagcttggactgttagaggaraactggcctcagcaagaggactgttcagcacctctgggagcacctgggagattgggctcactctttcycatcgtcccttcttaccggtcgcgccctgcagcccagagaagtgaccacactggagacgcattygcagtacttctctaacgttgcacgtcagagggccctgagtgtygggtgtgctgtgttgtgcctcggccccaggggtctcggtctcagctcctgggcagctgcgtggcacatggggacggggcctccggcactcccattcctctgcctctgtcccccggcttcctctaggcccgagaaacgtgacaacaactggaggtacgatcctcgcttcacggggagttttgacgatgaccccgatccgcacagagacccttatggggaagaggtggaccggcgcagcgtccacagcgagcactcggcacggagcctgcacagcgcacacagcctggccagccgccgcagcagcctcagctcccactcgcamcaggtacgcggcggcgcctcacagacacgcggacggttgtgtttagaaccaccatcctgtttgcaatgtacctaaagttttactgctgtgcctggggaattgattttgcccgtttgctttgttttctaagagtcagatttacagaagccacaatgtggctgccggttcctacgaggccccgcttcctccaggctcctttcacggcgattttgcctacggcacctaccgcagcaatttcagcagtggccccggcttcccagagtatggctaccctgccracaccgtctggcctgccatggagcaaggtgtgtgctcagcaggacagagggataccggctaaccccactggggcggccacccagccyggcatctgaacacgggagtcagggctgggattggaattgtgatgtcctggcctggctctgacccaatccgtccttccgagaagcagggtgtgtcaggacgggccgatgctgtctcttcgattgcagtttggtttaaggcctgagagctgccctgcctgccccgacatgcgttttaaagtgtgactctgaggacagctcatatccaggctctgggcagcccctgatcacatccccatcgcagaccccgtggctcagcaggcgtgcaggagggagctgctcattccccttggagactccgctcctgcagttgtcccgcgtgtcagtcagagttcccttccaggatgctcaaatgctttttcttggcaaattgcagaaatatacgtaaagatataaagttacagaatttaatggtaggctgagtttttttgtttgtttgttttttggtttttttgagatggagtctcactctgtctcccaggctggagtgcagtgatgtgatcttggctcactgcaacttctgcatctcgggttcaaacgattctcctgcctcagcctcctgagtagttgagattacaggtgtttgccaccatgcacagctaatttttgtatttttagtagagatggggttttgccatgttggccargctggtctcaaactcctgacctcaagtgatccatcctcctcggtctcccaaaatgcttggattagagtgtgagtcactgtgcccggccttactttcttaaagtattgtttcagttaacattttttcatttctttttttttaagagacagagtctcactctgtcacccaggctggagtgcagtggcacggtcatggtctctgtctcctgggttcaggtggccctcctgccttggatcctttcaaagtgctgggattacaggcatgcaccactatgcctggctccttattttcttttttgcttgaggtgttttgctgtcctttttgctgggtgctgtgtggtcatcgcagtctgaatttgattttgtgaaaatggaagagctcgggagtgggccaggcctgggaggattacgcaccgtggcaggagcctcagggcggctcatgagggtgttgcgggagctttctcagtgtacaagggaacagctttcatgcttaatgattcagacatttttcttttcctgacgtatgctgaagttctacttttaagtatgatattaaacaattaccgacttttgagttggaagtctgtcgtgataaatctaacctgtgatttaagctgtgtgagcacattgaaaatctaggctcagaagcatcagtgacaagctgattgtttctttttcaatttattttaaatgcagtttcatcaagaccaacttctcctgaaaaattttcagtgcctcatgtctgtgccaggtttggccctggcggtcagcttatcaaagtgattcccaatctgccttcagaaggacagccggccttggtggaggtccacagcatggaggtaatggcacacgcagaagcgtggcgtcactgctctgctgccctggggaactctctgctttgcagtttgtcatcttcaattgtcagaccttgtctctggacatacgtccttggaaaatgtttattcctgtgaattttcaatttgtagggtttttcttctatttgatcatatatttttcctcctagaagtcagtattgtaagcgtctgccttgggtgttcaacgtggtttgattgtatatgcattttctgtcctcgttttggggatgtttgctttattggtgcttttcaatgatagatgcagtgggtgggcccggtgctgcccaggtgaggggggcgggtggggtggacgtgcacggcgctgccgaggtgacgggggctggcatgcgcctcttcctgcagcttctgcaggcttctgtcacatgtattggggttctgcctcagtatttsgggagagaaaatggatttcactacttaaaataaagtttgaaatcatggctgtggtccacacaggccatgttccatgtaacagcctcgacagagccttcacctgctgtggggcggggcaggtgggccatgccatcctctcctctcacgggcagcatccgtgcctgggttggccggcctgccagcagggtggctgcgcactggctgccactgacccacggccctctcctcgtaggccttgctgcagcacacgtctgagcaggaggagatgcgggcgttcccgggacccctggccaagtatgttccttgttgaggcatttctttgtgagcccggccttgcagacatcactgctcactgtgtgttctttctgcagagacgacacccataaggtggatgtcattaattttgcacagaacaaagctatgaaatgtttgcagaatgaaaacttaattgacaaagagtctgcaagtcttctttggaattttatcgttctcttatgcagacaaaatggggtatgtttctttctacttctagagtgtttcttcttgctggtcttcatttcgtcttgggaatgctcagcctcccgaaggagcagggcgggatccgcgtggccagctatgggagcctcgagggcccccttaggaagcacactgtagtggctgggtagggagggagagggaacgtgcggttgggatgggatgaggtttcagcccagccttgccagcctttcgggtagttgtgggtctggctgtgtccagggtggggctttgtgcctgtggtggtccaacgcgtcctcacctgagagccgttgttctccttcctgttcctgttgacccaaacagaccgtggtagggaccgacattgcggagcttctgttacgagaccacagaacagtgtggcttcctgggaagtcgcccaatgaagcaaacctgattgatttcacgaatgaggcagtggagcaggtggaagaggaggagtctggtgaggcccagctctctttcctcactggtggtccggcggctgccgccagctcgctcgagagagagaccgagaggttcagggagctgttgctgtatggccgtaagaaggtgcgcctcctcatcatggcacctggcgcctgcacatgtccactgggtcgggcctggtgcggggttgcagccttcagggagggacgtggccccctcttgggagcatccgcgctgcagtgtggggcttcgggtcttgctgtttcctgaacaatgcctgactcttgtatgccatccttctggaggtgttaatgttggtttccttctaactgtttccagtgttggagacctgcagattaaattttcagttattcgataaatgcacatgttgagcacaggccgtgcccctgctgtgtgtgccaaatctcggatgaaatgtgcatgacacaagttgtggcattctcacaaagtcagactcgagtccacagcccagaagtcattgggagttgggagggcacactgaacctgtcagaggcgcagtgcatggaaaggccatgggcaagagagcagccagtgcgtgtagcgtccagtgactggggtcacagcagcgtggggactggggcaggtggggggcctgagacaggagcctgctctgggacagtggggttggggggtccatagtgactgcagcagtgacactatgtgcacaggaggggctgtctagggtgcatgatgtttgctttggatgtgctaagcaggagagaggccagtctcagaagcatgtgtggccctgaacagcagagacatgggataggctgagagttttctgtccttttatatcatgataaactcagaaagggcatatttgaccagtatttttatttttttatttttaattttttttgagacagggtctcactcttgcccaggctggagtgcagtggcgtgatcacagcttaatgtggcctcgacctcctgggttcaagtgatcctcccatctcagcctcctgagtagctgggactacagctgcatgccaccacgcctggctaactttttttttttttttgtagagacggggtttcaccatgttgccaggctggtctcgaattcctgggctcaagcaatccgcccaccttggcctcccaaagtgctgggattataggcatgagccaccgcgcccggcctgatcagtatgagtctattatggatgttttataactgattgaagtcatgtaacctgttagcttttattaacatctttctctactgtaacgtttttgcctcccagccagaagttctaaattatgccctggatgattttggtgaaaggggaggctgccttactggagtcactctccgtgttgacaggatattcgcggaggcctcctgttagaactggggagttgactcgagcgtgtttcccagtggatggggcggcgtggtgggcagygctgcgtgrttagccctgtttgtgattagcgtgcttgtgttttatgctgaaaatggataaaagcagcaaatatctacaaatacccactaccacagggactttgaaactcaggaaaataatgaatcgctacgtgtctttagtctccaaatggtgaataagtgtgtttttgaggcctttgggttgtttgtgtatctgctgctgcgtgaggacacatggcctgtcttgactcatgtcacgtgagcgccgccgataacccaccaaggtccctgaaatgccttttgcaggatgctttggagtctgcaatgaagaatggcctgtggggtcacgctctgctacttgcaagtaagatggacagccggacacacgcccgagtcatgaccaggtacagtcccacagtggcctggtccagtggcgagccctgctggctccctgtagcacgcggcgtccgcaccctgggggcaggcggcaggcggatctcacttgactgtgctgtgctcccacacgaactcgggcttccttggcctcgaggcttccttgggtcgtgttgtggagagcttaaaaagtttttaattaactgcatggtttttagtacttcatgtaaaatctcagtgaattcctcagtcttcatcttttatagctttttttaaattttgagttttgctctgttgcccaggctgaagtgcaggggcgcgatctcagctcaccgcaacccctgcctcccaggttcaagtgatcctcacgccttggcctcccaagtagttgagaccacaggcacccaccaccacacccagctaattttttgtatttttagtagaggtgggttttgccatgttggccaggccggtctcaaaactcctagcctcaagggatctgcccgccttggccttctgaaagtgctgggattacaggcgtgagccaccatacctggccttatcttttacagctttttttttttttttaatattgagataagaaagaaaaataaaatattgagatgtgtgtactttgcctaagtgaaatataagtctaatcattacatcagagggcttagggctgattttttaaaaaatttattttattactattttatttatttatttttttgagacagagtcttgctctgtcacccaggctagagtgcagtggcacgatcccagctcactgcaacctctgcctcctgggttcaagcgattctcctgcctcagtctcctgagtagctgggattataggtgtgcaccaccacacccggctaatttttgtatttttagtagagatggggtttctccatgttagtctcttaacttctgacctcaggtgatccgcccactttggcctcccaaagtgctgggattacaggcgtgagccatcatgtccggccggcttttttcttttagctgagccagcatggggtctttctgtgtttatgtctgcctaggtttgctaacagcctcccaatcaacgaccctctgcagacagtctaccagctcatgtccggacggatgcctgccgcgtccacggtgagtggcactgcctggtggcttgcacaggctccactgcctgtgtggagtttgctygtgggtgacgctgtcacaggccgtgaggtgcctggtgagcccagctgtgtggaattgaaatggcgctggcttccggggatgaggcttcgttttgtttttcctcatgttagtgctgtggagacgagaaatggggagattggaggccgcacctcgccatggtcttgtccaacttgaacaacaacatggaygtcgagtccaggacgatggctaccatgggcgacactctgggtaggtcaggggtggagatgggcattgggtgtcgcggatggagcgccgaaggcccggttgtctgtggcgttggcagaaatcaccagaacccggccttctcggtccggctggygtctctggtgccttctgtgcgcgtccttgacttctgcaagcgctcccggtcgctgagcccccgccgtgtgtcgtgtcrtctctccgcagcttcaaggggcctcttggatgcggcccacttctgctacctcatggcccaggcgggatttggtgtttacacgaagaaaactacaaagcttgtcttaatcggatccaatcacaggtaaagaaccaagtcagtgtagtcctgtaagttttcctttcaaagtaaaacaaaatccttctcctttagtgaattcagaaatggccagaatcatgtctttatttgtcacgtggtgggacacacttctggatgatttgctccaaggttgactatgccaataattggccattttttccaaatcaaaataattcacttcctctacagtttgccattcttaaagttcgcaaccaacgaagcaatccagaggacggaagcctatgagtacgcccagtccctgggtgccgagacctgccccctgcctagtttccaggtaagcaggtgctgccagcctgcagctgtcatggctgggcaggcactcagtgctaacaagcttttggctacttagattgtttgaattggtatcgaaaaaaatgatgtgagttttttgggggaggatcttgagaagacatttgatctaaaatgctaagaaacaagatcccattgaattgaggctttccgtttgcatttgatttcaattattttcatgagctttttttttaagggagacagggtctcactctgttgcccaggctggagtgcactgttttgatcactcccaggctcaagtgattcacctcagcctccagagtagctgggactacaagcagcactaccatgccacactaattttttttattttttgtagaaaaaaactgtgttgcccagactgatcctaaactcctgggctcaagcagtcatcctctcagcctcccagagtgttgggattacaggcgtgagccaccgcacctagcctgtatgagctttttttttttttttgagaccgagtctcgctctgtcacccagactagagtgcagtggcacgatctccgctcactgcaagctctgctttctgagttcacgccrttctccttcctcagcctcccgagtagctgggactacaggcacccacsaccacgcccggctaattttttgtatttttrgtagagatggggtttcaccgtgttagccaggatggtcttgatctcctgaccttgtgatctgcccacctcagcctcccaaagtgttgggatgacaggcgtgagccaccgcgcccagccgtacgagctatttttaatatttgagggcggtattctctgatgcagtgtgggggtggtgtctataaaacatacatgagaggctgagcatggcggctcatgcctgtaatcccagcactttaggaggccaaggtgggtggattacctaagctcaggaattagagaccagcctgggcaacataataacaccctgtctctacaaaaaaaaaaaaaaaaaaatacaaaaattagccaggcgtggcagcatgcacctgtgttcccagccactcggaggctgaggtgggaggactgcttgagcccaggagattgaggctgcagtgagctgtgattgtgccactgcactccagactgggtgacaaagtgagaccctgtcaaaaaaaataaaaaagaatgaagtatctagagaatgtctgtggagcagcttaagctacacggaaggcagtggtctcagtgccgtgctcttggggcgttgtgactgtgagagccgagtggccccatgaaaggggttggggggaaagcagagtgagtttgctaccagcttagtcgtttactttgctcttgaaatcccttggggaacagggactaggactgtggtcagcgggcgtggtgggtgggagacgatgatgagtgaagtgtccagaagagttcacagctcacagggcgatgctcggatgcaggggagcctcagggcagtacaaggctttgtccatcggcgatgctcggacgcgggggagccgcagggcagcaaggcttctgtcgtttcaggtgtttaagttcatctactcctgccgcctggcggaaatggggctggccacgcaagccttccactactgtgaggccatcgcgaagagcatcctgacgcagccgcacctgtattccccggtgttgatcagccagcttgtgcaggtgctgcccctggcgcctgtcctcgggatgctgtgctgactgcagggaaggagggcttgccagagcccccgggcatgggggtagcgatggttcagacgcgcattgtggtaggcgctcagaacctgcctcttgggcggataaagatctttgaatggcttcgtgttttgcgtcttagcctgggaactctcaggcaccgtgtgccagcacagagccttggcagcgagtttcacaatcagaaggaactacctgtaggatactcttcttttattgagacgcagtctcactctgtcacccaggctggagtgcagtgtggtgcaatctcggctcaatgcaacctccgcctcccagattcaagtgatgctcctgcctcagcctcccaagtagctgggattacaggcgcctgccaccacgcttggccaattttttgtatttttagtagagatggggtttcaccatgttggccaggctggtctcgaactcttgacctcaagtgatgcatgcatctgccttggcctcccaaagtgctgggattacaggcgtgagccaccacgcccggccaggatattcttattttgaggcaatttagtctggtggttgatagcttaagtgtccagagtccagcagcctttgcttgagtcctggctgtactgctgcaggcctcagtttcttcgcctgtaaaacagaggcggcatgactgacgagagtatgggaggcgcccgtgttgcatcaggatcttcacctcttgtcagtagttccatttgtgagaacgtgctcatgggatacccaaaaactgtattagggacatttttagacccatttcaaagttcagagagtcattcatgcatgcgtccttaggtgctcatcccccaccttagtggttacgaacacagggccaaacttgtgttctgccccctctgtcccgctctgcatcccccaaattcccgatgaaagcatgcagacattcctgggggagtccagcttttgctgagtcaggtccacgtggtcaggtggtagtctcgggccaggcctgttccaggggggtgcctagcactgccaacccagtgcccgtgggccaagaggtcgtctacagcaacttcccagtcacccagcgtcccatgtgctgtgtatgtcacctaagcacatactagaaacatataggcagctaattaaactttattgccagtgaacactgaagctgcattgcccggcattttgaagacggctcacttgccatcacccggtggtgacaggggcctttgatttttgcccgtgtctagatggcttcccagttacgactcttygatccccagctgaaagagaagccagaagaggagtccttggccgcacccacgtggctggttcacctgcagcaggtggagcggcagattaaggtacagccttggcttggggtggcacagaggcgtctggcaaggtggcttctgtccctgtcatttccacactgaaagtatgtatctgtaaagacagtgtaactgcaaacgtgtgcctatgagaattccctaattccccagaaagggctttgagtgcctcctgtcctgaagtagggacacagcaagcgcggtggtggcaggcgggcagcgctgcagagcggccacaggcggcttccacagggcaggtcttgttctccctcaggagggggctggagtatggcatcaggatggagccctcccgcagcagtgtcctggcactccgagttccgagatggagcagttggacaggccaggactcagtcagccaggagccctggggatcgccaaccctctgctggcggtgcctgcaccgagccctgagcactcgagcccgagcgtgcggctgctgccctcaggtgagcccaggtgcgcggctgctgccctcagacaagcccctgcttcctgtgggctgagccatggcctgcacccttgcctcctggagaactgctttcagatgtggactgttggaggcagtgtctcacaccacctcggtggttgtggggctcctcggtctcctccctcttcccttcatgcttcctcccctgaggagcccatggaggggaggctcatggctttccatgtccataaatatccatgtgctggcgacactgccctgagcgcccgctgcctgctcagcctccctgcttgtttctccgggagcctcagccgcaccgtgtctgggcggcgccctcggctgtgcccctctgtaacctgcttctcccagtcggccccgtcggtggaagggccagcccagagctccagggagtcaagtccagatgccccctcctctctcgcgcttctcggcttccttcgtcagtgaacctcaccagcgcggcctgcacgcaggtccgcatgcctggatgagcacgggctccttcctgctcgcctcctgcttcttccccagaccctccagactctccatctcacctgaggacaagccagggtcctcacggtggccacaggccctccaagcttggccctgagccctcctgccctcgtgccatgtccactcccacgctgtggaccagccacactcctgatttgggcccactgcccaccctccctgcctgatgtccagtctgcttcgtcctcagacaccgttaccacttcctggttgattgctgtccttagcgctttctcttactcagttcatctgtcccgacccccatgaggacccagcatttcttttgttgttgaagcatccagggcccagcatggtgctggtaggcagcagccctctcaggttttatgttgagtcggaagaatgaaggaatgaacgagtggcctgtgtgacccctggccgtggaggaggggactcgggcctagcagagctctgtgccaggcggccgccatgggcttgcgtgtgggccgggccctggagcccgcgtgccgctgtgactgctcaagtgcccctcccctagaaaaggaagcggatactctgcttttctgcaaaccacggatggtgcggtggggtggtggcttcaggctttctgctctgttggacctcccttataaaagaaatggggctgtacaaaataacttgtcataaacacgtcgagtgtcagctccttccagtaactcaagctaccctcagtaaccccagacctcttctccaccgttcccatgcagctccgcagacgctccctgacggcccattggccagtcctgccagagtgccgatgttcccagtgccactgcccccggggcccctggagccgggtcctggctgtgtgaccccagggcctgcacttggcttcctggagccctccgggcctggcctcccacctggtgtgccacctctgcaggaaaggagacacttgctccaggaagccaggagcccagacccaggtggggctgcagagatgctgtctcgagagcagaagcagcatggggtgtggtgtttgtggggattggtggaagagattgaagttatttgagcttgaaacaacttacattacttgtcttaacgtagaccagaaattctggaagttacagactggatgggttcagagtctcactacaacagcagtgttaatgccagttccttttgtaacttggctttttgttgtgaagcttaaatggccatttggggcagggcatggtggccatgggtctcctggggtctgtctttagacggccctgctggacgcctggtgagatgcacaggggcaggtcatgaactgtctggaactcgatttggtggatcttgtccctggtctgtgcctatgtctacatgtgtgtatatggacaaagcaaaacataggcctagttttaaaaatgaaagagtgtgcacacatgtgggaagatgttcagccttggtttctgcagatcatgctggtgtggcggtagctgggtgggaaggtggtgtgcctgttgatctgtgcgccacacacaygtcccgccttctcgtgactgagatcatagttgctctctttcccgttgacagggatagtgccgcaggaggcgcctgttggaaactcactttccgagctaagcgaagaaaattttgatggaaaatttgctaatctggtactttgtcacattttcttaaactgtttgttttccataaagttcatcgagtgggcacccagactccttgttgagttgtaagatgatggtagtgaggactaygaaattgtttctaaaattgtttcttaaagtgaaagtgcttctaaatagctttcatccttaaaatatgaagagttggtgaaaacactggcagggaaagatggggaagagagaattcagtagtgtaaaaacagttactttaagtagaagaaatacccaaatatcatgaaatccccttattaattttaattcttccaaaatgggtaccttctctgatttctacatctctttttctttttttttttttttgagacagattcttgctctgtcgcccaggcttgagtgcagtggtgcgatctcggctcactgcaacctccacctcctgggttcaagcagttctgtgcctcagcctcacaagtagctgggactacaggtgtgtgccaccatgcccggctagtttttgtatttttagtagagatggggtttcaccatgttggccaggctggtcttaaactcctgacctcatgatctacccgcctcagcctcccaaagtgctgggattacaggtgtgatccaccaagcctggcctttttttttttttttttttttccctaagacatagtttcgctctgtcgcctaggctggaatgcagtggcgccatcttggccactgcaacctccgcctcccaggttcaagtgattctccagcctcagcctcccaagtagctgggactacaggcatgtgccaccatgcctggctaattttttgtattttttggtagagacagggtttcgccatgttggccaggctagtctcgaactcctgacctcaagtgatctgcctgcctcagcctcccaaagtgctgggattaaggtgtgaaccactgcacctggccatctctttttttttttttttttttttttttttttgagatggagtttctctctgtcgcccagcctggagtgcagtggtgcgatcttggctcactgcatcctctgcctcccaggtttaagcaattctctgcctcagcctcctgagtagctgggactacaggcgcccaccaccacacccagctcatttttttttgtatttttagtagagatggggtttcaccatcttggccaggctgatcttgaactcctgacctcatgatccacctgcctcagcctcccaaagtgctgggattacaggcatgagccaccccgcccagcccggccgtctctttttctacagtagaatttcttttctaattttttgatctcacaagaggatgtcctggaattcagtagaatttctaacattgtcactggttttcctgaaagtgagatttatctcattagacatgtttggtataaatacctcctctgtttgctctactcctaaccaggagggatggttgcttttatacagaccgcattctggaaccttctttacagatacccagcccttcacgggcatcccatcagtaggcgattgctatagtttgaacttgcattaggtgttttaccctttaaaatactgtgtccctggaaaagtaaaaatgagggttgagctattaaaaattgggacttgacccaggaataaatatttttaaaaatcattgtatctttgagaacacccatcgcccccctctggccagtcttccctcagtgcatgctcacactccgtttcttccagcccggaatctccatcgaacgccctcatttgcattctgagtgctgagtgctcccagacggagctgcttattaagtgcggctggctcttctctagtcaggccaggtagaggctctgggaggcccagtcagggggctgctctccccagcccccttcctgcctccctctggtcaccagagtcatccggcctctcagtgatgtatttaggaaacacgcctggggaattgcatccccytctctctttcggttcctgtgaggagccccaggagagcctgttctgcatttccttgcgacagaccccctcgaggayggtgccagactcggaggcccccccagggtgggatcgtgccgactcgggtcccacgcagccacctctgtctctctcacccgctcccgaaacaaagagacccggacaggcagccaagaaagaaacgaaggaacctaagaaggtagtacagcctgcccacggtgcgcctggcggccgggagggtttgggcaggaggcacgcttcccagagcgccatcctcttaattcaccacacatgcaaatagcctcctgatacaaacagccgagtgtctacagtgcacacggcatgatgggtgtctgtgtatttgtgccttcagataataggataatagcccacccaggtcagcatggggacacagcccggcccccagaggtcgcctctggccactacctgtcagacccacccgcaagggaccagacggcagccgctgctttgtcactgtggtgtgtgcctgctgccggctcacagatcctttctcccagcygtggactttgggactgctttcagtgtggggctgggatccgtcaggccccaggagcctccttgcctatctattggcgaatgcgcttgtttttcttaggtgcgtgccaaggagctgagggtttagctcgcaggatgagcgtgtgttcagctttaggagacactgctgagcagttgtcctaaatggttggttgccccaagtcacacatcctgcagcagaggacaagggccctggatatccctcatcttcaccaatactgggcagtgccggttctttaacttagccattgtgctggggctgatgacatctcattgtgtcttcctctgcatctccacagcgaggtgtgacgctgggcaccttctcgtgtccctgttaccatctcaccactcttttggggcagtgcttgttcaagtctctatccgttgttttttttttcccccataaagatggggtctcactattgcccaggctggtctcaaactcctgggcccaagtgatcctcctgcctcgtagctgggactgcaggtgtagccaccacacctggctttcctttccatttttaatggtgttctcttcaggacttgcaggagtcctttctgtattatggatataagtcctctgttaggtgtatttattgtgatatcttctcccaatctgtagattgcctttttacttgtaatggttttttgtttgtttgtttgtttgtttgttttgagacagggtctcactctgtcagccaggctggagtgcattggcatgatcttggctcactgcaacctccgcctcccaggttcaagcrattctcctgcctcagcctctccagtagctgggattacaggtgcccaccccactcccagctaattttttgtatttttagtagagatggggtttcaccatgttggccaggctggtctcaaactcctgacctcaagtgatctgcctgccttggcctcccaaagtactgggattacaggtgtgagccaccatgcccggcctagtaatggtattttatgaaaaatatcattcttcattttaataaagttcagtgatcagatttttcttttatggctgctgtcttgaaaataaacacacatttaattccaaatttgtgtgagctctgagataaaacatgatacttgagcaggtttccagtgcataggctatcacaggcctccccgggacagcttgtctggccagtagaactcacagagaaacagaattgagggtgtgtagtagctgctgaggcttctcctctttcttcagtagaagtgaagtgcatcaggccgggcatggcggctcacacctgtcaccccagcactctgggaggccgggcgcagcagctcctgcctgtcaccccagcattctgggagtcagggtgcggcggctcacgcctgtcaccccagcactctgggatgctgaggcgagcagatcatgaggtcaggagttcacgatcagcgtggccaagatggtgaaaccccatctctactaaaaatacaaaaattagccatgcatggtggtgggtgcctgtaatcccagctactcaggaggttgaggcatagaactacttgaacccgggaggcagaggttgcagtgcgccgagatcgcgccattgcactccagcctgggggacagagcgagactctgtctcaraaaactaacaaaccaaaatgaagtgcatcatgtgaagaataaagtaaagtttyctaataaccgaattctccacacatgggaaacacagagggctgtatctgcctccgacacacactgacttggacagcccgccttccacttctcaaaggggaggacgtcggaagctttgtcagtgtttagacgtaaaaagttcctgaaggcacgttactgttctgacctatttaaatgacagtaaaatacacagaacaaaatgcacatttttaccattttctgagtgcacagttctgtggcaccaagtacattcacactgttgtgttgccatcaccaccatccatctccagaactgtctcaccttcccaaacagaaactctgtctccttgaaacgaaacaactcccggttccctcccacctccatcctcctggtgtctctggatctgcttcccacctccatcctcctggtgtctctgtggatctgctccccacctccatcctcctggtgtctctgtggatctgccccccacctccatcctcctggtgtctctgtggatctgcccccgacctccattctcctggtgtctctggatctgctccccacctccatcctcctggtgtctctgtggatctgctccccacctccatcctcctggtgtgtctggatctgctccccacctccatcctggtgtctctatggatctgctccccacctccatcctcctggcgtctctgtggatctgctcccacctccatcctcctggtgtctctgtggatctgccccccacctccatcctcctggtgtctctgtggatctgctcccacctccatcctcctggtgtctctgtggatcgccccccacctccatcctcctggtgtctctgtggatcgccccccacctccatcctcctggtgtctctgtggatctgctccccacctccatcctcctggtgtctctgtggatctgctcccacctccattctcctggtgtctctgtggatctggcgactctggggcctcacagaagtgggtcatgtagaatttgtctttttgccctggcttatttcatggaacataatgttttcaaagttgttctcgtgttttttatatttagggtgaatcctggttctttcgttggctacctggaaagaaaaagacagaagcttatttgccagatgacaagaacaaatcggtgagtgctgtcaaatacgcacgggacgtccgaagaattgtaatgatttttctgtcactttcagagcagacctgagtaggtgtttcctgaagttttgaagtgtcatcattaatcagatgctaattctgtttaggttcagtctgctgaccttttttctttttaaaatcttggcagattgtttgggatgaaaagaaaaaccagtgggtgaatttaaatgagccagaagaggaggtaaattgtcattctagttcctgttgggtgtgaggtgtgagtggagggarcagcctcatgtggccctgtgatatttgggtggctgttgccccttttggagcctcctgactgtgccatcccagtgggtttctgtgcacacagtgggtgtctgaagctgtgtttccctctgcagaagaaagccccgcccccacctccaacctcgatgcccaagactgtgcaagmtgccccgcctgccctcccagggcctcctggagcccccgtgaacatgtactctagaagagcaggtaagggtggccttggagtgggagcttgcttgaacgattaactgtcccagagagagaggccaatgtgtagctgttgtgcgtggggaggaggtggcttcccrcacgtccctgcgtgcttttcctctgacgcagtgagcgcagagcatttggaagctggaggccacctggcgcgttcacctcaatttgcttccctcccctttgcagcaggaaccagagctcgctacgttgacgtcctgaacccaagcgggacccagcggagcgagccggctctcgctcctgcggactttgtcgctccactcgcgccactcccaattccttctaacttgttcgtgccaaccccaggtaggtagcacgagcaccagcccctccaggtcagcccccagtctcctgacctttgatcctctttctrtgagtctctcctaaatctcccgttaaaagaatgacctggccagcatgcagagagcctggggttggtttgtggttttttttttgatttgcctgtttctgcatgagtgtgccgcgtgtgcagtgtgaaactctcttcctctcggagtgtcttcagtgagaccccagggacgttcgggacggaatgatggcctcctcgctctctcatccccagatgcagaagaaccacagcttccagacgggactggcagggaagggcctgcagcagctaggggcctggccaatccagagcctgccccagagcccaaggtgagcgggtacrgtgggaaaggggaaaggtacccagtgaggaggcacctccccatcctgccagacagggccttgccttctgcaagtcagtatccaatgtgtacgtagagtgttccgccttaaacgcctcacacttatgtatggtagagacggaaggtagaatgcagggtgccgggcgggacagagctgtttgggaagacggagatctggggatagtggcggtgatggttgctyagcacggtgaatgtgcttaaaacttaaaaatgattaaagtggcaaattttacagtatgtatattttacaatttttaaaattggaaaaagtaaaattaattactctaagttacagagaaattacctaccgataataaaagttaagtatattttcatccaaaaaaaaaaaacaaaaaacaaatgactcccatgtgaagtagaacagctcagaccagtcgggagtggtggatgatgcctgtaatcccagctctttgggaggctgagctgggcgrgtcacctgaggtcaggagttcgagaccagcctggccaacatggtgaaaccccatctctactaaaaaaaaaacaaaatttacctgggtgtggtggcgggtgcctgtaatcccagctactcagaaggctgaggcagaagaatcgcttggacccaggaggcagaggttgcagtgagctgagattgcgccattgcactccatcccgggcaacagagccagactccatctcaaaaaaaaaaaaaaaaaaaccagctcagactgcactctgtacggtgggacaggcctgggcctaatcctgttctccattcatcagctgtgtaaagcatggggcagtcactcacctgtctaagcctcagttttcccctctgtaaaatgggaataacagtagccccagattgcaagcctgtcatgggcacacacaggcacctggtagagagctgcaggggtctagagycaacagggttgtgcggctggacccacgtgtgaggcacttttcacttctctctgaggagcactttacgtggaagagggcgtttgtaacccaggccagaacagtttcatattttttggcctggtgtgagagacttaaattccctgggatttggttgctgcaattcttcttttcctcggcaggttttaagctctgcagcgtcactccctggctctgaactcccctcctccaggcctgagggttcccagggaggagaggtaaggagtgccgacgccagggccccccgcagcccaggcctccccagcagctcactgtccaggcgcctcttcctttatggaggggcggtactgggtaggaagaggcagtttagaaacaagagcacctcgaaggtggtgttcctgggggaaaaaaaattgcacttgttttaacaaaactgtttgggagctccaggaggggtgcagggggtttgagttgtcgcctcagtcccggtcctctcccttcaacagcacgggaattgtcttgaattgtgaggtgtcaggaggtgaagctggcttaggccgaggctggacttttcctcccagccctcccctaagctaatggttgtttcgggataacagctttacattaagacaggaatcttaagctaacactggcttttttttcccttttgagttatgttgattctaatggcatcacaaagcttttgaaatggaactgacagcttggattggacagtgacgtgcatgttgactttcgtccgtgttttatgtgtgttcttgctgttttgtagctttcgcgctgtagttcaatgagttcattatcacgtgaagtgagccagcattttaatcaggtacctgcggctggtggtcctcactaacatgagagctggcgtgtgccgcctgtgttcctgagcacgcggtgccggttcgccacgtgcgctttgccactaacctcgcccgttgtctccctcagcgtcacgtgaccaagggtacagggttccttttttttttttttttttttttgagacggagtttcgctcttgttgcccaggctggaatgcaatggtgtgatctcagctcaccgccacctccacctcctgggttcaagccatcctcctgtctcggccttcctgagtagctgggattacaggcatgagccaccacgcccagctaattttgtatttttagtagagacggggtttctccatgttggtcaggctggtcccaacctcaggtgatccgcccgcctcagcctcccaaagtgctgagattacagcagtgttcctttaaatggccttaaagggggttttgctgttcagtctccacatacatggggcractggatcgaccctgaggtgtcctagtcaatgagtgggttctgtcattttgctctttccaaattggtttttccaatgacgggcctgggtcgtggcctcgccgagtgagtgtttccccggtcaggatgctctcctttggaaggaagattgctcctttctgatcaagcatgagaacgttggtttgaggccggggcgggtgcagcagtgacctgcggccaatgtgggagggaggtgaacgaacgcttcatcttctgcctgtccaggcaccagctgcagccgtggctcagcagaaaggcttgcagcgacccttccgcctgcaaatgagagccctgggcctcgtgtcatggctggagccttagagctgcagccgtgggcacctcctcaccacctcgcacgctcggtgccacctcagtgctgtgtgcaccttcccattgcatgttccggtgcttaaaacattggctctgcacgttgctttgattttcaccatttttctctgaaccattaaataactaaatccagtgttgcaagaastgtcttggatctgcttctgtagcttatgtaaaagtactgtaaatcccacccagaagcggtgtctgtatctgcacttgaagtgacagctgctgtgcagcgcagccctgctgaggtgacttctctgtgcttctcaggctcctggcgacctccctgctgcagggggccctcccagcggggccatgcccttctacaaccctgctcagctggcacaggtgagtgactcctacctttccctacgagaccctaacacgcccactgacgacctgaccctgctgctcagtgatggcagctttctgccctagatcctctttttctttctttttaaaaaatrtatttatttatttattgagacagggtcttgctctgttgcccaggctggagtgcagtggtgcgatctctgatctcagctcactgcagccataacttcctgggctgaagcaatcctcctgcctcagcctcctgagtagctgggactacaggcatggtcagcacacctggcaaattttttatgttttgtagagacggtctcaccttgttgcctaggctggtcttgaactactaggctcaagcgatcttcccacctcrgcttcccaaggcactgggattacaggcttgagccaccgtgcccagcttctcttttctgaatgaaagttgcacacctactgggtggcagtccacagggcactgtgaggagccaggctgggccctccccggctgccatttctccctttgtgtggacaccaggcccrccgtgctcagctctgcgtggacaccaggcccgccgtgctcccgtgtggagctctgtcgacacgaggccctccgtgctcctgtattcgctttgccttttcctaggttgtagtttgtaaaatgtgcttggctttctacttgtgtatccctcattcagcccccagctctgccacgtctgctattctgttctcctggagcccgtggtctctgagccgagtgtgatctctcctcccttggcccgggcacccgggtctccccggagtgggtcccccagctttggaatcctatgttgctgcctttcttagttactctgtttgtcttggtgacacacatcctctggtagctcttgctttttttgtatgttttttatttctttttcctaatagcttcttgacagaaaggtcccagggtgacttgggagatgcctttcacgtctggagctgcctttctcctccggcctatctggctggctggtagaattcttgggccaaagtcactttcttcagaactgcaagtggccttaggtttcctgctgcctgtggttgctgagaccccagggccgttctgcctgcagcccctttcagggtccgtttccctgggacctggagggcttcaccctcagcccccttgggcctgactgcatgcccttcagctggggagtgttctagaatgtttcctgtggtttccctccctcagcctcgtctctcctcccctctcccttgcctgtggagtatagactggctgccagtgtaggggagctgagcggggtccaaggtctggggcctcttgggattcagccccattgtcaccccagcctgccctcacagcctcacacactcttgactgcaggcttcctgggctggggcccagcactcctgccctggtcctctacaaacgaggccgaggctcccaggaccactgcccccmagctggcccctggctgtcacctgcttttcagcatccagactagtcgattttggtattgtcctgctccctttaccatgtggttagtgcctttacaaaaattccttggctttcccctccatgaggctttgcgagggagcaagagtggatgcctgcattggccagctgtctgcaactgaggtccccgcgtcccatgcagtaggccaggcctggccaccacttgtccctggactctggacagccaggctggctctgcagagcagctccaggtctcatggccctgatgaaaccacggcacctcctggccaccctcacagtaaacattgatggttaaggatacagtgctttcaagggagcccaggacttggcactgacttgtcggtttccagaggcttttggaaacaaaaacgaagccttcagcttgtcagcgccaatggcccgtgtggttcattatgtggaccagcccctgccacgctgcagccgagcactgctcaccctgggggcagkcatgcagaggtcatgctgttgatttcattccaggcctgcgccacctcygggagctcaaggctagggaggattggccagaggaagcacctggtgctgaactaggcttgccctgctgtgaacttgcacttggagccctgacgctgctgttctccccgaagaacccgaccgacctccgcgatctccgtcccgcccccagggagacacagcagtgactcagagctggtcgcacactgtgcctccctcctcaccgcccatcgtaatgaattattttgaaaattaattccaccatcctttcagattctggatggaaagactgaatctttgactcagaattgtttgccgaaaagaatgatgtgactttcttagtcrtttaggatgatttaaggatatagtattcctggtcatttaagaatgttcattcattgargcyggagctgtctctgccacaggagagccacatggtcggtagtaaccagggcctctccaagcccagctgtgagtcactgcccagtgagtcccgcgcttcctttaaggtgctgggagcaaagagagggtgactgaggcagaccccaacccctgctctgcaccatctgggccctcgccgtgtttgaacctggctgaatgagtggagggcgctgtgttctcaatcagcgcctccgaggagccgtggggttccttcggcattagttcacggtttttgagagaggccytagttactgcagtgaatttctttcctgttgcaaagacgcttccagcctcactttactttctgtggcctgatgaggaccatgggtgattttgtgtacccaaagcgctggggactgcccaccgtgtggcccagtcactgggaaggagccccagagagcckgctgtctgacatgatggctcagggtggtcatccaggttgaaaactgaccgtgtgatgtttgatttgggcttcatttcgtgtgtaggagcacggttagactcactgttaaggaagctggatgcacttctctaaaaggctgcactttccgtgagcacttttcgtggtacaatccacatgacccactttctcccctgggggacgttggttcagaggttggtagcacttggggagagtrtcttaacacagtttcttgacagcagctctggaacttagtatttctgccccgagttttgccacactgagactttgagtagctcctggtggactcaaccctgttcaactcagagacgggcctcctctcactgatgcaaagctttaaggcttctctgactgttctgaaactcttcgtattcttgtcaagtctaaagagactgaagaaaagatttaaataytaataaaaatcagtagataatttctgtaggttctgctggaggaatacaaactgtttggtgttttaaatttaagtgtagaaattgtagaatgtggaattagcacagatccttcctggctttctgtttcacttgatcatttagcccagaccacccaggatgttttccaaaatgttccacaggcgtgtcccgctggatccatttgtccttgtcacttggagaaaggccagtccctgtgacggggcagccctctctgtccctcggtcagctcgtgtgaatcctgggacctcttccggtcggctctgcccgctgttytggggtcgactgccacgacttttgattcaagaagcttcctccaggcgggagcggctatttttcctaaatgagaattgttacattgcaaattgttgaataaaatattttgcgctccttcaagcaccttcacctgtggttccctttggtttgctggaagcgagtgagtgcaggtgtccgcaggcctcggcgctgtcctggaccgcacccaggtcctctccggggacctgcacctgcctcgctgggacctgccggactgcggggctgccgggttgggaggggcgtgggagacccgtccgggtccggtgcggcgcagtcctccggccgccaggggccgctgtgggcggggccggggcgcggggcggggaccgggcgcggccccgcggcggcggttgctgggtcccggccgggctgactccgcttctgggcggccgggcctccgcgagtaccgggtcgacttcggagtctgcgagcccagccaggggtgcccgcttcccacccctctccccgagcggcgtccccgtcggggtcgaacctcccccgcgacaggcgcccagccgcctgttcccccaggccttgcctgcggaccgccctgggaacggcgtctgggagccccgaggggctggcgggactcggggcccgggccatgcggcagccgcccccgcccctccgcgaccatccccggcccaagcgggagccgcagcggcgtttctgctcctcgctgcgccggcgaccccggacccggcacccgtgacccctcgcgctgcctgcggcctcgcgccgaggcctgccccgggagagaccgtccatgccgtccaaggcggagaatctgcggccctccgagccggccccgcagccgccggaagggaggacgctccaaggacagcttcccggcgctccgccggcccagcgcgcggggtccccacccgatgctccgggctccgagagccccgcgcttgcctgcagcactccggccacgcccagcggcgaggacccgccagcccgagcagcacccatcgccccgcggccccccgccaggcctcgactggagcgagccctgtccctggacgacaagggctggaggaggaggcgttttcgaggcagccaggaggacctggaagcccggaatgggaccagtccctccaggggctcagtgcagagcgagggccccggggcccccgcccacagctgctccccgccctgcctgagcacctccttgcaggaaatccccaagtcccgcggggtcctgagcagtgagagagggagcccgtcctcggggggtaaccctctctctggggtggccagcagctccccgaacctcccgcacagagacgccgccgtggcggggagctcgcccaggctgcccagcctgctgcccccgcgcccaccgcctgccctgagcctggacatcgcctccgactccctgaggacagcaaacaaggtcgactcggatcttgcagactacaagctccgcgcgcagccgctcctggtgcgggcccacagcagcctgggccccggccggccgcggagccccctggcctgcgacgactgttcccttcgctcggccaaatcctccttcagcctcctggcgcccatccgcagcaaggacgtccgcagcaggtagggcctggcgggtgcagcgcccgcgccgccttcgttgtagtgttcaggctgctggaacctcgtgagaccgttcccatcagcagcgtttaagatgcctaaccggaaagaacgaagcgggtctcccgcagccaccccatctcccagccccaccccacagcagcgcccttcccagaacttttcctgtgcgtttcagaaccattcgtgggcgtgacgttgtgttaaggtagacaggatggcatcctgcatacaattacgtatctggcgctttttcttgtttagtcttgggaaatgtcgtcaatgtatacgatccgcccctttggttgtttttgtttgttactctctctgtcgcccaggctggagtgcagcggcgcgatcccggctcactgcaacctctgcctcctgggttcaagggatcctcctgccgcagcctcctgagaatctgggattacaggcgcccgccaccacacccagctaaattttgtatttttagtaggggcggggtttcgccgtgttggcgaggctggtctcgaactcctggcctcggcctcccaaagtgctgggattcccggcgtgggccactgcgcccggcctgccccctttgtttttttctgcggcaagaggccccagatgtgttgaggctactttcgtttagccacttgctcatgaggaacattttggtgggctccagctgttgctggaaggaactgcagctgaacccatgacctctcccaagcctggtcttgtcttggggtctcagtctgggggcctgtcctgagatgctcccactatgacttggcagagtcacctgcacccttcttttcctccccccaccccactgccatggtgcccaagtcttgtctgtcagccgcggcgggaggcaggacaggtgtgagaagggagaggtgtgaggtggtttctgtgttggtgtcctggggccgttgtaactcatgaccacagactgggaggcttgcaacagcagagctggactctctcccagttctagaggccagaagtctaaaatcaaggtgtggccacgcagcctctctccagaggctcaggggagggtcctcccgctgcctcccgctcctggggccccacttgttccttggcttgtggccgcatgctccagtctctgcctctgtctttatgtggcctcttccctgtctctctgtgttcccctctctttttataaggacaccagtcattgaatttactgcctaccctaaatccagggtggtcttatctcgagatccttaattaaacacgtttgcaaagaccccgtttccgaataaggtcccattccaaggttctggggctctgggagtggacatggctttggggatcactgttcagctcaccacagtccccgaaggtagcctcacttccccgcgtctgtggtgcaccagcaggcaggtgggctcaggcctggagtgagggcccgtgcctggcgcccccaccatactctcctcctgtcatggatggagcaggtgcgatcacatccagggcaagactgctgcttttgttaaaataattcactgcagggcttctcgtaaagagtgagatttcttagtgcatctaaagcatcacattttaaaattagatccggttgacgtagatacacctgttagagaaaaggacagtcgtgtctcaaatttggaccctcaagtcattgttttcaaacaaccaggaaacgagggttgacgtggatcctttaacccagttctgctgcctaacagcttcccatttccagacctccggtctgttctagaataggagtcggcgcactctttctgtcaagggggagacacagacagtggggaccaaagggcgtctgtgtgccagtgagtctattagggacatacattggaacctcgctcttttttctttctctgccgttccacacagtaaaacccattctgagtttgcgggccgcgtgtgcacgggctgggtccgccctgtttgagaatggctgctggcttttgccagtgccttggggctgccagggcgggttagggggcctttccccacccgttccttttgctcggagagctggcccaggctgtggcagccagcctgagcgtcctcatgcagaagctgtgcagtgtcctggccctggatgggggtccgaggcagctctgcccctgcccgtgtctagacacaggaatggctgtgagggccgcccctggcctgctgttactaaccatgctctggacagagctgggcagactgaccacgtggctgctggtgtggacatgatgggcgctgccggcaaaggggccgtgggcctccagcctggtgaccgaggagcccctgctgggcccgggatcacttgacaggggtgcccacaggaatgctctctgtcccgaatgaccactgtgtgaacacagctgtcccgaccgggattgtcgacagttttaggggtgaggtagcgaggttcctccctgctgacatgatttaatcgtgtccagtgaagcttggtgagccgcagccagggttgaagaagttctcgcgggaggtcacaggaatccggcactatgctctcgtgtccccttgcggaagggaaccatgtcagaagacggcgtatccagaaggagccgcacaagtgttacttagagagggagcggggaggacggctggcaagcctagcccacggcgtttctgtatagtcggcgagctgagaacgggttttacatttccaaatggttggaaaaagtcaaaaccattctaatgatgtttcatagtacaagaaaattgtaaaattcagatttcagtgtctgtaaatcaagcgtctcgggcacacggctgcaccccttgtgtccacatcccctggtggctcttgcaccaccgtagcagagcccacggcgacagacactggatgtcccacggagcggcaggcgtgtgcggttgcctcttgacgggttaccagccctcgtggcagaaggtgctgagtgtggggaggggcagggacgttgctgtgccacacggtgtttaaccatctgtgtgcaccgccgtattaaaatctgaaagcatcagcctggacaacgtggcgagaccctgtttctacaaaaataaaaaataaataaataactagccgggcgtggtggcactgcacctggagtcccagctactcgggaggctgaggcaggaggatcacttgagcccgggaggtagaggctgcagggagctgtgttagtgccactgcactccagcctgggcacggagtgagaccctgtccccactagaaaccaaaacaagcaaacccaaaagtgcgtcaaagccacggggtgtcgaggagatggacgcgtttccgtgtggctcgtgtggtctctgtatcttagaccgtcctgcctggtgctggggccaaaggagaaaggaggaggaccagcccctccccgaacagcaccctgtgcccactgccttggcttatagtttgggagctcctctctgtggcttttccaggatcccaccaccaaaaagcccaaaccgtcaccctctcatgcctcttcccgggaggtagggagggggtgtgaacccgctctgggtgtttgtgcaaccaggtcaggccttgtgttcctggagagcagacagcagtgccgcgggggccaggagagtccttgcttggggctgggggcagctcctgacattccatgggttttgctattgtccctggggacctggcccagacccccagggatgtgtcctgtgcctggccctgagcttggggtcctcccgtcacaggagttacctggagggcagcctcctggccagcggggccctgttgggggcggatgagctggcccgctacttcccagaccggaacgtggcactcttcgtggccacctggaacatgcagggccagaaggtgagtggctgtgggtggtgctgggcggggaagggtggggtggtgctggacaaaggcgggtgagggggacggggcagctctgtgcctcatcctggggccaggagggcagagccccgaggtgcaccccactgctaaccgcagtacaggagggtgagagtgggtaaggacccccatcccccagagctcccacctgcacctccctggccacgtggctgcagaaagtaggggagggggttggggcaacgggcctggccgagaatcacctgctcaaggtgagcgggagggcggccagcggggcacgcgtaggggtggctcagggacagggtgggcagcacgggctggggtcatggtgacgggagggtcatacaggggtggtcgttggacagactcgtgcttggagagggaaacaggccgagggccaacgtgaggcgtgtttggtgtgtcagaggctgcctcggagaccgggcagctccctttttggccctggcctcagtttcccctcattcggaggagtcgctggtactcaaggcaccgcagtgggattcacccacaggcgcctgcaggtttcgggaggagccggcccaccacatgctccctccttccaggagctcccgcccagcctggacgagttcctgctccca

SEQ ID NO: 97233 - DNA, 32810 bp, Homo sapiens
  misc_feature (1)...(32810): n = A,T,C or G
ggaaagaaaggtgttcttctcgctagacatgaaccaatttttttgtgaacagacaattaaaatgaattactttatggcaaaagatcaaatgacaaacatgcaagcaaacaagttttagtgtcccatacgtcacacaattaactagatataaaggcagttgtgttgtcatcaaagcaaactactgtatcccattttcatttctgaaatgcacaactgaattattgctatttcctcttgctgaacttgatgaactatgttgacttaaccttatttgctgtttcaaaataagttgttaaataatgttgtaattaaaaaatagaagagtaaaaataattaccaagggtctcctctgtaaccaaaacgaattacagggaaatattaatatagtgtacttcatgtttagacattcatttcacatacacccgtgaaatgaatgtcagatgaattatgaagttttgatgagccacagcatgtttctaaggaatacttcttgcaaaagtttcagtgctggagggagaggctgctggcttctgtggggatcacacccaggtgagtgtgttcaggctgtttgtaattgagtttgcctcaggctaagccagaagctgcctgtagccatgtgtcgtacttgggctgggtgggaaagtcagtcctatctgcagtgaagagaatagaaggtggtggatattgccttgattatgaataaaacagctcaaggtaatacactggttagaagcggacatgtattactggcagaaaaaggaatcaatatgctttttatccatcttcctgactagaaagcaaactagatcatacttaagtgctttgaggtccttggatgaaagatgcttgtaaatacaacaaagttaattacaaggctgtttatggtctgagaaaactggaaacaacctaataatattcaataataaggaaatggttaaggaaatatggcatatctaattgatggaacattatgtagccaataggattacaaagaattgttaatgacatgggaaagtgcttattatgttaagtgaaaaagataagattaacaaaaaaatctcaaatcatatctaatgtgatctcattctgtttaaaacaatataggccaggtgcggtggattatgcctataatctcagcactttgggaggccgaggcaggtggatcacctgaggtcaagatttcgagactagcctggccaacatggtgaaaacccgtttctactaaaaacaaaaaaattagctgggcgtggtagccggcgcctataatcccagctacttgggaggctgaggcaggagaattgcttgaacccgggaagcagaggttgtagtgagctgagatcatgccactgcactgcagcctggatgacagagtgagactccatctcaaaaaaaaaaaaaaaaaaaaaaagaaaagaaaaagaaaaacaaaacagaaacaaaaaacaaaaaacaaaaaacctaatatagagcaggaggggattaacccagcaaaccaagtgcacaatcattacctttaagtgttgtgggtgagtttttgttctcttctgtacatttttttttgtatttttcaagtttcatacaatgagcatataaaaatatattactttcatgaatcatttgacatttgttgaggaattctttgtggctaagtttgtagtcaggtcttgagaggtgacaacgtgctggcagcccttgcagccctcgctcgctctccgcgcctcctcggccttggcgcccactctggccgcgcctgaggagcccctttctgggctggccaaggctagagccggctccctcagcttgcagggaggtggggagggagaggcgcgggcgggaacccgggctgtgcgcggagcttgcgggccagtccgagttccaggtgggcgtggactcagcgggccagcactccgagtggccgaccggcctacaagccacggacagtgaggggcttagcacctgggccagcagctgctgtgctcaatttctcacagggccttaggtgcctccccgcggggcagggcttgggacctgcagcccgccatacctgagcctccccccgcctccgtgggctcctgtgccgcccgagcctccctgatgagcgctgccccctgctccacggcacccagtcccatccaccactcaaggtctgaggagtgcgggcacacgcacaggactggcaggcagctccacctgtggccccggtgcgggatccactgggtgaagccagctgggctcctgagtctggtggggacttggagaacgtttatgtttagctaagagattgtaaatacaccaattggtactgtgtatctagctcaaggtttataaacacaccaatcagcaccctgtatctagctcagggtttgtgaatgcaccaatcgacactgtatctagctactctggtggggacttggaaaacgtttgtgtccacactctgtatctagctaatctagtggggatgtggagaacctttgtgtctagctcagggattgtaaacgcaccaatcagcaccctgtcaaaatgggccaattagctctctgtaaaatggaccaatcggctctctgtaaaatggaccaatcagcaggatgtgggtggggccagataagagaataaaagtaggctgccccagccagcagtggcaacctgctcaggtccctttccacgctgtggaggatttgttcctttgctctttgcaataaatcttggtactgctcgttctttgggtccacgctgcctttatgagctgtaacactcactgcgaaggtctgcagcttcactcctgaagccagggagaccacgaacccatcgggaggaatgaacaactccagaggcgccgccttaagagctataacactcactgcgaaggtccgcggcttcattcttgaagtcggtgagaccaagaacccaccaattccggacacagtttcataaatgttccatacatgcttgagaataatatatattctgtagaagtgagtattctatatttatcatttagataaaacttgttaattgctttacttaaatctattaccctactggtttgttcaggtcaagctatctaaattactgggggagtgtataaaaatacatcataatctgatagtggattttgtctatttcttcttgtagtttaatcagtgaaacaatgctatcaggtacctacaaattagcattgttacattttccgtgtgaattgagcctttaatcagtgttaaaacacttatttttaaatttctaataaagctttttaatttttaacattcatgtttgctttttgttacattttgcctataaatttcaccctttttgtatctgtgttttagatgtatcttttgtaaaaacatgcatatagatagttctccatttacagtgggattacatcctgacaaatccatcataagtggaaaatactgtaagttgaaaacttcagagtattagctatttaccctcatgattgtgtggcagactgggaactatggctggctgccactgcccagcatctcaagagagtagggtactgcatatcgctagcccaggaaataatgcaaattcaaaatttgaggtacagtttctactgaattcatattgctttcacaccatagtaatgtaaaaaaattgcaagtgtggggcggggcgggccatggggcgggcggaggcgcccgagccccgcttcccccgcgccattccacccccggccaggctcagcccgcggccacctacgccccgcccctgccggctgcgcccgagcccagtcccgcgagccgctccccggcgggctggctcttggccccggaagcgcgagcgttcacttcgcggcgagtggctccgtctccgcggacagagcgcgcgccccctggcccggcccgcgggggggggctccggcacggtccccgagcgtttcccgccgggtggagcgggccgagcccagcaggttgaccagccccgcggccacgcagagccgggagatctactgtttgagcgcggaagcgcagaggctggcggaggcccggctcgccgcaaaacgggaggcccgcgcggaggctcgtgagatccccatgaaggagctggagcggcagcagaaggaggtagaagagagaccagaaaaatattttactgagaaggggtctcgtaacatgctgggcccgtctgcagccacgctggcctttctgggtgggacttcctctcagagaggcagcggagacacctctatatccatcgacaccgaggcgtccatcagggaaatcaaggactctctagcagaagttgaagagaaatgtaagaaggctatgttttccaatgctcagttagacaatgaaaacacaaacttcatttaccaagttgacaccctgaaagatatgttgctggagattgaagaacagctggctgaatataggcggcagtacgaagagaaaaacaaataatttgaaagggaaaaacacgcccacagtatactgcagtttcagtttgctgaagtcaaggaggccctgaagcaaacagaggaaatgctcgagaaacatggaataatcctaaattcagaaatagttaccaatggagagacttccgacactctcagtaatgtttgataccaagatcctaccaagatgacgaaagaagagttaaatgccctcaagtcgacaggggatgggaccctaggaaagccagtgaggtggaggtgaagaatgaaatcgtggcgaatgtggggaaaagagaaatcttgcacaatactgagaaagaacaacacacagaggacacagtgaaggattgtgtggacatagaggtattcactgctggtgagaataccgaggaccagaaatcctctgaagacactgccccattcctaggaaccttagcaggtgctacctatgaggaacaggttcaaagccaaattcttgagagcgcttctctccctgaaaacacagcacaggttgagtcaaatgaggtcatgggtgcaccagatgacaggaccagaactccccttgagccatccaactgttggagtgacttagatggtgggagccacacagagaatgtgggagaggcagcggtgactcaggttggagagcaggcagacacagtggcctcatgtcctttagggcatagtgatgacacagtttatcatgatgacagatgtatggtagaggtcccccaacagttagagacaagcatagggcatagtttagagaaagaattcaccaaccaggaagcagctgagcccaaggaggttccagtgcagagtacagaagcaggtagggatcacaacgaagaagagggtgaagaaaaaggattaagggatgagaaaccaatcaagacagaagttcctggttctccagcaggaactgagagcaagggtcaggaggcgacaggtccaagtacagtagacactcaaagtgaaccctcagatatgaaagagccagatgaagaaaagaatgaccaacagggagaggcattggactcattgcagaagagaaagaacaagaaaaagaaaaagaagaggaaaaaatccccagtacccatagaaacccttaaagatgtttaaaaagagttaacttatcagaacacagatttaagtgaaattaaggaagaagagcaggtaaagtctactgacagaaagtcagcagtggaagcccaaaacgaggtgactgaaaatccaaaacagaaaattgcagcagaaagcagtgaaaatgttgattgtccagagaatcctaaaatgaagttggatggaaaacttgaccaagaaggcaatgatgtaaaaacagcagctgaggaggtactagctggtagagacacattagattttgaggatgtcacagttcaatcatcaggcccgagggctggtggtgaagaattagatgaaggtgttgcaaaagataatgctaaaatagctggtgccacttaaagcaatcctgaagaaccagagagcgaagatgcagatcactgcaccgtacccaaaaatgaaagtccctcacaggacattagtgatgcctgtgaagcagaaagtacagagaggtgtgggatgtcagaacatccaagtcagaccatcaggaaagctttagacagcaatagcctaaaaaaccatgacttgttggcaccaggaggagagccgggggacttcaatccagaaagcagagaagataccagaggagggaacgagaagggcaaaagcaaagaagacygtaccatgtcctaagctgaggcaggcggcaggcgtggtgcacargaagtctgagtgtgaggggctcttttctctccactgccaatgtaagtagaatgttctaaattcatagagatgcactgtatgccaatcaccaggtgatctactgctttaagttatagactgttacttgtagatttccatgtaatcattgaggttatcacccagattagaaagacatatttgttatcagtgtacattctaattgagagcatatatccagtagtatcaaacaataatgtctactgtttatagtccacttaataaaaatagaagcatttaccatttgccttaggctgataggaatgtgaatattcttgaccaaatatatcagcatctaattgaaatgaccaaatagcattcttagacttctgtattatgaatataattgatatttaaattaatgtcttgttcatatatgtgtactttcatatttgattttaaaatatacattataacctgtatggtattttatttaaaggagataaaccgccaaatagcaaataggtcactgaaaagatttgcaccttagaacaataatcattttaaggataacaagtaaaggtctgaaagcaygaggggctttatttgccttcacctcatawaagtctttgattttgaaccaatgcttttggatctcattgttgatgatacttgaatttactttgtaggagattttaacttcatgctgatgatgtatcaaattcattttatacaaagtttaaagattttttctggaagtgatacatgtcaaattacatttcctactgcagtatttgagcagggacagtcattttttaaatgtttttggccgggygtggtggctcacgcctgtaatctcagcacgttgggaggccaaggcgggtggatcacctgaggtcagragttcaaggccagcctggccaacatggtgaaaccctgtctctacgaaaaatacaaaaaattggccaggcgtggtggtgggcgcctgtaatcccagccactccggaggctgaggcaggagaatcgcttgaacctgcgaggcggagattgcagtcagccaagatcaagccattgtactccagcctggacaacgagcgaaactctgtctaaaaaacacacacacacacacacacacacacaaaacaatgttttcatgcctgtaaccctagcacattgggaagccaagtttggaggatcgcttgaggccaggagttcaaggctgcagtgagctatgattgcaccactrtactctagcctgggagacagagtgagacmctgtctctaaaaaaaagaaaaagtttttgaaccttaaaattacttctctttgtttgaatttctaatcatcattcaaaagaacagtaaaaaaaggttacttgttcttgtgcaaactacraattagactggagtaggatattttaaagagctgaatcacttttggtattttgttataaatgttttcatttgttatgtcccagtatattcttattggaaaattcttgttttgatctgcctgaagaaaatatctgttttctatataaagaaacatttaaaaataattgtaaagttagatttaattgtaaaatataaaatcacaaaggaatgtaccttatgaatgttgacattttatgaaattatgtagattcatattactgttacaagatagaattgaatgcaaaaagaccaaatcctcattaaaatttgaggaaaacataagtgttattatgtaattgaaataaaaacattttatagttgtaaaaaaaattgcaagtggaaccatcttaagttgggggaccatctatatgtatttaaatctagtctgacaatctttatatttgaaaaacagtttttttagagatagggtctcacctatcactgaggctggagtgcagtggcacaatcaagcttattgcagcctcaaacacctgggctcaagcaatcctcctggctcagcctcctgagtarctaggactataggtgtgccactacaactggatggtgttttaatttttattgtgtagagacagggtcttgctatgttgcccaggctggtctcgaactcctgggttcaagtgattctcccacgttggtttcccaaagtgttgggactataggcatgagccaccacagccwgccctactctctatcttttaactggatcatttactccatttagttttattgtaattactgatatactgatgcaataacattattctatcatgttattttgtgctatttgtcctgactttttcatgagtttttccctcttctttattgccttttttggattgatttttttcccttccattctttgtttctctactagtttggaatttctggagtatcacctaaaagagtagagaaaggtgatatttctatttagcatgcatatttgaacttttcaacatgaaattaatgtctttatttttccccatggaaaaattatcactgttactccctctaaattatattctcttgtcatgtatttatcttttcttttaaccccacaagacataatagtaataagataattactattattattattttgtagaattaatatctttttttttctttgagatggagtctttctctgttgcccaggctggagtgcagtggtgtgatcttggcttactgcaacctctgcctcctgggtttaggtgattctcctgtttcagccttccgagtagctgggattacaggtgtgtgccaccacgtccagctaatttttgtattttttgtagagatggggtttcgccatgttgggcagtctggtctggaactcctgacgtcaggtgatctgcccacctgggcctcccaaagtgttgggattacaggcgtgagccactgtgtccagcctagagttaatatctttacttacctgtttacttctgtatttgctcttcatttctggttaaatatcagctgttatctggatttttttcgttctgccttgagtaaatacttgacccttttccttcagtgagggtctatcaaggacaaactcagttttgtgtttgaaatgtctttgtctgaaatgtctttattcattgagaggatttttttgtagacatagaattctgtggttactttttctcagtatattgataatattcttgccttatggcttctagtcttgttacagagaagtaagctctcagccaaattgtcattactttgaagttaatttgtctttttctttggcgactgttaagattttctcttgtctttgtagctgtgcaatatatctgtgatgtgtttaagtgtgggttcctctttattttattccatgggcttctggagtctgggaactgggtcttcaatcagttctagaatttgactatctttttaaaatattgcttctgacttatgtctcttttcttctggaattctgaatagatattatgttacactatttaatctatctttcatgtctctgaacctctctttaatactttccatttaaaaatctctctgkattatactctggctatttttgcagatccagctctgtgttcactaattatcttctcagatgtatctaattgagtgttatgtctgttcattaaatttttactttcaattattttatttttgatttctataaattcttttttaaatattagctctacattttagaattccttgatttctgacattttggatccttcctttatttctttaartatgttacagatgtgtattttatattctatgcaaatatctgaaatttttcgtggatctcattttgtggtctwttttttttgcactcaaacgccttgatttcctgtgtgttttatgacttttattttattttttattatktatttatttattcatttttttttgagmtagagtcttgctctgttgcccagactgaagtgcagtggcacgatctcagctcactgcaacatccaccttctgggttcaagtgattgtcccacctcagcctcccgagtagctgggattacaggtgcctgccactacacctggctaatttttgtatttttaatagagacagggcttagccatgttggccgggctcgtctcaaactcctgacctcaggtgatccacctgcctyagcctctgaaagtgctgggattatagccatgaactacctcgcctggctgttgtgtgttttatgacttctaaatgagtgcatatactccttggacatttatatacgtcttctttttttattttattttatttgagacgagtctygctctgtcgctaggctggagtgcagtggcgcaatcttggctcactgcaacctccgactccttgttcaaaggattctcctgccgcagcagctagaattacaggcacgtgccaccacgcccagctaattttttgtgtttttagtagagatagggtttctcaccatgtaggccaggatggtctcgatctcctgacttcatgattcgcccacctcgacctccaaaagtgctgggattacaggcgtgagccattgcgcctggcctatagaattcttttaaggcctaagttaaatgtgtgtgcctacagagaacatacgtatttaaatttgccaggttgcagagggcactacctacttaaacaacattacacgaaattcttagcttgagatttttgtattacccaggtagtatgaattcaggctgtaaactcccttgaggatccccttgaggattatctaaaatttcaggggagattgtagttttcctcttttagtcagtgttaaggtttgagaaaggcattttccttgccatttcctatggagtggtacggtgtgggtgaagggagaggggctatttccagttcaacctgacactgacttttaagtcctttggggtcccagctctagttggatggtatattaaactacatacctcggatagaccctggacattgtctcctgtccctgtgaccctataaactgtgaaacaaaagctcaagttcaccaagttccgcaaatgccctcaagttaaaacttgacttctgtccaccttcctttctgggttcctactttcacatagtttttgtcttttgagtatttccaattctttttaagctttggccagaagttttagttgtctgtagttagagtgggtgtctagtgtaccataccactgaaacagaagcctgttacttttacaataataaaaacatatctatgtgggctttttaaaaaaatttttaaatttatttatttacttttttttttgagatggagtctcactctgtcgcccaggctggagtgcagtggcatgatcttggctcactgcaacctctgccacccgggttcaagcgattttcctgcctcagcctcctgagaagctgtgattacaggcgcatgccaccgtgcctggctaaattttgtatttttaggagagacagggtttcaccatgttggtcaggctggtctcaaactcctgagctcaggtgatctgcccaccttggcctcccaaagtgctgggattacaagcatgagccactgcacctggccaaacctatctatgttttagttttttatgattattttatattatcccttccccacacatgaaataacttctttccaagtgacttatgaagttgtcaacttttcataaagccttggaacaaagtgggcagaaaaattataaataaaaagtcttgtctaggacagtacaggtctgtcttattcctaaattagatcagaatcgggttatgccggttttttataacataccattataattgggtatgttaaagaatgtattagagatgcattagaagagcgacctcattataagcctcttcacccatggattccaaggatatcttacaataaacctctgggataccttacgctacagagcaactaaagtccagctttagagcacaagggaaaatgcaggatattgggtcctggaaactacaaaaaccatcaaactctactttagggctaaaactttcttttaatcaatctgtcatatttattgataaattagaaaatgtggctgggtgcagtggctcacacctgtaatcctagcagtttgggaggccgaggtgggtggatcacgaggtcaggagatggagaccattctggctaacacagtgaaaccccgtctctactaaaaatacaaaaattagccgggcgtggtggtgggcgcctgtagtcccagctactcaggaggcggaggcaggagaatggcttgaacccgggagacggaggttgcagtgagccgagattgccccactgcactccagcctgggtgacagagggagactccatctcaaaaaaaaaaaaaaaaaagtacaggttcaaatttcattaaattttttttccatgccccttctctggtggtaggatgataggggatgagtaaaatatcaaagacaactaaaaattcctaaactagatcctcgggtcccaaagaagtgttaaccatggagtgccccaccttctgaggttggtgcttcctggcacaggctcttggaacattctggattgtctgacattccttttactcgctttagaacctaaagatgttgctgggggaaaagggagctagggagagggaaggggaaggatgtgggataaggcataaactatgcttgtgggaaaaaaacaaccagtaatttccttgatggggtttttgcttgactttaaaatgcagtaagcttttaggaagcttgatggagcctgtgtttctaccattagtgctgcatttgtttggcttaagatttcattaagcttcttaaaatggagatacttctggaactcaaatggctactgagcagggaatggcaaatcagtgacacygtaggaagtggagggattttggcaaactagagaacacaccttccacaggggcagccactgctctgctgggcccgctgttcatctgcagggacgtgcatcttgggattatttccaaagtcagaactcagcatttttatgagaaatgtcatgatttttaaggtcttaacaagttatcccacattaaaaaaataataataaaccaggccgggtgcagtggctcacgcctgtaatcccaacattttgggaggctgaggtgggtggatcatgaggtcaggcgttcgagaccattatggccaacrtggtgaaacactgtctctacttaaaatacaaaaattagctgggcatggtggccggcgcctgtaatcccagctactagggaggctgaggcaggagaatcgcttgaacctgggaggcggaggaggttgcagtgaactgagatcgtacccagcctgggcaacagtgcgaggytccgtctcaaaaaaaaccaaaaaacacaaaaacaaaaaacgacagagaaggccaaacaaaacacatctgtgggctggatgccgccatgcccaccggtttgcgacctttgtgttggactcttctgttcaccagacaccctgccctgcgagaatgtatctcatcctttgctggagcaggtttgcaggcacagtggagagaggagagaagaaatgaagggacacttatgcagaaccatgagtggccagagaggaggagaaggagggtgagaggagcaaagaagccatgacaacttcataattctgagtggactgggcagtggccagaaattctggtggtggatatgctgcctttccaacaggtgaatatgaaagaataagtcaaaccctgttcaggacgctgttaattccaaatgtgaactttttgagtcattctttycatgtggaattcaaaggagaatgtaaacaaattttcaggagggacgtgcaatatccctgaaagataacaaagttcktaacacttatttacatacaacattctctagttattgattaaacagatctctacagacttgcatgaggcaacatttcttaggcttgtttgctacaatatctttaaaaatacttgattacacatcactttagcttatttagatggacttttcaccaagctctgaactgggatttcattttgttgcattcatcctgctcacgagacacaggtaggcagcaaatgagattatccctccagtccccatggattggaaatgttcccccttctttatgagctcactgcagtatctccttctccctttccccaaaggacagcctttcctgcctcagggaagaagagagagacagactacagtgatggagacccactagrtgtgcacaagaggctgccatccagtrctggagaggaccgagccgtgatgctggggtttgccatgatgggcttctcagtcctaatgttcttcktgctcggaacaaccattctaaagcmttttatgctcaggtaagaaacagaggaaggaaatctagagtttccaattcagataagatccaggcacagcggtaaaggaggagaggctggctttggtttctcaatctgtgactctctgccatggtctagaaaaagaaaaatacaattcctcttccgctgtcagtgctgggggcagctgggtgtggaggaagaggtggcgagaaggtcaaagatatttccctgcactgcctcctcccatctcataatctatatatacctccaaacacgtaatccacaaattatagtttcttcatttaggtcataaatcctccccttaaaatgttggtattccaagagagagttaaaccttgtatgtgagcacaataaaagttttttgagtctgaattttttgagtttgacagtgtctacctggcacatagtagttgctcaatacatattagtttccttccttttaattaggttctttattcaatatatgtagtgatacagttgacctttgaacaacatgggtttgaacttcgggaatccacttataaatggattttcttctgtgcctgccacccctgagacagtaagatcaatccctcctctttctcctcctcctcagcctactcaacatgaagaggacagggagaggacctttatgatgatccacttccatttagtaaatagtaaacatgttttctcttccttatgattttttttcttcaatttttgttttaagttccggggtacatgtacagaatgtgcaggtttgttacaaaggtaaacgtgtgccatggtggtttgcagcacagatcaacccatcacctgggtattaagcccagcatgcattagctattcttcctgatgctctccctccccctactccactgagaggccccagtgtgtgttgctcccctctaggtgtccatgtgttctcatcattcagctcccacttttaagtgagaacattcagtgtttggttctctgtttctgcattagtttgctgaggataatggcttccagcttcatttcatctatgtccccgcaaatgacatgatcttgttcttccttatgattttctttccttttcttttttctgagacggagtcttgctctgtcgccaggctggagtgcagtggcacgatcttggctcactgcaacctctgcctcccgaattcaagcagttctcctgcctcagcctcctgagtagctgnnnnnnnnnnnnnnnnnnnngccctcgcaccgcgtccatcagccgcgctcactcttatcccgtgcgctaaaccgcgccgccaccaccgtctgtctgcggtcggggccgcggcgcatacccgctcccacggtgctggggcgcatccccgcgccgtagggcccgttgtccaaatcgcccgtccgggtggtcaccaccctcccacttctcccccgccgccccctcactcccccccttccgcccagcgcccccgtgcatcccctccccccccccgtcttccctcccgccccccccctcccccatcctccttccccccttcccccccctgccctgccttgtcccccccccttaccttcacaaccaccatccaaatcccccccattctccccttcacacccccttcccattcccacctctccccaccttccctcccctcacctgtgccacacccttgtcccctccattccccggcgggcgctccaacgacacacccgctcctcactccgcggctcccccccttctcttcccccctcccctcccccgcccccacatgccaacgccgccccccccccgtgctcgacctcccccccccccgccccttgccccactgcctaccaccctgggtgactgagcgagactctgtctcaaaaaaaaaaaaaaaaaaaaaaagagacggggtcttgctctgtgacactggagtgcagtggtgtgatcacagctcattgcagtcttgaactcctgggctcaagcagtcctcccacctcagcttcctgagtcagtgggattacaggcataagctactgtgcctggctattctagcttattttattgtaagaattcagtatataatacatataaacatacaaaatatgtcttaatcaactgtttattggtaaggcttccagtcaacagtaggctattagtagttaagttttttttttttttttttgaagcagggtgtcactctgtcacccaggctgaagtgcagtggttcaatcatggctcactgcagcttcgacctcctgggctcaggcgatcctcctgcctcagcctcccaagtagctgggaccacaggtgtgtgccaccatacttggctaatttttaaattgttggtagagatgggatccccctatgttgcccaggctggtcgtgaactcctaagctcaagtcatccttctaccttggtctcccaaagtgctgggattacaggcatgagccaccatgcctgaccagtagttaaatttttgaggagtcaaaagttatatgcaaattttcgactgcaggtttgggggtgtggtgttggcatccctaacccctgaattgttcaagggtcaactttagttgctacttattaagtatatgctgtatgctcaatacatactatattttatcctacttaaacctacagcagcccatgatggaagtgttattttagttttcattttataaatgagaaagctgaggctcagaaaggccaagtaacttgcccaagttcacatagccggtaaataatatgcctgtcattctgacgtaagacttgcttcttaatacctaaatgatgtttgctgaaatgaggggaatgggggttctgattagggaaggggaggggctatttaattttgtaggatggcccacacaacatgtggtactctggggccaggtcagttcagggtaaaaggaaggcaaggggtgctttttggacattgctttatttttggacagcccttttttttttggacagccaaagagcaacaggaggcccagggggagtggaagaggaaggcctaggagttcagtgagggaaaggggtcataaaaaaggaagagagtggcctacttctgttatttatgattcatctcctgccattcctaggttaccattgttaggggaaagatgtagaagtcaccatttactatagcacacagtgccactgttggaagaattccagaagaagcttctctctggtattagcaccaggagaagctgtgctgctcctgatcaaccagcttactttcatttaatggacgccaggagtcttgtatctggttgtgtttccttcattgctttggctgctaggaaacccagaggcaactttgtagctcggttctcataactacaagggatcttatggtctgcagattacatgtttgtacctcacttttttttaaacttttttttttaagaagtgggatctcactatgttgtccaggctagtctcaaactcctaggctmaagcgattctcttgtcttggctatacctcacttctgacttcattctgtctttttttcctctttttcatttactccttttcctctcatcwtatatatatatatatgcattacatgtctatgtaatttgattgaatgtttgaatgtatgggaatgttgagtaaatgtccgtgtgtgtgcacaggcagatcatttttaaaaatgtgacatatttgggagatggcttgagggtaccttctgcaagctggtaccaaactgttgctcataattaagttttacttttctaagcattcctggaaattatttggttaaattaattaagtgaatgcctaagagtggtgagttctcatctctctcttgccttacatcttgtgccatctcagcgagtagttttgctccataaagggtggtagttaagaagccctgcgtagttcatacctatccccactccctcaacctctcatccctcaatcagatgatggattttgtcacagctgtagccaaatacacacccgatgctattgaaggaacatgcttattttttagccctaaatacatccctggttccacctgaaaggctctgaccggggccttgtgcatgggacagaatgtcccactctattttgaagctttctaaaatctttaaggaaaattcaaatcatactcagttcagtactcggtcaagatttagagagcttaagttctaacagataaaaaagtaactctaaattattatttcaagatgcctagttaaaataaacatataaattaatttagtgaaaaagcaggccagtgctaagtctatgaaataatcttattttccgcttttgtattttcacttgcccagtattttttctttggccatatctagtgatttttataccccagaccttgaggccatgttaaactgcacagtgtgtctcaagtttgttatattaataagggaaaatgattattttggtcaaagagattagtgagagtgcattatgaacctagctaaatattgcttttcgaacattcttacttttttttttttgggacagagtcggcctctgttgccctggctggagtgcagtggcacaatcttggctcactgcaacttctgcctcccgggtttaagcaattctcctgcctcagcctcctatatagctgggattacaggtgccggccaccatgcccagctaatttttgtattttcagtgaagacgtggtttcgccatgttggccaggctggtctcaaactcctggcctcaagtgatctgcccgcctcggcctcccaaagtgctgggattataggcatgagccactgcgcctggccctgcttttcaaacattctgactttagagcttgctaatctaacttattatgtttaaggaaccggtaagtaaacacaggagtccacctatatgtgagtgtgagggtatatgaagagctggtctcatatattcaatcaaagcgtttcctcttcccctcgtttactttgtcttggacttgttttcaaattatttcatacatatacacatgtcctttctcttcaacatcaccacaaggtcttcatggcaggaattttgtctgtcccttctgggatgttttgcatatgtattacatgtgaaaattctcaagaaattttccaagtaaaatttaattcagaccaggagccgtggctcacgcctgtaatcccagcactttgggaggccaaggtgggaggatgacgaggtcaggagttcaaggccagccaggccaatgcggtgaaaccccatctctactaaaaatacaaaaaattagctgggcgtgatggtgcgcacctgtaatcccagctactcaggaggctgaggcaggcgaatcgcttgaaaccagaaggcggaggttgcagtgagccgagattgcaccactccagcctgggcaacaagagcgaaactccatccccccccaaaaaaaattaattcagtacagcacttattaaacatctactcagtgagaagcattctgtttcatgctttgaggaacatacggatgaattggatatagctcttgacctctaggaacttaattgatagcaaaaatatggtaagtattctactgagagattccatgtatgatttgcacttgcctctttggaagtagtgggtatgtggaattgtaccttgttgccagaaaktgtgtaggctatgttgaccaacggccctgtagttagactccttccaaaggcacattttcatcaggacaagccagtgcatcttgagatgatgagcatgagaggtgatgagattcctgagtgagggtgaatcttggtggttacagcattatggtaatgctaacactgtttacactgtggttytccaaatacctgcatcttaaatactattaaagattcctgggcctcaagtcagacctaccaaatcagaatttctggaatgaagccctggaatccacagtttaacaaattcttcattctaacaaactcacagatgattctgaagtttgaaaaccactggtgtagtgagaaatatgccagtagggtcatcagaagtgaggtggaacttggcactttgtggctctttaccccaactctgtgtcttccatgctccctgtttattatgtgcctgctgtaaggatcctgcaccacctcaaaatacacaaatgccttgtacacaaatgccttgggcattgtgtacataagctcataaccacaccaaaatgtagaaygaaattttctartaagtgaagaacattttttttttttcaaattgaagcattcagagagaagaatcgacctgcactgccatccacacagatatcatggacgactggctggactgtgccttcacctgtggtgtgcactgccacggtcaggggaagtacccgtgtcttcaggtgtttgtgaacctcagccatccaggtcagaaagctctcctacattataatgaagaggctgtccagataaatcccaaggtattgtaaagtttaaagagttcttatgacagcaacccttccctgccagactgtccctagcagggtacataaataacccagggctgtctttagggataaatctatttttttggagtgaacatttttatagtgatcaaatcaggataaatgaagctttcttcttggtggagaaatggggtatatagaaaggagagaaattattccaatttcacaacttggtgtctggaatttataggctgagccaatgagtagtcatttgtggggagtctttcttttggagattccactccgcgccatatgacatatgctacagtgtactcacagtctcccttgaatcaagtaatttttcttatcaaataaatgtaaagattatttttattttagtaagttacacaatgggttcatatgatttaacgaattatagaaatgatccctgaaatagtctttcatatgatttaaaatttatatttatacctaactataaaagttgagttgtgttagattagttgacatgttacattttattgtctttaagcatcaatttcaatccgatgacttttgttttctgtttgggatgcaatgatttttaagatttcaaacagttttwggcctttagcacagtacctcaagtacctaatggatatggtaataaacctcaagcttttttgaaaaaagtcaccagctgacagagctcccttctccactggttctgtctcccaggaaccaaagtccaggtggggctccctctctgtgagtctagagcaaaagcctcaacgtgcttttcttcagggtgatattttgctacaggagatcaagacagagacaacagaggcattactaagcgttgaaagctcatagtraggcccaatacatttttgttcaatggacaaacggattcatactgtccaagagtccaagaacctgcatgtagggaggagwcatattccttatgaadttggtcactgactctcctgcaatgtcatataactaagaattctcttccacatccttgcttaatgactggaaatggccatttcactgtggccctccaatcaaccctttcccatgagctatgtaatattttaccaccttctaagattgaaactgcccactaataacttcagcctgaagctatttcataattaraaactgttaagtatttggtattggtgacagtgcctttatctttttccctcttccatattcctagtgcttttacacacctaagtgccaccaagatagaaatgatttgctcaacagtgctctggacataaaagaattcttcgatcacaaaaatggaacccccttttcatgcttctacagtccagccagccaatctgaagatgtcattcttataaaaaagtatgaccaaatggctatcttccactgtttattttggccttcactgactctgctaggtggtgccctgattgttggcatggtgagattaacacaacacctgtccttactgtgtgaaaaatatagcactgtagtcagagatgaggtaggtggaaaagtaccttatatagaacagcatcagttcaaactgtgcaktatgaggaggagcaaaggaagagcagagaaatcttaagacggtggccaaattaaagtgctggccttcagatgtctgtgatttctgcaactgaggacctaattatgcctgtctgcaaactaayaatgtaaaaggtaataattaaagtatcatattttcatgtgggaaaaaatttaaaagcctcattttgtattctatttatttctataaatacatacaaattcaccatcttttctaatcccaatctctttccaaatgagctaaggaagcactgttttttttcctgtatagcaaaatgagttcaagatattctttgcctaatttcagctctagctagaaccagtcaatatggaaataaacaatgagggtatctaatctactgaacactgaaccatcagcctaactctatgcaatatagtcatactaaaatatttctcataaaaaagttcttaacagtttgttcactatacraagacaaaaatctggtagaaaacttaagaaaacatggagctaacatatttattatagtttttttttttttcctttttgagatggagttttgctcgtcgcccaggctggagcacagtggcacagtcttggctcactgtgacctctgcctcctgggttcaagcaattctcttgcttcagcttcctaagtagctgggattacaggtgtgcaccaccacgcccagctaatttttgtatttttagtgtagacagggtttcaccatgttggtcaggctggtcttgagctcctgacctcaggtgatttgcccgccttggcctcccaaagtgctgggaatacaggcatgagccactgcgcttggctttagtttgttctttaccagtctagacagcagaggaaagctgctgcctagaaaattcactaagtttagagttactagtatttagccttgtcatgtaccatgtaatttttctttcagtaacatttttctagttaattaagcttttcataagctcatttcactttgtgcactttctggtgggaaaaatgggccagaaatatgaagaagctatactggattttaacattcatctcagatgatccacatcgtattaggctggtgcaaaagtaattccagtttttgctgttaacttttaatggcgaaaaaccgcaattatttttgcatcaacctaatagaaaagaagtcccacatggatagtcaacaattgtctgtactttaattaatgaatcaaccatggttattaaatgatgtcataaggctctcaacaaatgctttccaggttgattaagccgaatctatgagtggaaaagagattttggtctgattttccaaagtgcctcaaagtatctttaaaattttattatactcaaaaatcttaaattayggacagtggaatgagacatttgaagctacttttgtatgtagatgtaatcaaacaaaaaactgattctaagtcagtttaatcccttttagcaattaatttcgacacatattactaaattagctgaatacagcaatattgacttgatgagtaatgaataatcttggtgttttcctttctagtgtgcaatggtggaaagaacatgtgtctcagagtaggatttatttgactttgtaggccataattacaactttgggcaaataagctaacctgtgtaaacctttcttttctcatctataaaatggggataacccgttctttcacgcagttgttattttatggaataagcaaagtagggcaggtgaaactttagcttagcttctagcatctagtagcagtgctcaaaaatgttagatcatttatttaaaaatctgctaggttataacattcagtgagccttggtacttttcactggacagctggtatagaggctagggatagggagctgcagttcattttccatgcccctacctgagttctcttggctaaatgtgatacgcatttaaggcccagaacctgctgtttaaaaggttgtggtaaactattttgtataccaaagacttctctgtaataaagtatgtaagtacacatgaacatttgatgtgcacgcacattttaaatcatctgcacattgagattctacacttttctcaagggcacatctctattccgtttttgtaaatttgacttctacctaacaatatgcagttgctgggatttttttttcccyaacaaattcaaaactgctaatttaaaatataaagygtgtgtttcaattaccacagttttccatttagataggagctacctgattcattccagcaaagagagagattatccctggagaacaaagtcaattcaaaattatttaaaccatttggcaaataaataaaatttaagtaattatttgcttaattgctcagaaatactaagttgttaatgcctatgtgcattaatggtcaaagaaaagcccacacttaccttttgcaatgtttatgagaactgaaagcaaaaccagtttgcttctagcctaacttcatttctaggttctgatcttcaaacgacttggaaaaaagtctacttacctattgcatatacatacatacattcatacatatatgtatatacatatatttcttaaaatacaagcatataattctttatgcttaaaggaagyaaatatttaaacatacattcctttaatattcatcactttactggggtagaaaaattggcttttaaggtataatagtttcagattttcaatcaagtattcttagtcattactgaaaagaactcaaattcagctaaattttgattattagcaacacyggcttgcttttcaaaaggaatggcaaaagagaattatcacagttttttgcttatgtagtacactaaggattgtttggacacaaaaagtaatttttctttttttttttaataaacagcrtgatgttacagactgcagagttaaagaaaagcagacattgacagtttctgatgagcataaacagtaartgcagtcacaggccaaacttcttgctaggaacagcaagactgggaagaggtcttaaatttagtgatactgttattattctatattctcaatatartaacacatgcatcttgctgtgtcaaatgctttctgggccatcattaaaaggacattaaaaacgtttttcttctaatgaatgcagtataccacaggacttcaattcactgaatgacaaaatatagagaaataaacttgctacaattaatggggccaaaagggtggttcgaatttcttgataaagcttccaggtgaacatctgacgtgttagtagtcttcttttggtagtgccacattccccaaggtattaaaatgttatgctccaaaagggtatattcttttagattttattcaacccaattaggtctgaggactgaatcacactgaaaccattaacttcatttgaaactcaaaacatttttgaaatcagatgaaggccaagttctccaacctctcttaggaacataagttaaattgaacaagggacttttaaaaatgaaataaaaacaaaattaaataaaaatgaaataaatagataatgattttggaaattcatactagaattaagtttagtctaattatattttaatatgaaacaatgaaggttttctgcctccttgccaacctagaaaaattgacaaaaataagaatacctaaaagtatacatggttcttagcataaccacaaaattattatagtgacagattaaataaggttgcagatagattcatagactttaactggctaaaaaaatacatttaaaaaccttttctgtacttacctacatgaggaatggagtatactgttggtagaaaaatcatttacctaactactgtatacgcacaagggactaatttttttcctccactaaaactcttatatgtagttgtgtacaaattaagtcagaaaatttcctcatggctcacacctgtcactttatgctaactagcaaggctggaatattaacatacctaaaatcaagcagaagaaatggcactgcactaataaaaaggaggtgcaaaaccttaagtggaataggtgcatgaagtttatttaaagactaacatcccaacttgggaaactcctaataaattctaaactcttccgaattttagaaccttgatatttctttacaccttttataaaagatgcctcttgactagggctwagcaagcagtgtgtacacaaacagaattgtgtgcaagtatacacacaccaaatgcactaataatgaagaagagagaacaaaatgaatttcaaatgccgaattcggraacctcctcraactattgcctttttcaaatggctggaccaacgattaaacttcagccaagtttttttcttaaggtcttccatatcattaaaaacaasgcatgccaactctgactttataaatctaaaattcagtgatctgcacagtttctgagcttgaagtattgaattgtgactcatctatttttttttcccattttccttctgaggtagagttaccaatccaattttatcaggaccacagatattttgagctaaaccccatgatcttttcatacagtaaaaataatttttatgaaaaaagaaagcaggcttcccaggccatggcacatagatatatttacaatttttaatgtaataattaaaaatggtattgtttatattttaaaaaacagcccagctgtattattctgtcaccaagaattattaattgaggatgctgtcaatgctgaattttatagttcagccttcacaatcccatccatgatgaagagttgattctcttacggtatacaatatactctcacaactttcagccttctcttaaagacatgccccaaatgagcaggatggatataaagaatgtaattcattcaaacaactcctccctgttctgccccctcccctcacattcccctcttctcaaaaacatctgaagtatgaaagttgtctttaaatagtaaaagcaccacaatctattaacaccacatattatctttaaacttaaatattttagtgatgtcttggacatcaaaataatttcttaaggtggactcttgagtatgtgggtccagcccaggtctgcagtttgtgcagacatagaaaaaagaggaactttaaatattcagaaaaagttaacaggctagctttaaaatactgctggaaattaaatttcttcagagttggcaagcatgggctattgatcaaagtatgaattaaacggatttacatcattaagaaaaaacaaatccgtgttattgtgctgtgaaatttccatgatgcctttcaaataggctgctcacaatttttttataattccaaatcactcgatttttgatggaaaaaagaatacagatggactgtgttttacctatgtgaaagtcaccaatccatttaaaataaaatccaagagggcatatacagtctaatcaagtcatcattttcctgattaataagaactacactttacacaaaatactttatcagcagctgttttcatcaaaaaatcaagtcagtttcacagttgaaaaagttacacattaaaatattttacaattcattatatattcaccaggttcccattttctaatgggcttttaatataaagcagaatagaagggaaaatctcaaagttgattactttgacactaagttttacataggacactaagaaccacaaaaagcttaggttctattgtaaaatagcaaccaaattccattcttcttttaaaaatccaattagaaacatcttttttaaaaaaacaaattccacaataagagtaacagatttcaaattaacagtagtctaaaaatcttcaaaataaatggttttgtatagctgagaatatggtagaaagtgaaagcataattttccaacagtcatttcttactacagtgtgtttaaaattatttttattacttttagactttttctcaaaataattattcaaggaaatatttcttaagtggcccaataaaactgtagagccaatagtcagttacaccatattcaaggacaaggatagtcagctatagataggaactgtctaaaccacgagaactgatctctgatactgaagtacccagaagtggctatattatcactgacttgaaacagatcttagtcacccatgtagcatttaattcaatgtttggttctttgcctcatttctttcttaggtcacaatctatagtctttatagaatttgtctacatttcttctaatagaattaatttggttgtagtaacttttgaaaataaatgtaaatggtgaaatcggccatgtggtttgtgcattttaatggtggagaggtcctgggagaaggaggggagacaactatctggactgatagataaaaatgcaaaagtggtataaattttgtgcaaggaggctcacagcatttttggcactcgggtaaaacacagttctctgttaaatcttcagtttctaccatcaaactttcagatttgtaccattttactgagttttcctataatttaaccctgatattgaaaaggctgggatgttagtatgtatcaactgcctatatctaaacaacacaaaatgttaataagttttaataagttatgaaatcttctacaactgcaaaataatctttctggtttcctgcttaaaacagagtttaaattctgcttaactatcgcaagacagtttgcagaagtaagttcccttaatcttcaaatttacttttcttgttggcaatattatatacatgctttagtgaaatacctaaatttccaataattatgccctttaagggatctaaaatagccagatattaagagtattggtattagagtcccttgttcactactcaagacttcaactataggtaacagatttcataaatgaatatttttaaagtgatgctgttttactagagtatacaatgttcactctttataaagttgttttccaataatatgcctaatctaaaaaactgtcaataattattgcacttttttgatgtggcacctggacatctgctaaagctaatttcctaggacattaatcattcatttcaaatacagagtaaaatatcagattctagaatgacgactagcagtagcctctacatcttgggttaatgtttttcaaaatgtttaagaatgtgtcctgtgctcaaatagtatttaataaagttggagagtgagctctgactacttgggaatgagacatatcttaaaatggtttaatgttctactttggagatatggataaatagtttaaaaaggtaaaaagttcatggtttctattcccccatattttaaagtattattcatgagtatacttcagtaaaggggtttaaggaatcaggaagatagtctaaattgtgttaattctggtaactaatttcatatgattgagacattctcaattataaaagagaatggaagacgggagattcacataagaaataaaaggaaagaagatgaagtttttatgttttccttaagtagttatacactggttattggtataaatgggatagtgcctgagcctcatctatagatcaagaagaaagctgaccatgctgctatgaacaataaaaaatttggggtgcaaaacaatgcatgactatgggacagatcatgtaaataaagaatatatattaatgatagtttctataatataaatagcctttaataaaaaaaataatctttttaataacattaatacttctattttctggaaaacatgcatgaaaaatgtattcagttcaattgcagaaggagaaaaaaaatcaacttaaggtgaatactgtacaattctggaataagaactattcctgctcattctttttctatgatttttttttttttttactttgtgggagcccagaatttccctgggaaataagaataagatcctttaaatactgtccagaagaaaaaaaaaaataccaccttataacaggtctcatttgtgactgcttccaaaactgcagataaaacctcaaatcatcaaaaggtttgatttattaaaaagaaaaagtctctggtgaaatctcaagagtcccttccaccccaagcatttttcttcattaaacaagcagtcaaaaacccacttcaaactataaattgaacagcaatggaaaaataagaaattttcattcttttccaatcaatgtaatttaacataaactccagtttacttacacctaatgcaataacagcctttgttgtgtccacatttcaaaacatagaacatttgcaagacaaaaaaaaccatcactttttccttctccatcatttctatatattttggggatttttgttttgttttgttttttaaaaaaagatacaaacaatcttcaaagtttacctttttggacttaaggcataacatgaaattgcgcattattctaaagcttaattttgaaatgaactagtttaagtgctatcaaaccctgtttgcgtttacattatttaaattatatagtattttatttctgttcttgctgtaaattctaatgctgttcatggattgtgcaattcctatgcaatcggtctttgcctgctgagagttattaacagtgcagtgtggaatccagagtgagctttcattttctcagttatcttttcagttcaatgcatgctgtttaattgtgtggaagatccaatccatttttgttgtccagccaccatgatgtgcatcattcatttgtttcatgaaatactccaaagcctcttgctcagttttatctaaggctagggtctttcgaatgtatgcaatgtcatcaaaagattgtagttctggcattccagagccaagcatcattgagaaaagatttatgaagagattggcatgctgtcgaatagctagataagccttgtaacacatctcctgaaacctataagtaataagaacagtttggtcagtttggagcaaatgatgttaataccttcaggtctttgctcaaatgtcacaaaattagagaggctttcgtagacaaagctataaaaaaatagcattcctctctcacttctcttaccaacatcttttgattccctttaccccactagaatgtaaacttcaagagaataaggactttttaaaaactgctttattaccagcacctacaacaatgcctggcatgtcaggagtttaataagtattaaatgtatgaattggttcatactaaatccttttgtgcttaagctagagtcaggactgtgttgtagacaaagcagaattttatagaagattgtaaaaagtactttaaagtctgatatagtctaatgagataccataaggtggtaaaaaagttatgaataaacaaggtgattatggttgactgactttcctcaaagtgtatgaccaaaaaatgtcgtattaagcactatacattatttgtcaatatagaggtggagtccaactatttaaagctcagtaaataaaaacctttaatgtgttatgaagtttaaggattactttctttttaggccttaattagctcaacaaattaaattgtattccctttccattttccttcacagcatcacacaaataaatacaaaaaaaaaaaattaaaatagtttttcactcaacaaactaggcatagaagggacttacctcaaaataataaaagtcatgtgacaaacccacggccaatatcatactgaatggggaaaagctgaaagcactccccctgagaactagaacaagacaaggaagcccacattggcatccaaattggaaaagaggaagtcaaactatagctgtttaccaatgacataatcatatacctagaaaacccaagagttctccaaaaaattcctagatttcagccaggtgtggtggctcatttctataatcccagcactttgggaagccgaggcaggaggatcacccgagattgggagttcaagaccagcctggccaacaaagtgaaaccccatctctactaaaaaatataaaaattagctgagcatggtggtgcatgcctgtaatcccagctacttggaaagctgaggcaggagaattgcttaaacccaggaggtggaggttgcagtgagctgagatcgcaccactacgctctagcctgggggacagagcaagactctgtcttaaaaaagataaaaaaaaagactcctagatttgataaatgaattcagtaaagtctcaggttacaaaatcagtgtacacaaatcagcagcattgctatacaccaacaacaaccaagctgagaatcaaattaagaacacaagcccttttagcttcaaaaaaatacctaggaatgtacttaaccaagggggtgaaagatcttttcaaggaaaactacaaaacactgtcaccatcatttttcacagaattagaaaaaaaaatcctaaaattcatataaaaccgaccaaaaagagtctgaatagccaaagcaagactaagcaaaaagaacaaatctggaggcatcacattactggacttcaaattatac

SEQ ID NO: 97234 - DNA, 15557 bp, Homo sapiens
ggtactataatataatggtaattgatgttcctaatttgggagtgtggaaagatccccaaatgtcttttaagtcatcagagaaagataaaataatatttgatacagcttttcttaaaatttgagataattttaatggcgagttattttatggccctttgtatcttgaaaaattgggaaatcacatatggtttaaaagcgaattatcttaattggaacatgccattaactagaaaacccattatttcagcttgcactctaacagacaatacgtggaaaaggaaacgcggccagggcaaaacatttcctcttcttataaaccttgaactgagtacgtccctcaccaattatagagggtccccttgggcctcagaactttccacaagcgttgaggtctctatggcgatgctcccggctgccgaggcggaaacacaggtgatgaggtggcggcaagcacagtgcaaagagagagaagcagcttcggctgcagcaaaccacgcaggtccttcttgatcatctagaactgaccgctccgccttgccaggagtctgcagaaccacgtggctagcctgcctgaagttctcacctctccaggaaggcggggggcttctaatggctgcagctgcgctgggggctgggggctcccgctgggactccacttccgtggatgtctaagcttcacctttcttgcgcccgcaggggcatgactcaggtgaaagggagccattttctcagacccctggcctcatgcagcccttcagcatccccgtgcaaatcacacttcagggcagccggaggcgccaggggaggtaagtcacttccggaagctctgccggtagtgggaatctggctgaacaagcagttgcaagaagaggggacatctcgagcttggggagtgagtgtttcctttttctctgaggatgcccacttgccatgcctcccagggtacccagcaggcttccccagtagcactcacatcacggggctgcagcctttcctgttggctctatcctctaggttgccagttcttggagactggagaccttttaaactcacctgtagctccccagcactgatcatagcccagcccatagttggtgctcaagaatgatctgttggttgaatgaggaatgaagaaattagaccagcatttggtcccattggtgaagccctggagtcacagcccttggattcaaacccagctcaccacttaatcagccatatgactgggcaggtcccattggtgaagccctggagtcacagcccttggattcaaacccagctcaccacttaatcagccatatgactgggcaagtcacttaacttctctgtttgcctcatctccttatctgtgaaatgcagatagtaagagcccctgcgtgtctcagcacagtataccacatcctctctaaactatactgttataccgggtatacgctctacacctccctaaactctagccttttagctattgttattacccaccctactcttctccttaaagggggaagtgagagattattttcaggacccgttttctccccagggaaatgaaaagcaaagaagctgaaagcctctagtgacctgcaccccttttgcctgccctagggttggggcatggggcagtcaatgtgggaaccaaaatggagagaagagtgatgcctgagggtgttggacaaatgggatactaaaaccttttgtgccaggcgcggtggctcacacctgtaatcccagcactttgggaggccgaggtgagtggatcacctgaggtcaggagttcgagagcagcctggccaacatggtgaaaccccgtctctactaaaaatacaaaaattagctgggcatggtggtggcgcgcctgtaatcccagctactcaggaggctgaggctggagaattgcttgaacctgggaggaggaggttgcagtgagcagagattgtgccattgcactccagcctgggcgacaagagccaaactctgtctcaaacaaagaaaaacctgttgggaggggtacatttcagaaccaggttcactcactatctggaaatatgcatgatttattattggctctagtggagttgggagctgagaattggaaaacattaaagatggtaatggtcatcatgttactcacttccattatcacttaactgcactcaggggtatttgagagggagcatgaggagagtgagatacaggagtttggataagatgggggttcagggaagaaggaccagacagactacagaggaaagaaaggtgttcttctcgctagacatgaaccaatttttttgtgaacagacaattaaaatgaattactttatggcaaaagatcaaatgacaaacatgcaagcaaacaagttttagtgtcccatacgtcacacaattaactagatataaaggcagttgtgttgtcatcaaagcaaactactgtatcccattttcatttctgaaatgcacaactgaattattgctatttcctcttgctgaacttgatgaactatgttgacttaaccttatttgctgtttcaaaataagttgttaaataatgttgtaattaaaaaatagaagagtaaaaataattaccaagggtctcctctgtaaccaaaacgaattacagggaaatattaatatagtgtacttcatgtttagacattcatttcacatacacccgtgaaatgaatgtcagatgaattatgaagttttgatgagccacagcatgtttctaaggaatacttcttgcaaaagtttcagtgctggagggagaggctgctggcttctgtggggatcacacccaggtgagtgtgttcaggctgtttgtaattgagtttgcctcaggctaagccagaagctgcctgtagccatgtgtcgtacttgggctgggtgggaaagtcagtcctatctgcagtgaagagaatagaaggtggtggatattgccttgattatgaataaaacagctcaaggtaatacactggttagaagcggacatgtattactggcagaaaaaggaatcaatatgctttttatccatcttcctgactagaaagcaaactagatcatacttaagtgctttgaggtccttggatgaaagatgcttgtaaatacaacaaagttaattacaaggctgtttatggtctgagaaaactggaaacaacctaataatattcaataataaggaaatggttaaggaaatatggcatatctaattgatggaacattatgtagccaataggattacaaagaattgttaatgacatgggaaagtgcttattatgttaagtgaaaaagataagattaacaaaaaaatctcaaatcatatctaatgtgatctcattctgtttaaaacaatataggccaggtgcggtggattatgcctataatctcagcactttgggaggccgaggcaggtggatcacctgaggtcaagatttcgagactagcctggccaacatggtgaaaacccgtttctactaaaaacaaaaaaattagctgggcgtggtagccggcgcctataatcccagctacttgggaggctgaggcaggagaattgcttgaacccgggaagcagaggttgtagtgagctgagatcatgccactgcactgcagcctggatgacagagtgagactccatctcaaaaaaaaaaaaaaaaaaaaaaagaaaagaaaaagaaaaacaaaacagaaacaaaaaacaaaaaacaaaaaacctaatatagagcaggaggggattaacccagcaaaccaagtgcacaatcattacctttaagtgttgtgggtgagtttttgttctcttctgtacatttttttttgtatttttcaagtttcatacaatgagcatataaaaatatattactttcatgaatcatttgacatttgttgaggaattctttgtggctaagtttgtagtcaggtcttgagaggtgacaacgtgctggcagcccttgcagccctcgctcgctctccgcgcctcctcggccttggcgcccactctggccgcgcctgaggagcccctttctgggctggccaaggctagagccggctccctcagcttgcagggaggtggggagggagaggcgcgggcgggaacccgggctgtgcgcggagcttgcgggccagtccgagttccaggtgggcgtggactcagcgggccagcactccgagtggccgaccggcctacaagccacggacagtgaggggcttagcacctgggccagcagctgctgtgctcaatttctcacagggccttaggtgcctccccgcggggcagggcttgggacctgcagcccgccatacctgagcctccccccgcctccgtgggctcctgtgccgcccgagcctccctgatgagcgctgccccctgctccacggcacccagtcccatccaccactcaaggtctgaggagtgcgggcacacgcacaggactggcaggcagctccacctgtggccccggtgcgggatccactgggtgaagccagctgggctcctgagtctggtggggacttggagaacgtttatgtttagctaagagattgtaaatacaccaattggtactgtgtatctagctcaaggtttataaacacaccaatcagcaccctgtatctagctcagggtttgtgaatgcaccaatcgacactgtatctagctactctggtggggacttggaaaacgtttgtgtccacactctgtatctagctaatctagtggggatgtggagaacctttgtgtctagctcagggattgtaaacgcaccaatcagcaccctgtcaaaatgggccaattagctctctgtaaaatggaccaatcggctctctgtaaaatggaccaatcagcaggatgtgggtggggccagataagagaataaaagtaggctgccccagccagcagtggcaacctgctcaggtccctttccacgctgtggaggatttgttcctttgctctttgcaataaatcttggtactgctcgttctttgggtccacgctgcctttatgagctgtaacactcactgcgaaggtctgcagcttcactcctgaagccagggagaccacgaacccatcgggaggaatgaacaactccagaggcgccgccttaagagctataacactcactgcgaaggtccgcggcttcattcttgaagtcggtgagaccaagaacccaccaattccggacacagtttcataaatgttccatacatgcttgagaataatatatattctgtagaagtgagtattctatatttatcatttagataaaacttgttaattgctttacttaaatctattaccctactggtttgttcaggtcaagctatctaaattactgggggagtgtataaaaatacatcataatctgatagtggattttgtctatttcttcttgtagtttaatcagtgaaacaatgctatcaggtacctacaaattagcattgttacattttccgtgtgaattgagcctttaatcagtgttaaaacacttatttttaaatttctaataaagctttttaatttttaacattcatgtttgctttttgttacattttgcctataaatttcaccctttttgtatctgtgttttagatgtatcttttgtaaaaacatgcatatagatagttctccatttacagtgggattacatcctgacaaatccatcataagtggaaaatactgtaagttgaaaacttcagagtattagctatttaccctcatgattgtgtggcagactgggaactatggctggctgccactgcccagcatctcaagagagtagggtactgcatatcgctagcccaggaaataatgcaaattcaaaatttgaggtacagtttctactgaattcatattgctttcacaccatagtaatgtaaaaaaattgcaagtgtggggcggggcgggccatggggcgggcggaggcgcccgagccccgcttcccccgcgccattccacccccggccaggctcagcccgcggccacctacgccccgcccctgccggctgcgcccgagcccagtcccgcgagccgctccccggcgggctggctcttggccccggaagcgcgagcgttcacttcgcggcgagtggctccgtctccgcggacagagcgcgcgccccctggcccggcccgcgggggggggctccggcacggtccccgagcgtttcccgccgggtggagcgggccgagcccagcaggttgaccagccccgcggccacgcagagccgggagatctactgtttgagcgcggaagcgcagaggctggcggaggcccggctcgccgcaaaacgggaggcccgcgcggaggctcgtgagatccccatgaaggagctggagcggcagcagaaggaggtagaagagagaccagaaaaatattttactgagaaggggtctcgtaacatgctgggcccgtctgcagccacgctggcctttctgggtgggacttcctctcagagaggcagcggagacacctctatatccatcgacaccgaggcgtccatcagggaaatcaaggactctctagcagaagttgaagagaaatgtaagaaggctatgttttccaatgctcagttagacaatgaaaacacaaacttcatttaccaagttgacaccctgaaagatatgttgctggagattgaagaacagctggctgaatataggcggcagtacgaagagaaaaacaaataatttgaaagggaaaaacacgcccacagtatactgcagtttcagtttgctgaagtcaaggaggccctgaagcaaacagaggaaatgctcgagaaacatggaataatcctaaattcagaaatagttaccaatggagagacttccgacactctcagtaatgtttgataccaagatcctaccaagatgacgaaagaagagttaaatgccctcaagtcgacaggggatgggaccctaggaaagccagtgaggtggaggtgaagaatgaaatcgtggcgaatgtggggaaaagagaaatcttgcacaatactgagaaagaacaacacacagaggacacagtgaaggattgtgtggacatagaggtattcactgctggtgagaataccgaggaccagaaatcctctgaagacactgccccattcctaggaaccttagcaggtgctacctatgaggaacaggttcaaagccaaattcttgagagcgcttctctccctgaaaacacagcacaggttgagtcaaatgaggtcatgggtgcaccagatgacaggaccagaactccccttgagccatccaactgttggagtgacttagatggtgggagccacacagagaatgtgggagaggcagcggtgactcaggttggagagcaggcagacacagtggcctcatgtcctttagggcatagtgatgacacagtttatcatgatgacagatgtatggtagaggtcccccaacagttagagacaagcatagggcatagtttagagaaagaattcaccaaccaggaagcagctgagcccaaggaggttccagtgcagagtacagaagcaggtagggatcacaacgaagaagagggtgaagaaaaaggattaagggatgagaaaccaatcaagacagaagttcctggttctccagcaggaactgagagcaagggtcaggaggcgacaggtccaagtacagtagacactcaaagtgaaccctcagatatgaaagagccagatgaagaaaagaatgaccaacagggagaggcattggactcattgcagaagagaaagaacaagaaaaagaaaaagaagaggaaaaaatccccagtacccatagaaacccttaaagatgtttaaaaagagttaacttatcagaacacagatttaagtgaaattaaggaagaagagcaggtaaagtctactgacagaaagtcagcagtggaagcccaaaacgaggtgactgaaaatccaaaacagaaaattgcagcagaaagcagtgaaaatgttgattgtccagagaatcctaaaatgaagttggatggaaaacttgaccaagaaggcaatgatgtaaaaacagcagctgaggaggtactagctggtagagacacattagattttgaggatgtcacagttcaatcatcaggcccgagggctggtggtgaagaattagatgaaggtgttgcaaaagataatgctaaaatagmtggtgccacttaaagcaatcctgaagaaccagagagygaagatgcagatcactgcaccgtacccaaaaatgaaagtccctcacaggacattagtgatgcctgtgaagcagaaagtacagagaggtgtgggatgtcagaacatccaagtcagaccatcaggaaagctttagacagcaatagcctaaaaaaccatgacttgttggcaccaggaggagagccgggggacttcaatccagaaagcagagaagataccagaggagggaacgagaagggcaaaagcaaagaagacygtaccatgtcctaagctgaggcaggcggcaggcgtggtgcacargaagtctgagtgtgaggggctcttttctctccactgccaatgtaagtagaatgttctaaattcatagagatgcactgtatgccaatcaccaggtgatctactgctttaagttatagactgttacttgtagatttccatgtaatcattgaggttatcacccagattagaaagacatatttgttatcagtgtacattctaattgagagcatatatccagtagtatcaaacaataatgtctactgtttatagtccacttaataaaaatagaagcatttaccatttgccttaggctgataggaatgtgaatattcttgaccaaatatatcagcatctaattgaaatgaccaaatagcattcttagacttctgtattatgaatataattgatatttaaattaatgtcttgttcatatatgtgtactttcatatttgattttaaaatatacattataacctgtatggtattttatttaaaggagataaaccgccaaatagcaaataggtcactgaaaagatttgcaccttagaacaataatcattttaaggataacaagtaaaggtctgaaagcaygaggggctttatttgccttcacctcatawaagtctttgattttgaaccaatgcttttggatctcattgttgatgatacttgaatttactttgtaggagattttaacttcatgctgatgatgtatcaaattcattttatacaaagtttaaagattttttctggaagtgatacatgtcaaattacatttcctactgcagtatttgagcagggacagtcattttttaaatgtttttggccgggygtggtggctcacgcctgtaatctcagcacgttgggaggccaaggcgggtggatcacctgaggtcagragttcaaggccagcctggccaacatggtgaaaccctgtctctacgaaaaatacaaaaaattggccaggcgtggtggtgggcgcctgtaatcccagccactccggaggctgaggcaggagaatcgcttgaacctgcgaggcggagattgcagtcagccaagatcaagccattgtactccagcctggacaacgagcgaaactctgtctaaaaaacacacacacacacacacacacacacaaaacaatgttttcatgcctgtaaccctagcacattgggaagccaagtttggaggatcgcttgaggccaggagttcaaggctgcagtgagctatgattgcaccactatactctagcctgggagacagagtgagaccctgtctctaaaaaaaagaaaaagtttttgaaccttaaaattacttctctttgtttgaatttctaatcatcattcaaaagaacagtaaaaaaaggttacttgttcttgtgcaaactacaaattagactggagtaggatattttaaagagctgaatcacttttggtattttgttataaatgttttcatttgttatgtcccagtatattcttattggaaaattcttgttttgatctgcctgaagaaaatatctgttttctatataaagaaacatttaaaaataattgtaaagttagatttaattgtaaaatataaaatcacaaaggaatgtaccttatgaatgttgacattttatgaaattatgtagattcatattactgttacaagatagaattgaatgcaaaaagaccaaatcctcattaaaatttgaggaaaacataagtgttattatgtaattgaaataaaaacattttatagttgtaaaaaaaattgcaagtggaaccatcttaagttgggggaccatctatatgtatttaaatctagtctgacaatctttatatttgaaaaacagtttttttagagatagggtctcacctatcactgaggctggagtgcagtggcacaatcaagcttattgcagcctcaaacacctgggctcaagcaatcctcctggctcagcctcctgagtagctaggactataggtgtgccactacaactggatggtgttttaatttttattgtgtagagacagggtcttgctatgttgcccaggctggtctcgaactcctgggttcaagtgattctcccacgttggtttcccaaagtgttgggactataggcatgagccaccacagcctgccctactctctatcttttaactggatcatttactccatttagttttattgtaattactgatatactgatgcaataacattattctatcatgttattttgtgctatttgtcctgactttttcatgagtttttccctcttctttattgccttttttggattgatttttttcccttccattctttgtttctctactagtttggaatttctggagtatcacctaaaagagtagagaaaggtgatatttctatttagcatgcatatttgaacttttcaacatgaaattaatgtctttatttttccccatggaaaaattatcactgttactccctctaaattatattctcttgtcatgtatttatcttttcttttaaccccacaagacataatagtaataagataattactattattattattttgtagaattaatatctttttttttctttgagatggagtctttctctgttgcccaggctggagtgcagtggtgtgatcttggcttactgcaacctctgcctcctgggtttaggtgattctcctgtttcagccttccgagtagctgggattacaggtgtgtgccaccacgtccagctaatttttgtattttttgtagagatggggtttcgccatgttgggcagtctggtctggaactcctgacgtcaggtgatctgcccacctgggcctcccaaagtgttgggattacaggcgtgagccactgtgtccagcctagagttaatatctttacttacctgtttacttctgtatttgctcttcatttctggttaaatatcagctgttatctggatttttttcgttctgccttgagtaaatacttgacccttttccttcagtgagggtctatcaaggacaaactcagttttgtgtttgaaatgtctttgtctgaaatgtctttattcattgagaggatttttttgtagacatagaattctgtggttactttttctcagtatattgataatattcttgccttatggcttctagtcttgttacagagaagtaagctctcagccaaattgtcattactttgaagttaatttgtctttttctttggcgactgttaagattttctcttgtctttgtagctgtgcaatatatctgtgatgtgtttaagtgtgggttcctctttattttattccatgggcttctggagtctgggaactgggtcttcaatcagttctagaatttgactatctttttaaaatattgcttctgacttatgtctcttttcttctggaattctgaatagatattatgttacactatttaatctatctttcatgtctctgaacctctctttaatactttccatttaaaaatctctctgtattatactctggctatttttgcagatccagctctgtgttcactaattatcttctcagatgtatctaattgagtgttatgtctgttcattaaatttttactttcaattattttatttttgatttctataaattcttttttaaatattagctctacattttagaattccttgatttctgacattttggatccttcctttatttctttaaatatgttacagatgtgtattttatattctatgcaaatatctgaaatttttcgtggatctcattttgtggtctattttttttgcactcaaacgccttgatttcctgtgtgttttatgacttttattttattttttattatgtatttatttattcatttttttttgagatagagtcttgctctgttgcccagactgaagtgcagtggcacgatctcagctcactgcaacatccaccttctgggttcaagtgattgtcccacctcagcctcccgagtagctgggattacaggtgcctgccactacacctggctaatttttgtatttttaatagagacagggcttagccatgttggccgggctcgtctcaaactcctgacctcaggtgatccacctgccttagcctctgaaagtgctgggattatagccatgaactacctcgcctggctgttgtgtgttttatgacttctaaatgagtgcatatactccttggacatttatatacgtcttctttttttattttattttatttgagacgagtcttgctctgtcgctaggctggagtgcagtggcgcaatcttggctcactgcaacctccgactccttgttcaaaggattctcctgccgcagcagctagaattacaggcacgtgccaccacgcccagctaattttttgtgtttttagtagagatagggtttctcaccatgtaggccaggatggtctcgatctcctgacttcatgattcgcccacctcgacctccaaaagtgctgggattacaggcgtgagccattgcgcctggcctatagaattcttttaaggcctaagttaaatgtgtgtgcctacagagaacatacgtatttaaatttgccaggttgcagagggcactacctacttaaacaacattacacgaaattcttagcttgagatttttgtattacccaggtagtatgaattcaggctgtaaactcccttgaggatccccttgaggattatctaaaatttcaggggagattgtagttttcctcttttagtcagtgttaaggtttgagaaaggcattttccttgccatttcctatggagtggtacggtgtgggtgaagggagaggggctatttccagttcaacctgacactgacttttaagtcctttggggtcccagctctagttggatggtatattaaactacatacctcggatagaccctggacattgtctcctgtccctgtgaccctataaactgtgaaacaaaagctcaagttcaccaagttccgcaaatgccctcaagttaaaacttgacttctgtccaccttcctttctgggttcctactttcacatagtttttgtcttttgagtatttccaattctttttaagctttggccagaagttttagttgtctgtagttagagtgggtgtctagtgtaccataccactgaaacagaagcctgttacttttacaataataaaaacatatctatgtgggctttttaaaaaaatttttaaatttatttatttacttttttttttgagatggagtctcactctgtcgcccaggctggagtgcagtggcatgatcttggctcactgcaacctctgccacccgggttcaagcgattttcctgcctcagcctcctgagaagctgtgattacaggcgcatgccaccgtgcctggctaaattttgtatttttaggagagacagggtttcaccatgttggtcaggctggtctcaaactcctgagctcaggtgatctgcccaccttggcctcccaaagtgctgggattacaagcatgagccactgcacctggccaaacctatctatgttttagttttttatgattattttatattatcccttccccacacatgaaataacttctttccaagtgacttatgaagttgtcaacttttcataaagccttggaacaaagtgggcagaaaaattataaataaaaagtcttgtctaggacagtacaggtctgtcttattcctaaattagatcagaatcgggttatgccggttttttataacataccattataattgggtatgttaaagaatgtattagagatgcattagaagagcgacctcattataagcctcttcacccatggattccaaggatatcttacaataaacctctgggataccttacgctacagagcaactaaagtccagctttagagcacaagggaaaatgcaggatattgggtcctggaaactacaaaaaccatcaaactctactttagggctaaaactttcttttaatcaatctgtcatatttattgataaattagaaaatgtggctgggtgcagtggctcacacctgtaatcctagcagtttgggaggccgaggtgggtggatcacgaggtcaggagatggagaccattctggctaacacagtgaaaccccgtctctactaaaaatacaaaaattagccgggcgtggtggtgggcgcctgtagtcccagctactcaggaggcggaggcaggagaatggcttgaacccgggagacggaggttgcagtgagccgagattgccccactgcactccagcctgggtgacagagggagactccatctcaaaaaaaaaaaaaaaaaagtacaggttcaaatttcattaaattttttttccatgccccttctctggtggtaggatgataggggatgagtaaaatatcaaagacaactaaaaattcctaaactagatcctcgggtcccaaagaagtgttaaccatggagtgccccaccttctgaggttggtgcttcctggcacaggctcttggaacattctggattgtctgacattccttttactcgctttagaacctaaagatgttgctgggggaaaagggagctagggagagggaaggggaaggatgtgggataaggcataaactatgcttgtgggaaaaaaacaaccagtaatttccttgatggggtttttgcttgactttaaaatgcagtaagcttttaggaagcttgatggagcctgtgtttctaccattagtgctgcatttgtttggcttaagatttcattaagcttcttaaaatggagatacttctggaactcaaatggctactgagcagggaatggcaaatcagtgacactgtaggaagtggagggattttggcaaactagagaacacaccttccacaggggcagccactgctctgctgggcccgctgttcatctgcagggacgtgcatcttgggattatttccaaagtcagaactcagcatttttatgagaaatgtcatgatttttaaggtcttaacaagttatcccacattaaaaaaataataataaaccaggccgggtgcagtggctcacgcctgtaatcccaacattttgggaggctgaggtgggtggatcatgaggtcaggcgttcgagaccattatggccaacatggtgaaacactgtctctacttaaa

SEQ ID NO: 97235 - DNA, 652661 bp, Homo sapiens
  misc_feature (1)...(652661): n = A,T,C or G
tcttaatgaaatagaagccaaatgttaaaacatgtttttgttttcttggcaaaataagctaatcaaaacactttaacactctggctaattgacagtataccatgaatcagcctcatttgcacgtgggtggcacatttaaactttcaaagcctgatcatatctgtataggctaacccaaattgctggagtccacaccagaatgtataaacttgtgagatccagcccaaaataccctccagacagtctaacaacattatcacctgaaataccagtatgaaattaacaacaacccgaggcttttttttttttttttttttttttttttttttttttttgagatagggtctggtctcactttgttgcccaggctagagtgaggtagcataatcacagctcactgtagcttctacctcccgggttcagatgatgcttccacctcagcctcccaagtagatgggatcacaggcatgcaccaacacactcagttaatatttttaaaacaatttttaatatgtggggggttggggggacgtgggtgtctccttattttgtccaggctggtgtcaaactcctgggctcaagagatccttccactttggcctttcaaagtgttaggatttacaggtgctagccaccacacctggctctgaggtttccttggcatttttgggtaaatgccttagaatactctagggcacaaaattgttgctttctctctaaaatcctgggccaaacatgttgtaataatcctgtgatatttttaccttttctaagtctttcatatatttggagaaagaaaaaaaattactcttttctttgaacaaaggtttaattaggaaaaaagagacaaccatatagtatctttagtatagtatatttataggaatgcataacatgtgagatgtacattttgaagtttcatccataacttataacatttactgtagcagtaacaagacagcaggtcatcactttacaacattacacatgagtgattttgacttacaaataaaatatttacaacctacctttacaaaacgacattgtgtgcatacaaaatgaacaacagcagaaaaatttaaaaataataaaataaccaaaaacccagaagatacacttaaggcagaccagcaagacactgaaataattaaggctgtggaattcttctgcaccttgaaaatatagagctatttatcaatactgtggagtgattttaaatcaattgttacaagcctgatggaagtatgtacttatatgtatatgtgcgatggtccctatggggaaacctgtccacttatgaataaggccctttgtctgaatggccagtgaagcccactccaaattctcaaaagacttgaggggggcaggggtcactcaaaaccaagagatgccaatacagtttgcaaatcaactattaatagttcaaatgtaaagatagttataagtccagataaacagaataaactaaatgatggcccctttatgtttcacactttgttagtttggctttgtggatgtcaaaagacagcaaattaattccagaatgagtagaattcgtctccacaaattagccctaatggttttgaatggccctaaatggttttccattagaaacattgacccacctgggctgtctgcaaatggatagatttctgcatatgagcaataacatatacatacatattatacactatatacatgtacagatgtacatatatccgtattttccaacagtttgcactttgatcactactgttctctgaacaggatctcattatgaagagtatgtttagtttttttcagtcttcatatttgttctaactactagttttactcaccttccccatagagtaggctgaagtttggcagaaacagaagtaaaagcaccagggtcagaaaaatcaaacatagagttgacagatatggcttaagttagtaagagaagatgtatgtcttgttaacttcagattcgtagccacagtctttgaggtcatagtaacagtctctgtaatactccagaacatggattcagttgttgatggaagtcaggtattgatggaaactcatatgatggccatccctgggccaacaaattagcttggttaaactaagcctcaggagttggcattccaagaattgttatttgcatttcttctaccatgcttccttttctcagctaacctcactatctgaaatagcagttatctaactaatgcgttatcttgatcatttgaataaaaactaaatctgaacacattttagaatctcacagcaaaggggcacatttctcacagaaaaatgcaatagcctgtgcgtattaatttcaggcttatcataatgtccctcaaagacgaaaagttgtcttagagtgattgctttttcctctcctctaacttcttcatatttattgaagatgaggaagaaatgcctttcatagaaaatatgttttatgataatctgtattctactacttctgcttaaattttttatgtgagtaaatttcctattaaaaacatttagtgctataaacaaatttcagccctttttaaccctttagaattaatgaaacaactgagagccttaatatttttagaaaataaatattaacatagtagctttccttttcttgatggagcgtgtgtgagctctgtcgtctctaagcccaccatgggtttaatcattcatcatcaaatcatccctaggctttaaatagtgaggaaaaatcaaggtgcagttttataaataaattcactgaaaggtcacatattgcatttgtctaacccagactccacagaggtgcgacccaggagagaaaggaagaaggtctacattcctcgaaactcatccagcacaattcattgaccatactgaataaggacatggtgagtttgaactttgccctactacaaagacctcttacgtacaaaataatttcctcctgtattaaatgcatgggacaaagttttagttaatgcaaaatttagtttatatcatatttgctccctcatattctcacaaatctaaattgccatgctcttccacagaggcaagaaaaaagtaatgcctaactcgtgggctctaatcatggaggttatgggatagcaaatatgcaactcctaaaagacctaaccacctaaaaaaaaaaaaaaagattcaaggtttgtcctccaaaaatgagcagtccaattcatttctatgcatttaatttgcctgtgcatttaatttgtctcttagattcctgtgaggctgtgaaaaataaattgtggtatgagaagatattttcttctcacttctgccctcccaagtgaagaaagtggttgttgggttcttctctgtccttttttccagagcataaagcttgagaaggaaggtagcagttgctttcaagggcattttactcttcgcatctgccataagaaatactggagaaaacaacttatggacataagacttcatcagctctcctaacccttttcggtagacaagctcttaaatgatcgaaattataggctaagaccaaataacatttagacaaagagcacctgatacttccaactgaaaacaatttacagaatttaatctcatgagtttataattggtatctaaagacgtgaatattgaaaacctggaatgttcaaagttactatcaataaaattcttagcactggcagtgtgtagcacttaaaaaaatcaaagtattttatagatgtccccaccaaggttatttctcaacattcctgtaagattaatgtcctccctccttccccatcccccaactcccattttaccaatggggacatttggggaaggaaaaacaaagactttctgtaagaaaagatgaatcaggaatagctgagattgaaactcaaacattcctggtcccacccctatattcagatgttttcatttacaagatattttaaagtaaagaaaaaatgctgcaatatcagtacatctaaatgcaatgaacttctttatctcccatcctcccctctgaaaggcactactatttataaaggctttgtggaccacaaagcagtgaagctagctttctcctctgcttcctctactcccccttacattgtttatggctgagagagacctgaaggatatctccaacattaccatttttttcttaaaaattttaccacattcagctgtaagtggatatatatctatttaatttgaaacaaatgtaaaagatgtaggaaatcattatattaatacttcttaaaagttattatgggttgtccctgatcttttcattctttctgtatcccacccttacaaaacaaaacaaaacaaaaagctcaaaaccctatgcaatgaatataagccaagcaagaaacttgtgaccttgaccattgtttgtttttcccatttcagctgaaagttcactcccactgtgaactaccatcataatgatagaaatggaccattttctcttctctcctctcttctttactaccaagtaataaatctctccgccaaaacaggaacaagagtggcccctgatcctttttccccaagcacggttgccctcagagcaacctaaagtacattccccaggctcatcatcatctgggattccttgttatttccaacttgctgtggagaactcttgaaccaagactactctcttatctctgttgggagggaccaggagctttgcagacagggagcctccctgttagtttccctccgttatcaaactatataaaatataccccctttctcttggggcctctattaagttcattctagtctaatgattgtaccttggctccagtcaacaaaatcatcctacttttcatttctaggtccctcctttcctgtcttctcacttcccaaatatgtgtacttgggggaattccatgcaaccccacatctggatcctcccaactctgttgtaaaagctgatatgaaagcttggggtctgtctaacattctgtcaactgcccccataacataatttcaaaaataccctccttgtcccccacctgccgtggtctgcacaccattgttctgggccctggccttctcaagcagaaactcaacttgttataaaaactcagaatggctcagcagggggatcttgattcaggtcatccacagtggacagaacagaacttgccaagctggactttatggatattgggaatcctcagagcctacagtttgtcccatgacaaaccctatgggccaggctttccttttttttcgagacagaattttgctcttattgcccaggctagagtgcagtggtgcaatctcggctcacggcaacctccgccttccggtttcaagcgattctcctgcctcagcctcccaagtcgctgggattacgagtgcccgccactacgcccagatgatttttttgtatttttagtggagacagggtttcaccatgttagtcaggctggtctcgaactgctgaccttgtgatccacccgcctcggcctcccaaagtgctgggatcacaggcgtgagccgccgcgcccggctcaggctttcctcttttatgctgtataccataatgaagacatgtttattgaaagggttttagtaaactgtttactaaaaggatttttagtaaatatgttttaaattttttaaacacaatgaaaacatgtttactaaaatttttttactaaatatgttttacattttgaaaaattttagtaaccatgtttaatgtatgttttaaatttttatgtattgtatcatagagtgtttgtaaatacataaaggtccaaatgaagactataggggttagtcgagagacctctgagggagtgaggctttatgacccagggccatttgaaaattaagaaacaaatacagtcggagtcggtttccatatatttggttaatcccaaaaatactaagtgctatctagtcttattgcttatactttccattaatttatcaatctataatcttggatgggatgaggtggagggcgaatgaggaagttgtctttgaaaccaatggaaaaaaaaagatgatgatttttaattttacattttctctgtgggaataagtgttttttatatgttaaagttcaggcttagtttccaccatttctttttcatttagataggtttgtagttctattcatccttcataaattctcttcttgcacttctgtactacgtgattttaattttctctatcccattataggagagaagcaacaccattaaacctgatttgaacaaacacttgagttacatttttaaaatcttacttgtataatcgcaattttcaacacacattctagaaaactaagggtggatcatgtacaaacacaaaaaacaagctccctccctccaaaacaaatgaacaaaaataaagaaagaaaacccatgaaatgcccaggtttaattttttttccaccagagggaaaaagagcagttaataataatcttgtatggagaatatacaccagaaagcagcactggcctcaaagtacaattagtccttttagttcagagaactatcagcggctgcatggtgacaggtattgcaatctcagttacaacttaatgctctgttagggtgatgtatcaggttttgttccatggctttaaaaaggacttagaaccaggcctttaaaaggcctatatggctgcctccttttagtaagcaccccttagcttcaataaggagttagaaataaagccagccaactttctgaaagatggtattctacagctgtagaagaaatcagaaagtgttggtacgttgttcataggaactgtaggaaaggttttcatttgcccttttatatgaacctcttgtatttgtttacttatttcaaacctggtgtagacacaaaaatatccccgcagctcatactgtatttgaatttatttcctggcaggctttctttccagattaattctgagctgccagtgaatttgcggggagcgtttcatatacagaaagaacctatcttaatcaaataacctgcgattgacagaaaaaattttctcattcaaaagggcaacattgctttctcttaatgcacaggttctggtaaaagatttctatacaagatctataaaatgctctaaaaaaacttgtcatctaattgtgcttagtcaaaacaatgtaatgattcggtaaataaattactgtcttaactggagcactcaaaattacttgtgattgatttaatatatatatctctatattagaaaactctgaaacctgaatgggatatattatactgtatgtgggtatctatcctattaagaaactatatctaagttatctaaaccagaatagttgatatacatgacatctccattaaatagaacttcttgcttaaaatttcagcaaagccagagatcttttatactcttgtgagcttaaggtttgcccagttaaccactcattttggaagatacagttaaaatttcgtaacagctaatattgttcttatctttgcccttcttctgaacacttctgtgaccctttgcctctttatttcttcagaatgaccttctgaaaagccccttgatttagggtgacttttactgctgctcagaccctgaataaccactgacgaggtttaagaggtgcatctctcaattcagagaactgcacggagtgaaatgatgaacagaattatttacagtcacattcagtcttgctttggttcacactgcacgtctatgtgaaaccataggggctgggagatggctacgtcccttggttcacccggttgacaatgtagctcttgacattgggaataggccgcacatcattctggtgcttgcgacgttctatgaagcatgctaggcgggaggtgtccagggggatcttagagtagctgccattatggggctgcagccatggatgctgcaagcatgtggctgctgtgggccgcctccgaaaatcttcctgtaagatcacattgatgaaatctctggcagcattgctcacaccacagaagtattcatgggggaagctgaaatccaccctgcatacgttgatacatgtctcctctttgctctcatccaagaagggggagaccccactcagcatgacatatgtcagaaccccgatgctccagatgtctgtccccagggagacggggatgccttgaatgacttctggggcagcaaactcagggttccccagcaggtggtgaatgtggaagtgacccgagatctggacagcatcctccaagtcaatgagcttcactcgaggcactggaatccgtaggtcaatgagcaggttttcaggctgcagagatccaaggaagcagggagaaaagaagggaagtttaggcctctattttgactactcaaaatacctcattaattcaaacacagttatgctattctttgataaagcctatggtgtacagaaaattccctatgcactacggaaactgcataggatacttcaaactatcattttgagcttactacactttgagtttgggtggtaattcagagaagttgtttgacattgaaaatcatgttttcttaactacactgcttctgcattgaatcaaggaaataataaattactcattttggtgaacaggggcttctttttgagaagcatggaagagaaggtgacgtttgttggcttacttctatgaagttagattaggtaggtagaacttccctaccttctctcacaccagatgtcattgtggctctggcatattctcattaattcatggatgatacacttaaattgtgtgacaacccagattctctttaatagtcataatggggaggccgggcacggtggctcacacctataatcccagcactttgggtggccaaggcgggtggatcgcaaggtcaggagttcgagaccatcctagccaagatgttgaaaccccatctctactaaaaatacaaaaaaattagccaggcatggtggtgggcgcctgtaatcccagctactcaagaggctgaggcagagaattgcttgaacctgggaggtagaggttgcagtgagctgagatcatgccactgtactccagcctgggtgacagagcgagactccatctcaaaaaaaaaaaaaaaaaatagtcataatgggatggatgtgttggctcacgcctgtaatcccagcactttgggaggccaaggcgggcagatcacttgaggtcaggagttcaagaccagcctggccaacatgatgaaaccctgtctctactaaaaatacaaaaattagctgggcatggtggtgagcgcctgtaatcccagctacttgggaggctaaggcaggagaatcgctggtacctgggaggcggaggttgcagcgagccgagatcgcaccactgcacttcagcctcggcaacagagtcagactctgtctcaaataaaaaaaagttataatattctactctaagtaaataaaatgaatttgaatttatattccttatgagtaatgactggtaagttggacttggccatttaaggtattccctgcaaggttgccacttcttttttttgaagggagtctcgctctgtcgcccaggctacagtgcagtggcgcgatctcggctcactgcaagctccgcctcccaggttcatgccattctcctgcctcagccttccaagttgctgggactacaggtgcccaccaccactcctggctaatttttttgtattttttgtatttttagtagagacggggtttcaccgtgttagccaggatggtctcgatctcctgaccttgtgatccgcccaccttggcctcccaaagtgctgggatttcaggcgtgagccactgcgcccagcaggttgccacttcttattacctttatgtccaaatgtgcaaccctgcagttgtgaaggtactgcagagcctccatgatgtctcggatatagaaagctactttttcctccatcagttcatcatgattcataaggtagtctaagagccggccatcatccatcctgaaagtaggcagggaaaggcaaaggaaatatgtttgaaatgaagaaatagaaaaataacacatgtacaaatcagtaagatctctaaactctctcatacttattgttatacatgaagaccaaatgtgcaacacatgcatatttagttagagcctaaagttattgtaatattcagaactaaaataaatatatttacaaatatggtgtactgcagggagtgtgtataaccttgtttaagaaacattctccttcattaactctaaaaattgctcacaagaaaaaagttgtgacacccatttaagaggtttgattgctaagtaaagaaagccttcaccaagagagacttcagcaatatcctgattaaccataacctagtggctgcaaacagccccacatgtgttttgcaaagtacttcttaattttattttaagattaattttagagatgaagtctcactgtgtcgcccaggctggaatgctgtggcacaatcatagctcactgcagcctcgaactcctggactcaagtgatcctcttgctttagcccctcacatagctgggatttctggaggaggccactgtgcctagccaaactactttcatttgtcagttttaagttggggaaaacagaaagtaggcaaagtttgttctttgcattattgattctctgtccctcccctaccccaccaccttttttttgttgttgttgtttgtttgttttgtttttgagacaaagtctctctttcacccaggctggagtgtagtggcatgatctcagctcactgcaacctccgcctcccaggttcaagcgattctggtgtctcagcttcccaagtagctggaattacaggcgtgtgccatcacactcagctaatttttgtattgttagtagagacagagttttgccatgttggccaggctggtctcaaactcctggtctcaagtgatccacccgcctgggcctcccaaaacggtgggattacaagcatgagccagcgtgcccggctcttgatccctttttgaatcctttgccttctgggcaacttttccaaccttgagaactgtgattgagaacatggtatatggagccatccagacccagattcgaatcctggttctgttacctacctgctgaaggctgggagcaagtcatttgaactctgtgttttggtttcaccaaagtgaaccatctttaaagtgggaataagaacagcaacaaaataataacaattattattcattatattaatataatataatgaattaatattatcatatagtgggtgaatattactgttcacctatttgattatgaggattgtgcaaggatggagtgagatgatgaagcatttaagcataattggtagcataggtaagtgctaaataaatggtaactattctcagccaccctctgtcctcttacagcaaggagttaccaaatgtcaggtattctttagtgtacattgagttgttaaaggcacatgcccaggaaatgcccatgcagaggagcctgatgcagggtcagaaatgactttcagttacagctgaaatccccctggtcaagtttacctcttcccctctagcttgctccttcccactggtgtcttctactttccctgacaggagcaaaggctagaacccatgcaagcctcttttgctttcctctgaccctgctaagggtgaggtaagagtgatcagagtagagtggagtaggattgggcttgttaaatgtattcccctgaacttcttggagtcattaagggagcaattaacagcagcactgctccaagtgagagagtcttagccaccaagttcacctttagagcttttggataaggcagatgcccacatcctaccctagactagggaatccaaatctcagttgcctggtaaagaaaggctctcccagcaattctggtgaccacctaaggggaggccaccgtcacctaattggcagcataagtatttgccaaataagcataacaggataatgagatccagcacaggggttagctcaggcactgcctctccacaaactttccctgaacttcaggtccaaccaagcacctatgttctcacagcaatcttctccaatgcatgcttttctttcttagtatttatcatgttatattaaaatcatccatttatctatctattggtcttcctcattagacttgtaactcctcgagggcaaaaactatatcttttccccctattttttttttttttttgagatggagtctcactctgtcgcctaggctggagtgtagtagtgtgatcttggctcactgcaacctccacatcctgggttcaagcaattctcctgcctcagcctcccgagtagctgggattacaggtgcctgccaccatgtccagctaatttttgtacttttagtagagatggggtttcaccatgttggcgaggctggcctcgaactcctgacctcaagtgatccgcccacctcggcctctcaaagtgctagaattacaggcgtgagccatcgtgcccagcccttttccccctataaactatacctctgcctcctataaactacccttataactataactttgttcccccgaccctggccctggtctggatggtagttggtgcatagcgagggctcagtaaacgtttgctaaactagttcaacccactgttcatctaacttaatccctgcaacatctctgggaagttggaggaatttcaatcttcacagatgaggactcggggccccagcaaactaagtattctgcttcaaatcacagagctgggacgtgagcccagattcctcattccaagagcagcttctttccattgcactacagtagcccaatatcagcaccttcccttgaaacagcagttggcaagtctgaaggggcagaagttctgggtcagctgaactcaacctggtacacagtgacaatacctttcactggaacacaagcacagatgttgtcatctgtggacaagtatagttcactagcaatagaataatgtcttttgagttaggaggttccctacaaacagatcaggctctgaaagagactgttaagtctgttaagtctaaagtgacaaactaccaactacttaactacataaagtttaagtttcacaaaaggattacagatgctagcagcatggggtttgtcccctctgtttttttttttttccagctgattttaaaaatagccaaacttgtttgcatttttgctttcttattttatcataaataaatttgtgacaagttactgactcaaacatcccgtacacacacacctagactaacaagcacgcaagagccggactaacatggtagttgaaaagctgaaaatgcaggcacttctctactgaaaaggggttcttgtggagccatactcggcaatggtctttggcggaaatgtctgtctcctgtctaggccaagggcctcagtagcaccaatctgatcacatttctgttacttgtatcacttctgaaaagactctgttctctttaatctctgtgatatttatctaaaccacagaacatactgtctcttcttagcctggggtagtggtggggagaaagggacattattgctttattacatctattctaggggtcacgtatatggttgcctaagtccctagaaaatctggaatgagtggaatgttttgaaggtaaggctctcccctggaaggaatttttttgggtggtagactggagttgctatggtggtgaattgacacacagagccctgtctttcaactccaccctgtcaatcagcctactgtcgacaagctcttcccaaactcctgcccagcccaagagtccataatagaaagaaaataaacatggaagtgagagagatatgggttcaagtcccagcttctccattcctagtcttaaggagctagttttaaggacttcccttattcctattatgattttttaatctttgaaatggaaatgacattgattataaaatgggggagagagtgcatgttatatgcagcactttgcaaatgataggaccttgtataaaatgtaactgtcttttccattaattgtgggcaaaagctaacctaaatggatgcaggcgactttagagagatggcgtctgtacttacagttccaagatcaggatgtaggatgtgggggactcataggtgtcatggagagtgatgtactgggggtgctgtaggtgctgaagcagggcagcctcgtgggcagcctgttctttcttcttcatttttttgctaacaaatttcacagccacatctttgcgggtagctttgtgaatgcatttctttactatagagaaacggcctctggaaaaacaaaagggagagtttgccaacattcattaattaactagatatattttattcatggataagtaaagttttgtgggaagtggtcagatagatcttattaggaatcctactctcctatatttttaattataatgttattcagagaatccatttttccttctttagcattttagggtttttgagatgtcaaaaactttttatattatatataatctaattacattataaattatatttttatatgtaaaataaagcttttttttttttttttttctgagacagggtcttgctctgctacccaggctagagtgcagtcatgtgatcatggctcacttcagcctcaactttccaggctcaagcctcttgcttcggcctcccaaagcgctgggattacaggtgtgagccactctgcctggcctaactaatgtaattttttaaaccaacatttttctctgccattttaaccatcaatggcagttcagttttcttttcgaggcagaatatgtatttctgtgaaatacaacaatagaaacagcaataatgttaaagaaggaggaattctactcaacgataattttaaaaacatttttattatttttttctccttctcatacataccaattctacttccttcaaggtctagcacaaatgctaactctttgtggggccatgacacgatgaaaaagccagactgtaaagccattgcaaattggatttttgttttttaatttcaataggtttttggggaacaggtggtgtttggttacatgaatatgttctttagagggtgatttctgagattttggtgcacccatcacccaagcagtgtacacagtacccaatgtgtagtcttttatctctcaccaccctctcaccctttcccccaagtccccaaagtccatcatatcattcttatgcctttgtgtcctcatagcttagctctcattaaaaagattttaaagagtccatcatttcattttattttatgtttgttatcttcttattatggaaactttctaatatacacaaaagtaaagaaaatagcaaaatagatctcctatgcagccaacttcaataatcatgaacaatttaatcaattttgtttcatctatctcttttctatcccctgcttttttccaccctggaatattttaagcaaatccagatataatgtcatgtcactcataaatacttcagtttacatccctatcgacaagaacacttagaaatatacaaccactctgccattattgcatctgacaaaattacccacccctgaaatagaatggttcccagatacagctgttgccctgtggaaggtggcaagagagctctgtagggcacaggtcagcaatggggcagatgaagggagggtcaatgaggtgacaaggcagcaccatccaagccctgcccatgaggtgtcctaacccacgagcagaggagagaacagtctgaagaccagcccattcctccaacagaaatgggtgtgtcatggccaccatgaagatgatctaactgcctccttgacctggctctgtgctcaaaagacaactttctaataatactttttttctcatcatatatttgcataaaataatgtgctaataaggccaggtgcaatggctcatgcttgtcatcccagtgctttgggaagctgagacaagaggattgcttgagcccaggagtttgagactagcctggacaacatagtgagatcctttcgctttaaaaatttttttaaaaaaaataatgtactaatcagtaaaacaagtcttagacaagtatttattgaatatatattatttaccaaatatcattcttggcacagtaagcaaatatttggtcaaaatggcagttttgtttcacatcataaattaataaattgccattctggttttaacagcactctctttgtgagtttgattatcataagttacttcttgcagaggagtgaaatgaaacaatgaaaacaattgaatgctgaggatagctctcccgaatttagtggccatctcaaggtactgctagcttaatttttagaaaaaggtttgtagttgtcaaagttatgcagacccatggtttaaaaagtcaactatctttacaggtttgttatttaaaaacaattcatccccatttttccttccctggagtcttgctctgtcacccacgcttgagtgcagtagcatgatcttggctcactgcaatctctgcctcccaagctcaagtgatcctccaacctcagcctcccaagtagctgggactataggcgtgtaccaccatacctgtctaattttttgtatttttttgtagagacaggattttgccatattgccgaggctggtcttgaattcctgagctcaaagcgatccgcccaccttggcctcccaaagtgctgggcttataggtgtgagacattgtgcctggcctgagaggcagtttaatatatcaatttaatatagtttagcagattattgaaatatttacttctatgactctcaatagtatgctttgagtggctacttcttgatttttcagttttaattatttctgttgacatcccactgtggaagatgagattttagcctccttcctccctctgtccctgccacataactactatccccaaccactgtcttcccaatagaattataatcaatattcagtatctacattactacactatgtccatgctattcacagttgagcctctagtaaactatgaatacttttcctttttgtgatagaatgcaatcttcaatcatttctgacaaagagtgcatgggaaataaattgtttcagacttgcatatctgaaaatttgtacttattctacttttatacttgattgtgagtttagctgagtataatccagttgggaaaatttttcattcacaattttgaaggaattattctgttgccttccaacttctattgttactggtaatgttgactgctaatgtctaaagcattatgattcctaatccttcatgaccccttttcctcatggagaatttgtaggttcttctcttttcctgggtgttgagaaatttcacagttatgtgctgcagtatgatctattttcatccattaggttgggcactcgggtgctctctcaattagtaaactcatgtcttttcattctgggaatatcttattttttagaaacaattccttcttctctgttttatttgttctattctctctttctggaatttctgtttttcaaattggaacttctagtctagtcctctaattcttcttttcctattctatttcccatttattttccggttgctcagatttctgggaaatttcctcaactctgtcttcccacacttctattaaggttttcaggtcaggtgcagtggctcacgcctgtaatcccaacaccttgggagaccaaggtgggtgcatcacttgaggacaagagttcaagaccagcctggacaacatggtgaaaccctgtttctactaaatatacaaaaattagccaggcatggttgtgcgtgcctgtaatcccagctactcaggagactgaggcacaaaaatcacttgaacttgggaggcagaggttgcagtgagccaagattgtgccactgcactccagcctgggtgaaagagcaagactctgtctaaataaataaataaataaaaataaaattttaaaaaaggttctgttttcattttttgtttcttttttattgcaggattatgctcttgttttgtaatttcaatattatcttttatctaaggatactaatgagagtttttggaagtcttttgctatatagtttgtttcctttcttctacttttgttttgatttctgtctttcattttaaagattttcctcaactgttcagaaattcttagtagtcaattcatttcacctggaggatatttttgctagatttagaattcttggtggccagctctttcctttaagcattttaaagatgttggttctgctgtcttcttgcctccatgaattctgatgagaaatctgctgtcattcgagtcactgttctacctaaatgtaatatgttgtttttttctcttgtttctttcaagattttttttcatatatttgttttcagcagtttgattacaatgtgttctgggcatggtttttgtttgttttttatttaggtcaccaagcttctttaaaaatttgtgtcttttaccaaatttgggacatttccagttgttatttcttcaaaaattttttctgcaccaatcacttttttctttcccttaggagttctaatgacatgaatgtcagaccttttgatatttttccataggtccctggggttacgtctaatatttgtaaaacattttttctctctattcttcatgtcggataatttatatttcttcctcttcaatttcaccaactcctccatcagctttgttctgctattgaatccatgctgtaaatttaaaaattttagatattgtattttttgttatgcaatttaaatttaaaaatcatttctatttctctgtcaataacttctatctttccattcatttcaagagtattcacctttaccttacagaggatggttgtaattgctactttaaagtctttgtgtgatagttccaatatttggatcatgtcagagctggcatctgttgattgttttcttcccgagaattttttaagttttttctgctttttgtaatgttgaacaaatttagattgtatcccaaacatttcaaatgttatgttgtgagactgattctgttaaaatcctctggaggagtttgatttttggtttatttgtatgttttggtcagcaatcaacttggttaggatcagactgcaagttctgtctcaccttctgtgggaggtggttctattgtcagttcagttttcagtgtttactatgcttttaggtctgccccttgtgagcaccacacaaagattagtctgagactaaacagtcactgagcagtggtttacatcatagtccagttctcagagccttgctatatttctttggatgtgcctcatacatgcacagctggaaggtggcccaggatttgagtcatttcatatagaattaggagatcttcttcttttgctttctcctgagatttcccctgcattctttatctcccaagtgcccctttttgaagttgtctggccagaaagatgggattccctcagaggtttagcttcctgcattgtcatgcagtttcacatgactgccctcggggtgaagcagtgacagtaaggagacacaaaaaaacaattaagcatgaattattctgttctctccagctcaaagggttcccttttctttgtcctttggccagaaatgtggggttttcttggagtttttgctgtttgtgcatgctacatagttctttgatttggcccacacttgtatcaaagctggggagataaaggagaaaagaggaaagaagaaaaaaggtaggaaggaagaagggaaggaaggagggaaggaaggaaggagggaaggaaggaaggaaggaaggaaggaaggaaactgctattctccttgtcattagccattcttcaagtttttactttactttctttccttttatttttttgagacaggctcttgctctgttgcccaggctggaatgcagtggtgcgatctcgacctcccaggctcaagcaatcctcccacctcagcttcccaagtagctgggactacaggtgtgcaccaccatgcctagctagttttttcttttattttttgtagagatgaagtctcgccatgttgcccaggctggtcttggactcctgggctcaagtgatcctcctgcctcagcctcccaaagtgctgggattacaggcgtgagccaccacacccagcccaagtcttttgtctttccactctcatctctattatttaatttgatacccaggtattgctttttgtatcttgtccagggattctggttgtaatcagtgggagataaaggctacagtgggcttactctatcttgggtggcattgggagttggctcattttgaaagttcaggaataaaaacgtgtttggtggcagggcacggtggctcacacctgtaatcccagcactttgggaggctgaggcaggcggatcacctgaggtcaagagtttgagatcagcctggccaacatggagaaaccccatctttactaaaaatacaaaaattagccgggcatggtggcaggcacctgtaattccagctgctcgggaggctgaggcaggagaatcgcttgaacctgggaggtagatgttgcagtgagccaagactgcatcactgcactccagcctgggagacagagcgagactctgtctcaaaaaaaaaaagaaaaagaaaaaagatgtttagaagctctgagcttgtgggtgaagcctgtcaccttttactttactacagagtgatttgacaagactgctcagttgggaaagctccacaatcagtatctttaagtctttccttttgggctggttagagttcccagagaaagagccctctgctttctgcctagagggtgaaaccctggctgtcaacctctggaggtccagtggataagagagctggggttctgagtacccagcatgcatacattctcatattgtccctgtttgcagaatggctccactgccttcaactgtgcctggtgtccccaagggcagggatgctccatttttccctttccagaaaataaaactccaggccaggcacggtggattatgcctgcaatcccagcactttgggaggccaaggcgggaggactgcttgaaactgggaattcgagaccaacctgggcaacatagggagaccttgtctctatgaaaaattaaaaagttagctgggcataatggtgtgtgtctgtagtcccagctacttgggaggctaagaggatcacttgagcccaggaggtcaaggatgcagtgaaccatgattgagccactgcagtccagcctaggtgacagagtgagaccctgtcctaaaacaacaacgacaacaaaagaaacaaagaaataagaaagagagagaaagagggaggaaggaagggagggagggaaggaaggaaggaaggaaggaaggaaggaagggaggaaggaaggaaggaagggagggaccagtcttttcttggatgaagaaagacaatcacacagatacttgaagctggggagcagatttggagccagcttatcccttgggaatgctgactggttgcctgtatagaatctaaattgtagcaggaccaggcctccaggtaaggatggcaggctgaacacagacatcagttttcactcccttctgagactcaacttctcaaaaaatttcagccaatcctttcaattttagcatcctccttttacctacttccagaggtacgtgatgctcctaatacctgagcttttgggtaattctgctgcaaaaattatactggccctcatttgaccccatgactgactgactcactcaggtcttgaaggtcatttatcattctttcatctgtttttctgtagaagaaaaacatgaatttctgtgaaaaacatctgtatttctgtgaaaataatactttatttttgtctcttcttccaatgtcctcattcttatatgcctacttaaaaaaataaaataaaataaaataaaccctgcattatagtttcaatgaagtttaggaagaagtgaagatagatgcctgtgttcaacctgccatctgacctggaggcctggtactgctacctttttatatagcaatgggtataggcaatgggtcagcatttccagtgacaatcccctgccttctctatactgcattgttgcctgtatagttcattcctggttaaacacgccatactcaagtgccctttccttctatggatgtgctgtaggagagaatcttcctgcactgtggctttttatagtatttaattaccagagcactccttttaacagaatagtcacaaaggcccagaattccagatttaggtgtgatgaagcaagtcgattgacttctacagccctggcacagatatctttcctgtgtctcacattaacatctccatgtattatttgggcctggtggggtggctcacgcctgtaatcccagtactttgggaggccaaggtgggtggattgcttgagctcaggagtttgagattaccctgggcaacatggtgaaataccgtatctacaaaaaaaatgcaaaaattagctggctgtgatggctcacgcctgtagtcccagctacttgggaggttgaggtgggaggatcacttgagcctggaaggtcgaaactgcagtgagcagtgatcatgccactgcactcaagcctgggcaacatagtgagtccctgtctcaaagaaaaaagaaaaaagaaaaagaatttccatgtattatttccattctgttaatgtacaacattttgaaaagatcttctgaaaatataaggactattcttaggagagaggacaagcttcaggctgttagagactttaaaacaaaaacatcgattacttttgaacagataagaaaattgatcttccctttgagaaatatcaaatcagccatctgttttagctaaaacatgacttaacctatggctaataatagcaaacacatgcctccaggaggaattaactggggcatccgggtgatgaaaccaatttcatttagaactagctggggatttaatcggcccattattgggggtcatgtttagcttcacaaatttcaatataataaagcaaactagatttcagttactagagcttattttggacaataatcgatatgatgagaaacaatatatgctagtaaaacaagaccaggcttggagttgggtagcccagaatttgaatcctggctccacacctcctagttgtggggctttaagaaagttacttaacctccctgaccctgagtttcctttactgaaaatatacttcaggctgggtgagatgggtggctcacacctgtaatcccacactttgggagactgaggcaggaggattgcttgagcccaggaatttgagaccagcctgggcaacatagtgagaactccatctctacaaaacaacaacaaaagattcttttaaaagtttgccaggtatggtggtgtgcacctgtagtcccagctacttggaagactgatcatcctccccgcaagcgtgggaggatagcttcttaggagattgagggtgcagtgagctatgatactgccactgcattccagccctggtgacagagacagaccctgtctcaaaaagagaaaaaagaagacaaaaagacaatatactcagcctggtgcaatggctcaggcctgtaatctcagcactttgggaggctgaggtatgaggattgcttgagcccaggagttcaagaccagcctgggcaacatagcaataaccgatctctatcttttttttttaaatctgctcaaacagtatctcatagtgttgtatggattaaattaaataatgtttgtgtattaagcagtagagctcaaacaaacaaaaataacatttgtatatagtatctgcttagtatctagaatactatagatactgagatcatcattatcatcatcaccattacataaatttccttggctttttttcttctgtttggctacacaaagaagacaggaaaggagaggtagagtttgtttttgatgaaaggtgctgtaacggaaggcagtgaatgatattgtgactcctgcctaagacacaggcagaaggaccattttggtttcctctacaacgtcggtcacaaccacgtcagttaaaaaatgttatgcttcactgagaaatgctaatcagagctagagatgatgtcaatggcccatcgttagtgggtattcttttatttatacatccggggggaaggatcttacgggtgggcaacctgtaagatctacctacattccctcacacagaccacctggagaccaaagcatgcatagggatgaatgccttttgtttctttcccatagactattttgtgggccaggtgatagatttttaatttttctgttaaaagtcatatttttatctgttttatttttgaggacacactaaatgttctctaaccaaaatactgcaagtgagaaagagagagaaagagaaaggtatggagtgtatgtgtgtggcagggggaggattgggattagaaatactcataaaataattaatgtgcttggtacacgggcaatatagagatgtatatccaacaattagtgattgcacagtcttcccaggaacatgtggaaatttttacaaaaagtaaccatgtactactcataaagcaagtccaaacaaaaaccaaggaatcagtaccatatagattttctgaccacaatgcaaattaagttagaaatcagtaataaaaagatactttaaaaaaactcatacctttaaaaatctcatatatattaaaacatgtttccattataaccaggtcaaagaaaaattcacagttgaagacaactacatataacttataaggaaaatactgcatatcaaaactcaggacctatagctaaaattgtactttgaagaaaattttgggccttaatttcttatattagaaaagaagaaaggttgacaactgatgaatgaagcatccaacttaagaagttagaaaaagaacagtagaaaatacaaacgaatattttagtttttttcttgctatggagagaattgcatttgtaaaagaaataaacaatgacaacaacaaaaagttactgttctgatgtgatgttgctaggtgttcatgaatgaaggaatataaaactgtgtcattaccttccaatttcattcagctcagtgtaagctgagtcaaaattttccttccaagaaatggtggcaccatcagcagcagcatcttcggaagaaagagaatccatttacaatatcgaggatgtcatataagaataaagaaaaaattaacagaaaagctccagagtaaccccaaagcaattctcatgaccaaatatggagtctgactcagtgggaaaatgccatgattctctggaatgttattttaaaaaatcatccaaggggaaactgacatgacagagtcagcttctctctcccatctacttaaacaaagggaaaacgcagtacaatcagaaatatgacttctggatattttataagataaatttaggagaaaaatttaaaagggataaaagaacactttgaagacctagaaaagctcgtgaaaatcaggggtgtaaggaggatgcagagagagaagggaaaagttacaaggtcaagaaaggagaaaaggaaaagacattttagaaatttctctttctaacctgagccacatagcaagaccctgtctctacaaaaaaatcaaaaactagccaggtatggtggtgtacacttgtagtcccagctactcaggaggctgaggttggaggatcacttgagctcaggaggtcgaggctgcagtgagctatgatcgcgccactgcactccagcctgggagacagagcgagaccctgtctccaaaaaaaaaaaaaaaaaaaagaaagaaagaaaaagaaaaaattatcttcttatcccgctcttctcaggcattaatgagcttatctggtatactgaaggatttagcttaacccacaatatatgcctgagtagattctttggcagtattaccttgtgtgatgtgtcaattccttggcaatgattcacgcacgcgtgcacacacacacgcacacagagcaagcacagcaatacgcatttgtgtcatctgttggggaccaaggttcacaaatagcaaaacacacagcatcatccggggctggagcaagtgagcagcctgggaggagaggggtcacatgagcagcttggctcagctgaccctggagccagttccctcaggtttcccagagcacagcctggctgagactgaaggcggcttatccatcttgaattctgaggaaacagagacccagggcgtaggtttctgcaagagtcacaggctcgtgggaacaaagtcaaagtcactgggagaaaaccgggctgactgtgggactggaactggagagcatttctggattcaggtgggggcagaggtgatttagagggtttcccaaacccctctggagactccagaattcccttaaccctaaggcacacaggtccatggtctttcgagtacagtcagctgccccccacccactgctctccccagtacacacagaccactcccttgcactgcccaaaatctcaccatttggagatttctttaggatagccaagttttctctttcaaaatgtccctgggacgaagatgttttgggcaaaataagaaccttatttgtaaaatactcatatttagctagctatatgtgtatcttagttactttttcaacaaatctacataaaattatacccatgttgaaaaaagaaattctgggatgattgggggtgaggaaactatgaaatcctcatgttgtaatgaagtccttcagccaggttgcttttctttcccccatttgaagtgggtgagtccctcatgcagggaggtacatttacggctggcaggggtgcccgggtgggaggaggctttgtattactgtctcagaagaggggcagagaacatccacaggactcatgactcctgcctgtaactctccattcctggggacatactcattccccagggaacttggcaggtgcaggggtaggcatgggtgcagacctaacatttgcccaagatgcttggagctatactttacagaaacattcttcttagtcctctaaaaggtgcctcttgcatggtggcctgacatgtcaacgtgcccaggagtctgtgacaggcagccaggtgcctcaatcccactgcctggggggccagggctgggctgggactcaccatattctggaagtcgcacaaactccgagggctcgctgggaaggctgattccccaggggttactggcactgactctgaactgataaggacacccgggactaaggtcttcgatgacgaggtaagtgtccaaggtcgaagccactgactgctgccagatctgagaacctagtgtacagtttcccaggagagggaaagagaaaagccaaagggatattgtttcaaagaccttcagcaaacaaagacaggaaaatagacacattcaattcaagggatgcttgtggttaccgtgtcaggctctgaaagcctgtaggctaactatggtagtttggattcggtttcctaaatgacggaataaatggtgagaggcgtggaagaagctggcctatagattctgttcactttcaaatgtgcaagtgccagagtaaaaagacatagataatacagaatttacaggggacacatggcaaacttttaataaggccagaagagtatatttttagttaataacatgagagaaaatatgcatttggaaatggaaacaaaatggaaagtaacatgtattgaacactacgtacacgtaaaatactgtggaaggtgttttcaacataattctctcatagttaaatgagatttaagacagaaagttaattctgtcttaaatccacagaaacccagtgaggtagagaccgctaatcttactttacagatgtagaaactgagcctcagaaatattgaacaatttgcccaagagaacttagttaatgagctgaactatgaactggataatgctaaggtaaacatgaactttgtaaaatgtgtctcccagctcactattaatacttttgtgctaacctgggagacacaagagtgaacagcttaagaaggatgcagaaataaatgggtttataactgcatagggcctgtttaataagaaagaaggagaaagaagagttaaaataataagcataatggaaagtagaataaaacaaatggttttggttcgggggatagggtagcaagcacttgctttcagttcaattgtgtaattcctaatgttattcagagtaattgtgttattactgtgaataactgtagttgtgttattaacaattagagctatctggcagcttcttattttaactaattcttgctaactagatggaagtctcagttgtttctaactgctgaagaaatatattcacttttagcatgtaaatgtaacaaattttaacagtttaaattgcacaattttaaacggcacaattaaaaaatatatattctcttaattttatctggggatagggggtgtagaactccacccgtactacactagttatttctctgggagaaagatcacaaattatccaagtagacatctgggttctagtgctagctctgcctctcactaactataatcttgtgtttcttaactttctttaggcctcagcctcccactctgtaaaatgggattgatcatccctgtctgggtgatcgagcatgttaagtagggatacatgcatgaagacaccttgaaacctgccctgggtcataaatatgtcagggaggtttggatcatcttagccaaaacagctgctcgacatctgggatcagaaggcagctgtaatctggcactgaggcctctgtgctgagttggaagacacaacaaggaacaacttctgaaagatgaggaggctaatatgttcacaattctgaaggacctcctagagacgaagagaagacagaaaaacaagagcaggaggccgggcgcggtggcttacgcctgtaatcccagcacttccggaggctgaggcaagtggactgtttgcgctcaggagtttcacagcagccagcagcctgggcagcatagtgagaccctgtctctactaaaaatacaaaaattagccgggtgtggtggtgtgcgctttagtcccagctactcaggaggctgaggtgggaggttggcttgagcccaggaggtggaggctgcagtgagcccacattgcaccactgcactccagcctgggttgatggagccaaaccctgtctcaaaaaaaataaacaataaaaataaaggaaaataaaagtggctcatgcctgtaatcccagcactttgggaggccaaggtgggaggatcacgttagccctggcgtttgagaccagcctgggcaacatagcaatagcccgtctctattcaaatttttgaaaaaatggttagcatggtaaattttattatgtgtgttttactgcaattttaaaaataaatgttttaaaagaagagaaaagaaaaagaagagcaggagatagtgcaccttcctctctgtactccacagtgtaaccagaaatagtgcagtttcctgtgctggaggggggcagccagcggagaatcacggaggtgcagcttctctcctgggcaatggggcggttaggggctgctggaacacctatggagacagaaatcaggatcaggtgctatttctgcagaacttggcattttacaccaaggtataagtcatctaggaaacattacctaaccgatgtcacaattttttcctgtgaccttctccaccaagtggcatacctttctccaggcccaaggcagatgtgggagacacaccatgctgtctgaagttcttccttgggctaaatactgcaccctgaagataaagcttggccagggaactaacatgttgatggtaggtttatggtaggccacagacagctcttagcaaagattcgttctcgtctcatttgccagaactttatttttgaatttttacaatggacattttctcccccaggtcgcagggagcccttataatgttcacttaaaacgtagtgccaggtgtgctggctgacgcctataatcctagcactttgggatgccaaggcaggaggatcacttgagcccaggagttcgaggctccatcactacaaaaagtttaaaaaatgagctgggcatggtggcacatgcctatagtcctagctagttggaaggctgaggtgggaggatagcttgagcctgggaggttgaggctgcagtgagtggtgtcatgctactgcactccagcctgagcgacagagcaagaccctgtctcaagaaaaaataaagtttgagtaacacaaattgatagagacagaaagtagagcagtggtggccaagaagcactggggaggagggaatggggagtcattgttcaacaggtacagatgcagtttcagaaagatgggaagatgaaaaagttctgtggatggatggtggtgatggtaacccaaaaatgtggatgtacttaatgccactgaactgtacacttatttatttatttttaagctgtacatttaagatggttcagatgggatgggcacagtggctcatgcctgcaatcccagcactttgggaggccaagacgggaggattgcgttagccttggagtttgagaccagcctgggcaacatagcgagaccctgtctctatttgacttttttaaaaaatggttaagatggtaaattttattgtgtgttttactgaaatttaaaaaataaatgttttaaaaagtattgtagaaaacacagcaaaatcccatctctacaaaaaatgcaaaaaaaattagcgaggcatggtggtgcatgtccagctaatcgggaggctgaggtggttggattgcttgagcctgggaggtcaaggctgccatgaacagagatcatgcctgggcagcagagcaagaacctgtctaaaaatatatatatatttcaaaaggtttgactaacaaagaggctgtaccttgcactttgactgttgcagacgttgatgtggtcccgtggtcatttgttgctatgcaggtataaatcccactgtcttggggcatcagattacagatcttcagggtgatttctccagaatcactagggacaccaaaaggatgctcttcagactccagtaatgagacacttgactgctgggtaaaatcccatagggttggcccatggtgtgctgagctgagagtcctcaggcccgaggtcagtccctggtctgtgagctacctaccaccctgtttctctacatccccagttccttatatggaaaaaaattttctggccatgcccatctctcaagtttgttgtacatgagggataaaataaggaataaaatgacataagaattagagcattgtttgaaatatataaagttgtatgcaagttctggctcatagtattattagtattattaccactagcaactttgtcctagaatattttcagtttcacagatcgataatgaatgatggaaaaaaaaaaaggaaagactcaagaataaaaatattttaagtatttcaaattctagatgtgggatcctcaaaataattaagtgaatttctaagaaagagtaaattccatcacctaaatgataacttccccattcaccccaatacaaggtccaggaatatccccaggggagaactgctctgaaatacagaagtcacagtcagctctgccccttccctagggttatgatatcccctggcgcttttcatgatcctcaccaaccactgcgtctcacactaggcttcttggacccactgatattttatgacctggcctctttatggtctctgctgggaataccaaggaatgatggtcttcttctttttcccatacacacaaattaagtcaatgaatgaaagtttcttgattctaggtgcttcttccactaatgtttctcaagcatctagggcttgctaccacttgtccactgtaagcaacagtacacagtccaattcatagttagtaacaataaatgctgacacaatgattgggaggcagtcagctaagttttgttaaatggactctgtgtgtagaagcatccttgcggcttgattttctattgcacattttagaattagtcgtttctttttctaataacactgttcttaggtgaggaattaaacatctcactgtttcacagcaacctgaaaggcacaaaaaatgtcaggatgtccagatgtgaggattacatttttactacaggtctggagccttcgccacttaaatcagaagtctaaatcttctgacttagagattcacttggggatctgtagggaaagatcatctaccagggtgaatgtaaggcagtgactgtaaaaactcttcataagtatggtgcatgcttgacttgagatataaaggtttatgtttttccctatttgtttaatgtgggtctggagcacagtctttacaaaccattctgttgatcccaggtatgtctacgtggtgctgagcaccgtgggaaatgtgtgctggtgctgctgcaggtgtccatcaggctgcagcgtgagtggcagaggctctgactaacacttgagtctcctcagtctctctctaatcaagtccaagtgtttgcccaagaacaggctccagggcagctattctcttgcagagcccagtcaccagagcagaagttgcaccccagattcagcctctcagtgctgtgtcaagcaaggggctgctgttgctgatgttagggcaatcggcttaccaagaggagaccgtgtatgtggctgagctgttatcagtgtcaaggatgttctggtctggacccttccaagtgatggtgggctttggccgcccacagactttgcactgcagtatcactgtgtccccaagcaagcaggtcacatccaccaagggcacaaggaattctggggccactgtgatcaaatcaacatacattaacatcattcagagcaaatttagaataaaatggccattttgttttaacacacctctctcatttcccacccatgtcatgtaatgattcaaataaccttcagtataacactggtgagtcatctgggtctctttaaaaagtgtttaaaagagataactgtttattatagaaaaaaataggaaatataaacagaaagaaagaaaagctccataatgtcataatccagagataattactgtaggcattctggtatatacccttttgggctttatataaacagacttcttataaaacttggatcccattatacatatcgcaagctttagtctttttcatctaataatttatcataaacctctttccttgtccattgatacagaactatatcaccattgcttacagccagtgctttagtgctggattaactataatttatttaaccaatccccatgtttccaattctaatgctttttaactcaccttcttggatgaaatttggatttaagatctgaaaaacaaaaagaaacagaaaattgcttgaatcctaaactactaaaagagaacaagggacttcaccgtattgagtaaaaagaaagtacaatttagggagatgaggcctggagcccaacttcccactgtgttgtgactgtattactgtcacattagtaaaacctctctttagcaacaattggcacttggtttactctgtctaattcagttgttcacattcctgcctggcagcgtgcggccccaggcaggtttattgtaacttggagctctgctagcagaggtctttctgtcctccctcttctcagttgcttttcttcccttcacaggcagaaaacccactctcttggtcattatgcacacaagcagtgtggtggcactgattcttcctagcatcataaactcaaaaatagaggacctgagacctatcaaactggaagggtcattgaaattcactaatacagtggattccttccaaatgtcctccctttaccctttgctcatccccacgcaggggaaacgactcttcaagcagctaaacacagagcttctctggatgaaggggaataagagaagtcgtctgtctcttctttctcaagcatgatctcctatagcccaggcctgcatggggcaacttgaagccactgacccaaccattccaaccctttccacttcataggtgagaaaatgaatactaagtgactaagccgactaactctggtcacaaggctggttcaagggaggaactgatagggctcttggtatataccatgctgcctgcctcaggacaccctggagatttcacagtagggaaaacattttagccaactagccattctggaaagctacatcttcttgaggagatggtcacttttccccccatcttttgtattaccactaatcatccatgtccagattgtacagcctggcattgttttaaaaaagcacggactttggagataggctgaggtcatctgttttgtttaatgtgattgtatgttaattacgtaataactgatgttccactataatatggggataaataatacctagtgtaaagtgttatcacaaagattaaataaaatcttgtacatcaagtgcttagcacaatgcccggcaaataacaggtactcaatacctatttaaataaagatgatctcattttaatcatcttccttctgctaagcagactgttattaaagtggcttacctttaatagcttatttggcaaaattcttctttcctttatcatgaagccagaaaactcacaagccttacaaaatagcccaactggggcctctgcacttatttccctgtatgtatgcatatctttgtgaacatgcatggtttctgtgtgttcttcccttatagaggaatccatataaaccctttggaagaaagacattatttccttctttgcgttcccctttgcaaatcaagtgcctgcttataccacccaggttttctaaaaagtgggctgcagaaaacccttgtgaagccaagttctgggctgagtgccccaactctggccattgcaatgccctctgctagtctcaaaagaccacttacacctctgcttagcctatctttaaatcagtggttctcaacgcctgacctgggcagccttaaaaacacgagaggctaatgcctgggcctcatgcctagagattctgttttaattggtgtgaggtggggcctgggcattgggattttttttaactctctaaagcgaatcaacatgcagccttgtttaatgaacctgatgaaagtccccctctattccagggaactgatcttggataaaccaacttcctgccccggaggcttttctggggtgggatgggggagtggatgagaacatctggtagaacctactgcatttcccacacctaaaagagttctctgtgtgaaaaggtttcgaggcatggcatggggaaggatgtaaagggttgctccactcaaactattaaatcaaccacgagcagcactgcatcacctgtaggggggcactaaagaggccaaacatttctcttcctggtttggataaggcagggagaatggcatcccagtcagtcatttgacagtcaaagaaaagaaggctaagaatattttctaaatgttaacagtggttatctcagggtggtaggtttaagggtggctttgtccccattcaaaaaacattaactgaccttgtcatactctctaagtacagttttgtgggtagagaaatactaagacataggctctacccttgggatttataaagcatcttgatttggggtgactgttgtttcctttcttttcttatgtgggcttcccaaatattctgcaatcagcatgtttcgctttctttatttaatttatttatttattttgagacggagtttcactcttcttgcccgggctggagtacaatggtgtgatctcagctcaccgcaaattccgcctccccggttcaagtgattcccctgcctcagcctcccgagtagctgggattacaggcatgcgccaccatgcccagctaattctgtatttttagtagagacggggtctcgccacgttggtcaggctggtcttgaactcctgacctcaggtgatccgcctgcctcggcctcccaaagtgctgagattacaggcatgaaccaccacgcccggactcactttcttaataattatttttgaaggaaaaatacagcacggtcgaacctattagactataagctcttcaaagacaggaagtatttgtcactcacctttgtacctcagggccctagcccaagggtctgtcacataaagggtatttaataaatgttggtgaatacatatttgacctttgacttcatttcagaccttccaagaacttatgaaccagtaattaagtcttattcgcaatctttctttccagtgtctctgctaaggactacactcaaattaggaatatttgcttttgtttgggcatggtggctcacacctgtaatcccagcactttgggaggcccaggcgggcggattacttgaagttcgcataagctactcacaaactccttcatgtgctcctccaaaaccctggaggaagtgcagagcaaatgttatgtatccccatttcctaggtgagatagggaagtgaagtgttaagatcacagtgacagaggactggctccgagagctcttgaattttattccagtgctcgttccatcatagcattcagcaaagtgggagggtcttaggaaaagcattgtgaaactttgtcattgacatcaaaggcctacctgcttatctttgctctccacctctctatctatcctatctctactcagtcctttaatttaaaatcctccagcaaggaccaagagcctgggcaaggtccacactaatgttttttttctaactttgactctggactacggtcatagaagattcctccctcattttttctctttcttctttgaagcaaatcagagtacgaactggaggagaacacccttctcacacagtagactaattaccgatatatttgtctgtggctccctatggactgcagggcccatgaggacaaggaccatattgttttatttattattactttttatttatattcttaaattttttattttctctttttttgaattctaatgggccatattgttcgctagtattgcctccaagcttagcatgatacctggcacatatgtgctctgttgatatttgtcaaatcaatgaaaagcttaagtggtgggatcctaattttggggaggagagctgagaaaatgtcctgccatgaacttgctcaggaatctaatcagtcagtcaatgtctgagatgtagccaatagtgatcttcctcctctgcactcttctaggggctgtaggtacctctaagtctctgaccatgaactgctaagtaccataacgtcttactgaactgtatttgccctaccagacttgtgaaccttttgaaggtagtaaccctttcccgtgttttatgcaccatcagtcataaattttttttgctatgaaccatcagtcatatttttttttgctatgagtcttgcacatagcagaaaaatcaaatatttgttgaatgaaattaactgaagtcacccaattagtagactagaaattaggcttcctgaccaccttgtctagtggtcattgctggtgtgtgcaggatcctgagggctttatataagctgcacatttttcttgaaatataatgttttccttccttagaaacaggttggagtcaatgtaaaatgatagatgggaaggaggagagagctggaatccaaaatagtggttgtgggctgggtatggttgctcacgcctgtaatcccagtactttgggaggctgaggcaggaggatcacttgagcttagttcaagaccagcctgggcaacataatgagacctcatctttactaaaaaataaaaacaaatgagctaggtgtggtggtgcacagctactcgggaagctgaggtgggaggattgcctgagtccaggaagttgaggctgtggcaagccaagaaagtgccactgtactgggcaactgttgcctgggcaacagagtgagaccctgtttcaaaaaaataaaaaaaagaaaacatagacgaaatagtggtcgtggaggaaagatgacattgttcacataaaatgcacatgttctctctctgtgaaacagcacaagagaatgctgggccaagtccgggaggacagggctggtgtagacaccgtgggaaagaactacaggttcctaaagctggttttatttgaccagcagagggcagcaggtggcagcgcttcctcccaggcgagaacaagaaccaccacaatgtgatccatcagcaacttagtttccttctggagagaaatccaataattttatcgttttttcttcaaaatggcagggcagtcaggtaagaggaaagagttacaggtaatattaaccagcactgactaccataagctgagctttgaggaaatcttggcgtctattttccttgtcagccaatgtctgactgactctaagacttaagagtgagggtgaaattctgtctagaaaatgagttgttaactgactccagaagaaaaagacctccactcccatttttcccaaattccttatcacagtcacaaaacagagctcaaaactacgtattgagaacactgaaggaataaaaacgctcaaataaacataaaccaaataccctaaacccaactgacagctgcccagaatatatttctatatttttcctttttctattccttttacacttgtttcatatgaacctgtattcagagtaggcaggaaaggaattttagatgatgagatctagcaataaaataaagatataagaaaaacaatttttaagaatttaggtataatagtagggtttgaaggtttaacccttcgtgttttcaatctggccaaactggactcgaatttctaaagttttagaaaatattcctacctctgctcttttttttttttttttttgacagggtctcacgctgttgctcatgctggagtgcagtggcatgatcaccactcactgcagctgcaagttcctaggctcatgtgatcctcctgccccagactccctgaggagctgcgactacaggtgaacacagccacatccaactaattttttctattctttatagagatggggtctcgccatgttgcccagctggtcttgaactctgggcctcaagtaatcctcccacctgtgcccgcccaatgtgctgggattacaggtatgagccaccacacacagcctcctctgctcatttctaaatgagcataagacaagctgtaattttaaaaaatgtaaatgcaacataatcccaagcagcgatagacttgtctctttcaactagttccttactcccaagtattttcgttatcatttagttctaagtgtttttcttcaactatgatttttttcttttacccagttgtaatgagtatgtttttacatttccaaagatgtgagatttttaaaaaggatatttttgttgatgatttctaacttaattgcattgtgcttggaggacttggtctgtatgatactgattccttgttttttgttgaggtttgctttgtaagtagcacacatggtcaatttttgtaaaaaaattccatatgggccgggcgcggtggctcacgcctgtaatcccagcactttgggaggccgaggcgggcggatcacgaggtcaagagatcgagaccatcccggctaaaacggtgaaaccccgtctctactaaaaatacaaaaaaattagccgggcgtagtggcgggcgcctgtagtcccagctacttgggaggctgaggcaggagaatggcgtgaacccgggaggcggagcttgcagtgagccgagatcccgccactgcactccagcctgggcgacagagcgagactccgtctcaaaaaaaaaaaaaaaaaaaaaaaaaaaattccatatggttttccaaaaaatgtataatcattaatttgggggtacaggtctctatatgtgtccatgtgtcaagtacattgattgttttatggatatttctagtccaaatatccccctttacccctcaatattttggttagagaacatttagtgtgctgtcaaaaataaaaaggatgaaaatatggcttttaacagaataatgaaagcatctatcacccatctcacaagatagttggttgcaaaggaccaaaatgggggtgcgttgctgtgtatgcactggtctccagctgctcctggcagcctaggagtcagttaggaagggactggaggtggggggccgaggaggatgcagtggtggagttacagcttcttctttataaatcacatttccaacctagccatgaccttgactttggataatgcctttatgtatgagtgttttggagtcttatcccttaatgatttggccctgattatgccctgattatgccccaatcccctaaacttcccagagtcttcggagctatgtaacagattaacatttgttctgaggacccagtgccatggctcatgcctataatcccagcactttgggaggctgaggcacgaggatcactggaggccaggaattcaagaccagcctgaacaacatcgggagaacccacttctaaaaaaatttaaaaattagctggccatggtggcacgtgcctgtagtcccagatattcaggaggctgagggtgggagggtcacttgagcctgggaggttagtgctgcagtgagccgagatcatgccactgcactctagcctggatgacagagaaagaccctgtctcaaaaaaaaaaaaaaaaaaaaaaaaaaaaaaaaaatcccaccagtgtttgcatagatgctggttaccttcctaaagcacaggacgaatcatatggactgcttaaaacctactgctgttccttggagtccatggatcaagtcctggcttcctagcaggtccttccatgcctttgttgtctgtctggtctcaacccatctgccaggctttatctcctacagctcttcctacataactaaccccaggtactcagaccatatacctgctcagcatgtgccaggcacctcccacctcagggcttttgttcatgctctctcctcaccctctgccttctctaagactgcccacatcctattagttcatccaacccacacactgctgcccagtgaatcaatgaccacactcataggctccctgggagacaggctacctaagaatacacagtcctgggaaagtcacttaacctcactgtgctccagttttctcatctataaagtgggaataacgcgaatagtacctatgtgatgatgttgttgggagctcagcacagagccagttacacaggaaagactgctaagtagtagctactattattgtgagcccagtgcctgagtgggtgcataaatatccacagaatgaataaatggctccaggcaggattaatcagtccctcaccatgactgttagagcaggttttaaagtttgctgtgtaacatgggcatttatttatacctgcctccttcttatgcttcttaagccttaagcatgggaaccaatcttacattgttcgttagtcctccataataatcactgcaatgccttgtgttaatcaaattgtgtgaaattgaactgactaggaactcacgctgagtgaactttgacagcatgggggtggggttggggggtgatggtctttgcttcttcaatagcaggctcttagaggaacttctgggtcaatggtaccttgtaatctcattagtgtacaatgtaaacgaaacgggttaggcccccagtctagggtgagggtgcgatggaacatgcatgacagggcgtgctgagtgactatgttgacctgagaaaccagttcagacatttccaactcatgtaattggacttcctttcttggttgctctggctgggctcttgagtcattgagaaagggcgtgggcgaggccaagtaattatcccaatagtcaagagatttgaaaagttgttgaagaaattctcctcctaaaacagatgtgcagcaaaagagggcctgagcctgacccttgttaagaaagtacttgagccatacgagtagacttcctctacagcacatgctaagtttggtctctcaaagcaccaccatcaagacttgctctttttattagctgtatgaccttgacctccctgaacatgtttcccccaggagggtgagaaactctaccctacttacttcacagggcaattgcaaggaacaaaaagcataatagatgtgaatctgctgtggacgatcttcttaaaattctcccaggagagggaagcagccactaagctcagctcccttctcttggtggcggaatataaatcggtctgcatggagagtcagaacaaagccaggcaggaagtcttcaagccacacccttcagatatattacaaagaaaatattttgcaaaaataaaacgacaggaatgtgatgcttcactttcttttcatccaaagggttcttttcatgaaaaaattctttttataaaatgcggaaccaggcatcagtggacacacactggggatgccaggaggttggtcacctggctgggggtgtaaaagtttccttcaatctgtctggccgggttattttgaagctctaggataaggaggccagagtagctgatgtggtagttggcggggagtggggtgcggggagtaggctggctcttcagatctgaggacatgaaaggcgggccagggaactgtaggtttgaggaaggaaaaaagtaccagctctggccgctcaaacttcccagagccaggagtggacactccagttgagtctcaggaggaaatctgcccaggccattcccgccacaccccctgaaaagtgaatttctggccaaagcacagaatcttccacgtcctcttcggtcgggatctcaatgttttcaaagtcagaagtgctggagagcaaagtcctttgttagcacaccttagacgtgcatggtgctcaaagggttacacatcactgtataaacacctgtacacttggagctgtgcaactttccagaggaacttggggctcagaaaggctaactggccagcagtctcatagctggcggtatccaaactagaatccaggtttttgactcctgttccagttttccatgtgatactgcctttgtggtttttgtttaagttacacttcagccttggaaagccaagatgggcagaaatgatattcctttttattgagctggaaaatggaataacacacttatacacaaaaattggcactaggagttaggtcttctcgtctgccaggatctgtgttttaggttaaaatcaacctggagatggggtaccaagtggccgcaggatggtgtaggtgggggaatagcaagcagaaaaaccagaagctgcctcagaaactagagcaccttccagttttcaaacagaaaaggacaagttcctgtggctctgttaaaggtgaaggggctgcagggatggagaggaatagagagttgtttactgggtccactaaagaatttctgtttgcgatgatgaaaacgttctggaaatggatagtggtgatggtggtataacattgtgaagggacttaatgccattgaaccgcacactcaaaaatggttaaaatggtaaatttttgttatgtatattttactacaaaacataaaaataaataaatgaagaggttaactaaatgtttcccaggttctgtttattctgaaagtgtgattcttactccaatggggaatttcctccaaaatcagcttcaccttcccaagtgctttctctctctaatctttcagagccctctcccagaagatcccaacactgtttttaactccccaagctaaatatctggtggctggtatatgactgaggataacgtctgcacttagtctgtgttgtggatgaggccagtggcatgttgaatggctggggcagaggcagggtctttttggaatgatgacaacctctcactctgatgaactgactttctctgctacaagaggtattgggttttgttttgttttagttaaaatgcatgtaattacttgagcttggtgtaaaaactgggctgagaatccttatccttgaaggcccaagtcagggaggctagttcaggactttcaaccccatcctgtgatgtaggcaggtggcaatgctggggctagggggcaggtacaaaaacagaagtgagcattgacacagttctcagacaacttttcaaaggtggaaacctgcctcacctgggtcctaagaaaaacctagtataggccagatgctgaccctgaacacgtgagcctggggtgtcagtgcagataccggggtagagacaagactgaaaaaggtggtggctgggcatgtggttctcagccctgcaaaaggcacaaggcagtctaaccttactggaaaaaatgaattactattaacctgttcctaaggtacccttgtgtttggttttcagcttggtttgactcttcttccatgtagaaacatctctttcatgtatgatgcccccctttcacccccaccccaaagtttaatcagtacaaggtaaagaagtaagctgaactatggatgatactcgtcatctttagaacagttctccatgaggtatggtcacagatcagcaggagacttggctgcaggagacttggccacgaggggatggcatagacctagagccaatcttgcagtggcattggtgtggcatgtactgctgggagtaggagttgtacttgaaaacattcacaagcaggggaaggaaaaggatgtaaacattagagcagaattacctccctttacctaattgggtattcttggaaagctttgtaaatctgactcctaggattcaaggtgctttattttcttcttaattaaccttcaaggatgcgcctgtatatctccccaaaacaccatggtgggacaaatgccagcctgaaggtagcaagcagccagtgtgtaagtaaagaccccaggaaactgcccttaaaggaaccatttggtccacttattgagaaaaagtaaagaatgttttggtgacatcattcccatgcaggcaggagatgagagcctatgcacagctagggctgggatcaacaggctggcctcaggttaaagggagtcagtcagggcaggatttaacatctggagatctagcacggagtgaacacacagggtgcatggtcccattatgtcagctggggttccaggaacagagacaccctcagcacaggattcagctcactaagagtaacagacacattcccagagagacaacgcccattgcagcatcaagttcagaagacaagggtgaggttgggggccaggctgggtctgggaatgatgccccaaatgaccacttgaatagtgagaggccttcaagaggtggcctgctcacctatatttcaatttggatctttaaggtatagcctctctcttcagtatgcactcctcatcattttcttcttctgcagtgtacattgcaataaggttctacttacacatgccttgagaaaattctcaactcatgttgatcagtttaactttctatatcttatttatttgcatctgaaaataccaaactagcagtgccaagttgcctgctttccctctggacttgctcatgtgctcaaagttaatttgaagctggcaacacattcagagaatgactgaagtttaggccaggtgcattggctcacacctgtaatcccagcactttgggaggccaaggcaggcagatcacttgaggtcaggagttcaatacaagcctcggccatgtggtgaagccctgtctctaccaaaaatacaaaaattagccaggcatggtggtgtgcacctgtggtcccagctactcaggaggctgaggcgggaggatcccttgagccagggaagcagaggttgcagtaagccgaggtcataccactgcactccagcctgtgtgacagagactccacgtcaaaaaaaaaaaaaaaaaaaaaagacaatcactgaaatttaaaaggatgtatatgtaatatataagggctacatccacacatactggggatattgctgcttccaacaacatgcctccttgaggttccagctacttgaaagtttgtgcctaaaggaaactttgtgtctcaactactgtatttgaaaacttttcggacatgcatcaacacaatttttggttttcctctgttcagcacgaatattctaatgtctttgctcatgcactccacagcacctcctgaggacccatctcactcagcccatgcaaaggactaaaagccttagatgaataagaacctttaaaatgtgttcaattagcaaagcagagttaagatgtgtatatgcacacacatgttttttatctaagtgcagaatggggcattcgatgaccccagttaattttcttaatgtgtgctgctcccctggccccacatccctctgtgcccatttcttcctacagagtgggaacatcactcttctcccctagtccacaagaactggacaaggtcctaaattgtttcctggaacacaggtacctggcttttcccctgcctctgtctggccttcctccacttgcagctgacatctataatacatgctggcaatacttaggtctggggatacaggtgccacccagtatctacaagctgacaggtgtgaactccaggagagctggtgcctatcctgtgaaatgcaaggaaaacagagcctgaaatttcccctggcttccttgttctctaagatacatttaggctacaaatgccacctccactttctcccacagtggggtacgtattgagccacacctaccagatttagctctgtggtaatacccacatctacaggggactactctatcctggcagaactcccattgtcagccgattgcctcgggcctgattcaactcagttggctccttctgcagctgacttaccggctcttaggcctcatgatctctcttgggttttgtggtggctgaaacaacatggtgctggacttctctgggattaggtcaaattagaataagaataaaagtctatctaattaagtgaaatgtttgggatgatataaatttctttttaatgttgtctattttgtacttagaagaaatctctaaacttgtacccattactggagatggatgcacagatctggagaaaaacattctctgaatgaaaaaatggcaaggaaagtcagctccatgtttgccctcattgtctagggtttgtaaatttatcatggttgttactcagtggcaagccacgtaagagccacgtttctataacccaacagactgggagttggaagtggaatggatgttcttgttgatacaggcgttggttccactcccacatccctgtaagcctggggtgcgagaaatgtcccctgggcagtgtttccatctcaccatctctggagaggcctctgccgtggctccaggagacaggccctccccagggctccttttccttcacacggtgggcacagccactgctcacgggcccagcactgggctgaagtgtgctctggagttgctacaattacaccttatttgctatcagctctacatagcaaccaggtgccatacttcacccgttatttttctggaacactgagcagggaataaaacccagtagaagagcaagatgaagaggataaagggctaaagaaaaagaagcggaggaggggaaaacaaaagcgggagaaactaaacacgaaatgagtccttgtcatttagctgggactcatccactctttacagtgctgttttccatgaaaaaatgtgttctaagtttcaaataatgaaattggatattttctacataaagtcaaacctgccaaaggagaaaatatttagcaagcattcaagagaacaagtttttgtttttaaaaaaaatctaggtagagttttctaccaacactgaactgaattatgtttttgtttgtttcttttatagctgggatgggatacccagagatgccccaacatcacaatttatctttgaatggctggtcattttagcaaggtcactgttacagaacacatcaaaaaaggcaatcattgtaggaaataggacaacaatagctgcttctacctccatgctagtattagggtcaagatcatcacactctgattcctcggaactgttcgtctccttgattggcagcatgaggaagggggaagaaagagaacacagttagaacacaagtagcttttgctagagagagaggagaacttcagagaagcatgggcgatgggatcttgggcagagaaaaaaccaggtgtttttaaagtgggggtgagaatcaccaggggcagcagcatgctcttttcagggagaggaggcgggggttgtgtacaactgcttatctcatgggaaacagcaatggaagcaaaatgaagcatgagtgttgtcgaatttaaactgttgtcttctgtgaggctggacttcccagatgagagtgaaggagagtatacaatttcttttccccaagaaatctcttagactgggttttagttgttcttactttgctaaggaagggaaacaaagttccaggtagatgatcacacattatagcataattagtgctataataatcagtgtctagtttccattgtccattggcagatctttccagaggttccaatttaaagaaagcagatgacattgtttcaagatgggggtaaataagagtctgccaagcttagaattcatgagttcaaagtagtagatggattatttaaagaaataatttgggcttcaccaatgtgcccccctactgtgtccatgcaagtaaaatggcctgaagttgatgttgtctgaactctggggaaaagaaatgaaactttactaaggacacagtggcccttaaattccaaacctcagccttcacagggttgggggtttggaaggcatccctaattgctttaccctgtgtgtattctcaaacctagggtaccaaatggcagctttgataaatttaatatgaatcaagcatctcacatttttaagagaatgctgcagataattttgctgtaaaacatctgcacagtataaagagaaaggtataaaagaaaaaaaaggtacttacttgaattgaagttgccaggagaaataaaagataaaaaataaattgatcttgcatgcaaaatcctgctaaactacttcccctctggtacccatactgggaaaaaaaaaaaataacccatccacccaaattggcttgtgagaatgctgcagggtgggagtggatgacaggtggggacgcagctccggaataccttactcactttaacagagactttgttgcccagaatatccttgggtttacgaggccctgtggcttcatttttacccgtgttctccacttccgcccgctttctcatgcgtagagtatgccatgaacatgacttcctgttgtaccaaaaaatgcaccaatcaaaatggcaggtcagggacagcgatgtggagggcgggctcaccacccttgggtgagtcagcaggtgaggtgctccatcaagcccgggcttcagaggccccaaacctgcacaccagctccaagggtggctggcggctgacctcgcctccaactggaagtgagcaaggatgaactctgacctcccctggtagatgtgcaaggttgactacggcatttaaagaaaatatgaatgctaggttactaaactctaataagggagtttgtataccatacccatgatgcctcacaggactgaggaattcctcttgagaagggcacggtggatgggtgaggaaagggggcgaagagtagaataggaaagacaagggaagtatattctagaatgcatatgctactgacactttcccaggaccagacagaaagacctaaaaggatgacattgagagttctacctcatgatttgtatttgggcagggccactcccaaacaatgttgatcagacaggattttctgtggcagacatttgcttaataaacagttgagcaccactcatttacctggatattttagggcaaagagtttctcggtctatattctccatatcactcagtgtttgtgaatatatggctttgtcagcctgtagaggtcctagagcttccctattgggacaagacctaatgtgtgctcccagggaggtgagagcagcaatggcttttcaataggcctttcatcctaacttctttcttcccacaaagggtcttgggagcaacttcttcacagacctatgaagacaagctcagagcagagcccttacattccataaatatcagatctcaaagacagagataccaaaagccaagtcacaaacagcatcagtgaccctgagcaggcatcatcagtttcaggtgaggtcacagagcttgaatgaagttctaattgttgtctggaataagtaagacgtggcttcccctcagtatctccttgtcaaaggtgggcctatgcagacagggctccatgagatgagcgtccattatgggagagaggcagaggagatttaggaaaaggaagctgctgcaaaatacagagcatccctccagaacactccacatacatcaggattttaagggtactttgaggaaggtgttccaaaaatatttatccgctaacacacaggttcaaccttctgagcaggaaagagcaatcacagtaatattcttgaatcttgtgggaaagtgggctccttcaaaaactcttgtatctcctaactagtcaggctctctactgtcccctgcataccagcaccttgctccaaccgttgtataagtgagaaccagccatagaagctaatcttagatggcatcagcctgttaacttcagactttgataactttactcccaaacccatgtccctggctccttctgagaacaacttgagtcagggagatccctgctgaaaggactcccagggcaggcagcacgttgtgtatgtgtgtgtccttgtgggggtgtgtttctacatttattaaattctctgggttatttaatatgcttggtgaaaaactagaaatatgagcaataacatttcatgttcagaaggaagactgagagtagtataaatggcaggacaggcttggtttcatattcttcccagaagaactcgtcatcatggtttggggagcttccatctcttggttgcaagcccagggactgatgtggacacagggtttcagtgacgtttatcctgtaggcatcacaaccaactctgacccctgtggttatggcaggccttggggagggtgtgctgagtgtcctccactggtaaatgctgacaacctttttcagtccactgctcccctccacacacacccccaacccttttgcaagagcggctgacaagaaatcaaaatgacccatttgtatttcaatctgctctcttttgctcggtctgacatccttttaccttccctcccatggaaggtatggataagtggccaacagaaccaaaggtagggaggaagaagtgtttagtgcctggatatttagaggataaatcattaagagttagctctgcaagtcccctgattagtaaaaacttcaatgctttgagggcctttatcccaaggcttacctaaaaggcacccaaaacaagtatacttaggataaaatgcatgggggctattgtgccttaggggccactgtggatttttggctgggcctgtggttacctagtgaggccagggtgatgtcagtagctgctatcccctgacctagagggccaaagcagtgcagttatgctggtgccactgctcagatagctcatggaagccccctgcaccacgtcttccatggattactatgcagcaggggaaagcagcggagaatgccagtcaaacactgccttctactctggtcattaattgacatcagcacctcagggctgcccagttgcagggaaccagttggacagcatcaaatctgtaccttccctcatctcagaggttagagaaaatcaacaggggctatttaggagggaaggcccgggtcagaacttcagcaacaaaaatactttttatgtaggaaaaaaaaatgccaatgcattcacccaaatcctaaaatacagaaaagggaaaaaaaaaaaaaaaaagaagaagaggaggaaaagaagaagaattgtttgcacatttgaaagtccaagaatagtgaaacaggggaaaaagggtcaactagtctttaacttcattaaaacatgctcatggtgaaaatttattttacatatttaaaatagtacatttaaactgattagttacattacaggtacaacgatgagcactgtgacgccatcatattgcacatcctgacttcatccatatgggtttctttaaatagtgcaaaatactttatacaggaatgtgttcggaagggtcttgcaaccaaaataaggaaaagaagtatcttacaaattactatgaacatatattcaagtgacggggtgaagggaaatttttaaaaagttacaatctgtacagaggaattgccacagacaaccaaaaagttccctccctcctgggagaagcagcgggcctctgaccttcacaggtctggcatttgtgccacggtaattttttggtgtcaatcaaaaatatatatatatatatatatcagttacttaatacaatataaatagaagtccagtccagtgagtcctgtggtgggtcaaatgtggcaacagaaggcacaccttttgtcacctagggtttcagtagggttcttaatgaatgtgggggagaaagggggaaaaatgaacagaaaattataaaccaaaaggaaagaaaaatcatcgccaccaccaactaaaaaactggatcactccagcccggatgccccatgttgcatatggtgccagcactcaaacaccggttctgtggtactgttgagaataagcagtagtaattccctaccatgtgtttgcatttttgtgttcttttgtttgtttctgaatatttttaatcctcatactcctctcccggggaagccaacgaggcacttacttgatgctcccgtcactactttctgctgctgtggctttggtgaggggcgccaggatgctgcctgggacccagccctcggcggcgggggaatggtcgctggcaggctggtacaccagacacatgttctgctggttgacggcgaggacctggaccacctcaccttggctcacacagatttcattctccttcagtgcatagtaatctttgatcacggccatggacgaggtcccattgcagcctcccaggtcgttctgctgggagataagggtgagaggggcacaaacacaaggacgctagttcacatgggcttgctctgcaccctacccagtggttcaaggccaaatctcccactagcagggtaggcagcaggcagcattctctcttgagcaatgacatgatattaataaacatgctctgaaagtatattttttaatagcaatgtttcaacaatattatcatccagggtgaatggctccaccccacataaaggtataaacacgcctttgacctggaagccccttcccagcatacaaccttcctgccagcgttctcttacaagtgaaaggaagaacctggcactggcataggggtatgtaagcacctgggcagaatgaggtcagggcaagtgtcatgtcaggggtcacaatccttcaatggaaagaacacggattgtttgatattaaatttttctctttttgaaagtgcgctggctttactttatattctgaccctctttgagacaggactaagaatgatatctctgcccaattcaaaggcaagaccatgacctacccttacccaacttcctgcaggcaccaggtaccctcccctactcattaatataagagatgctgcccatgaccttttcatgtgagtctatttcagggcagctgcctctagacagacttgtaactttcctaggaggactggctgcctcatagagcatggtaagagccagaaattcttcagtatatacatatatattctatatgcatatacatacaggatatacatatatattctatatgcatatacatacaggatatacatatatattctatatgcatatacatacaggatatacatatatattctatatgtatatacatacaggatatacatatatattctatatgcatatacatacaggatatacatatatattctatatgcatatacatacaggatatacatatatattctatatgcatatacatacaggatatacatatatattctatatgtatatacatacaggatatacatatatattctatatgtatatacatacaggatatacatatatattctatatgtatatacatacaggatatacatacaaattcttcagtatatactttttgtttgtttgtttttgagacacggtcttgctatgtcacctaggctagagtgcagtggcagagtcatagctcactgtagcctcgacttcccaggctcaagtgattctcctgcctcagtatctgggacaacaggtgcatgctaccgtgcctggctaatttttttttttttaaagttttattagagatgagttcttgctatgttgcccaggctggtcttgagctcttaagcccaagccatcaccctgccttggcctcccaaagtgctgggattacaggcgtgagccagcgcatctggcccgatatgtttgacaaaatgccaaagtgacttcagtttattcacaaaggcaggattgttttttaaggtggaaaatcatttccaggtgatgtgacggaacaaatcagtgtggttactctaatacaggattgaacttggacactaataattttttaacataaccaatataaactaataattttgaggagaaataaaactataaaactggaacatgtagataaaaaatgtaagtgttcctattcatagagccactgagttctagagaaaactgaggcctaatgaggttaactaactcggctaaggttctaaagcaagtgagttgcagaactgggaatagaaaccaggtttgcctgattcctaatctagcacttttcccatttctctcctgttctacctaccttgtaggggcaaaatagctgtgtagactaagtctatggttgagtctttgactctccttatggtgatgtttgaattgtggattatcgacgacaaacattcaatccaagtcagacttctcccattcacacactgatgatcgacttcccttccacatcagccaatagatggtgaagaactgggaacttctttcagtaggtgctcgaggcagatcatcattagaaagggtgaactctttttaaggtgtcaaacactacagctgtgacttttagatgacgatgatccacactgaaactactctatttagcaaaaatcatccatttttatgatgatttatgccacagggaactggtataactcactcagtttatagggaaaggaaaacataattgagactagactgtacttagtgtgctgttcctgctaaaataatcagcaagcattaaaagatgctacttcctggccgggtgcagtggctcacacctgtaatcccagcactgtgggaggctgaagtggccatatcgcctgaggccaggaatttgagaccagcctggccaacatggtgaaaccccatctgtactaaaaatacaaaaattagctgggtatggtagggcgcctgtagtcccagctactcgggaggctgagacaggagaattcgcttgaacctgggaggcggaggttgcagtgagctgagatggtgccattgcactccagcctggatgacagaccgagactccttctcttcctaaagtaacccctgaggctatgccatcgtagtgacaagggtgggagtaatgagttgtcacttaccttgctggcttcgaacttgtccccaggctggtggtattcaaaccctggactgccattggaggtagatatcttcaggggaggcagaggtgggttatagctggagccctttgggggcttctctgagcccgcaggaacagaggagtagggcctggggctggcttggggaagcctggcaggttgagacctcatcacagctgtgctcctttctttccgttgatactcaatgggcgattgcagtgctgtgggataagagcaggtggttactctaagctttgggaatcccacaaggatttggaggcctcttaggtccaaggctttgtgttaggcatcgtgtggataagtgagaaaaacactacccttgtttttaaggcaatgggagaactaagacatctacctaaataatgaaaatacaaaaaacaaaacggtgccatatgtgaggtgccaagggttgtgcaaagagagagaaggctctgtaatatgtgtgtggtggtaataacaaagagcttcggaagagagctgtggccagactctggcacttaggctgcaggaaggaagcaagtgtgacgtgttggcgaggggaacaggaagtagtcaagggtgtctaggaggaagaggaaaccagaagggtctgtgaggtgggaagtgccatggtatgaaaagtctagaaagtgagtccaatgagtctggactgaattctgaaggtcatgaaaagtaattggatggaatgaactttaaagctttaaattgagattctatcatcagagagcgacatttgaggaacactgaccttgtagtggttaggaggagggactggagaggatgagacagaaggcttcttgtctaattcagaagccacagaatggtaaaagcgagaggtagaaggtctaggagagcgggaccagtgggatgtggaatggatgtgggcgtggtgaggtcgggagagatgagactgtgacagcctaggtgggaaaagcaatgcaagaatcgaggatggctcaggtttggagactcggaggatggcagtcagtggaactcagaagacaggagaataagctgatgtgaaggagaagactggagctttgttttattgagtttaaggtaacaaggttgcaaggtctgagaactaaagagggagagccaggcaaatgtcatacaggtccaattctttaagaatgacttcaaaggttggccgattatgtcatttttatcagtttgcactgtaacagctatttaagtgggttaacagctggggcccagagaacttctcaattacaaggatatttctactgtgataggtacatacctcaacaggactcaacatagggtcacacttcctttctacttgaggtctcagaaggaaagattggctctgagatgcctgcacacatctctgtaagtagaagcctggccctggtccgtcatcacatccttgtctcttgtatgtgtcaaagtaataacaggcccaccagagcactgcctctctcactgaggagtgttttgtggcattaagtatttaggagatgataacctagttcagtaatacagtcagcccactgtatctgtgagctccacaaccatggattcaaccaactgtggattgaaaatatatgggaagggccaggtgcagtggtgcatgcctgtaatcccagcactttgggaggccaaggcgggtggatcacttgaggccaggagttcaggaccagccatggccaacatggcaaaaccttgtctctactaaaaatacaaaaattagcatttctgtatttttgtattggtggcatacacctgtaatcccagcttctcaggaggctgaagcatgagaatcgcttgaactcaggaggtggagatttgcagtgaactgagattgcgccactgcactccagcctgggcgacagagcgagactctgtctcaaaaaaagaaaaaaaaaaaaaaaagaaaatatatgggggaaaaaaggatggttgtggtctgtactgaacatgtacagagttttttttcttgtcattccataaacaatatagtataacaatcatttacatagcatgtacattatatcgggtattataaacaatctagagatgatttaaagtacaggatgatgtacacaggtcatatgcaaacactatgccattttatgtaagggacttgagcatccacagactctggtatcctcgggaggtcttggaaccaattccctgtggataccaagggctgactgtatctccatgattcattaggagaaaggtctcttggaacgaagtaaaggtctgaatcattgactatgcctaaataaatacagttccaagttctaagtacatagcagagttataaagtaggccttatcaaactgattttatgaatcaattcccatcacatggaattgtgatattacctggttatttacaataattgtgctaaaacatttgaaaatagaatgccttcttaaataagctaaatggacagcctgtattctttcaccagcctccatttgcataacttaattctcagaatcaagaaaactgtgcgtccctacagggtttgtttttgactgatcgatacagtgtcttatgtctgatcctgtttctttcttcactttggttgctagggagatcataattaaataaatgagtgccctaacactagcacctatactgcagttttgtggttcacaaccttaatttgaagtcctatagctgtggattcaagtcctgtttctatcacttactgcttctgtgaccttggacaagttctgagtctccttttcctcacttgaaaaaagtaggacaatagtacttacctctccatgttggcgtgaggattaaatgtgaaaaaccatgtaaaatgcttagcatagtgcctggcacagagcaaggattcaatacacaggagccattattgttatgtcaataacttcttgtttcaacttactgttgcaccttatttttcttttgtcccaaattgatgaattttaaaattcctaatttcagcttagaatctatcagaaactcctaatagaatgcaatttaaacagatatttttatatatgaacacatttttgcataaaattattttatcaacaaaagtgttcatttgaagttgtatattatattcagaaatcataagccatataaaactttcattaccatccctcagggctgggctggtgtttaattttagacattttagagtgaaaagaatcctagagatcacttagtctagttgtttttcaccaaattttttttacagttgagggccaggagcctggcccaaaaatactttctgtaagtgcaaaattgctttgaagtctcatgttctatcttaaaaagtcgtggcatcctgttacatgatctccttctatttgtctttaaaacactgtgctaaatcccttataatacagggaaactgatattgtagggaggatgccaggtgtcctgcttccaggaagactggcccatcacagagcatgccagcatgggcaaagtagatctacctgaactccctttttcacaaaaccagccacaaggcccagagaaatgtcatgactcctcaaggtcctcaactcgtatggcaccttttatctttcccttcagcattcagttccattctagacatccagaaaatgctgtatttggatcatttgaaagagtccagatcctagtactggcatgaaaaggtgacacacccgagggtgggcctgtacgtgtgtacatgcatgtacctgtgtgtgcgctcctgtgagcacgtatggccatgtaggacggatctcaggacaggcaggaagaggtggtatacccaaagtgtgtgtgtgtgtgtgtgtgtgtgtgtgtgtgtgtctcgatatacaggcatatgtgttttctgagtcttcaggtttacttcattactagttacattttgcattcaacttcaagctctatttctgcttggttagacttctgagctaaccaagtcagcagagatcagccactagcttaaaatcgcatacccctttcccatgccaagctcagtgtgaagaaaaccccagcaggggaaaaaataaagaaatatatacaaagtggcaactctacttcactccagttcacaccacccatgagggagctcctgcaagggccacaaagagctacaccctctgtgtaaccacaaattttcttctaggaagtttcagggtattacagaaatttaaagttagcaatcatctctcatttaaaaggggtaaggttggctagtaatgtggcttatgtaggctctcacactgttgggagcagaggagggatttgaactgattggtcaaactctcatttatctctagttaacactacagaagctgtgaaaagtggaaaaacacatatcatttctagccggtcctggttccttagacacagaggatgtgcctatctcagacttttgcccaaattagtaccaggtggtagtgatggccacaagacatatatcctgtgtcctataagtgaaatctcttctatcagaaagatggagcttctttttcataccctatctgttgtgcttgtgtattcagcttcagaaaaattctaaagtgtttctgaaaactacaaagttggagtacctataaaatgtgatctgggttcataactcaacatgaacctagacccaaggaagctcagaggtcgtggagtcccctgacacagccctgcaaggaaccaagcccagcacccaccattcaaaaagtctcgctgtgtttctaagacttgattgatgtcctgcacccaggcctgctggatgtcagcgttggcggcttgcagaacaaccctctcagaagtctctctgttcatgagtgcaaacttgcagggatcattgtccacattctcctccaggaccaagtaattcatctggaagaaaacgagttgatcctttttacatttaaaagattttttaaaaatcagcaacatattactcttcctcaaagtttctatttcaggacaagcttccaaattttgccctggatctagcaggacagtacttaggtttttgtctctgggtgagtgacacgatcccagggaacctgcaggatcatgccagagactggctcagcctgtcacttcagctcacagataatcactgtcgtgcagcctccatgaccgaatgttattcggctgaaagatcttcacggttctggatgtcacaactccagggcctcgtcttagggaagcagctcccaagaactgggctcttccttgcctcttctcatcaccattgggatcctcaccttgatgctccttttgaacatgtagccaggggtgagggatcccttcctgagcagttcactgaagatgacaatctgctcgaagaggaacacgcgcctctctttggtccgggactgcatgcctgcatccagctcgatcacatagaatgtgtcctgctgcagcagcttcccctgagcagtcagagtgccctgaaggaaagacgggctggggtgaagtgaatgaaaaatggggagcgagccactgccctctgggtccacagaacctccccatctggggatacgggcaacagatttgacaacaaaagcctcagggctctaggaagagactgaattaggacccacccactcatccaggggccgaccttggccactttcctgttcacacaagggccctggagggaaagggaaagcaagctgcggaaccactgagaaacagctccaggcaaatgccagaaggcaggaaggtaatatcattagcagaaaagccataatcctggcccttcttgttttttattgaaaggacaatagaaagtaggtgacacttggagctgcaagtggcctttccatcctcagagctctgagaacggtgcctgcctggttcctttgcagtatgggccaaggaccaagggcattctcatggccaccaaccttgaactcacctgtagacaagggaagtgatgaaggcaggaccacagatactctgataagtcactcccctctcttcttcaattattttaggatggagaaattctgaaatcttagtttctagttataggccaacaggtaaagttgggggtactatagataggtctccatattttataagctggtagatacttttctgggttctgtgattcttctaaaaatgactccagggtgggtgtggtgctcatgcctgtaatcccagaactttgggaggccaagccaggcggattacctgaggtcaggagttcaagaccagcctgcccaacatggcgaaacctcatctctactaaaaatataaaaattagccaggggtggtggcgtgtgcctgtagtcccagctacttaggaggctgaggcacgaggatcacttgaacctgggaggcagaggttgtggtgagccaaaactgcaccactgcactccaacctgggcaacagagtgagattctgtatctaaataaataaatacatgaataaattttaaaaaactaataaaataaaaaaataaaaatgattccagctactaggccacctgacacctagctgaggaggtagaacctatttggtttgccagtttctaatgagattttcagagacatcttcacagcttcaaagggaatatggcccaacccagaaagtcttcccagactctgtcagagcaccttgcacttctattgctttgcaacaagaagaccctgacatcagagagagcaatcagagggcctcctctgaaatgcaggtgctctttctcaggcggcaactctaccctttggcacaaatgtggccattcccttcatgtgatgccttattccaaacactacccagcagaggggtcatttttcttttgtgttcctgagaagtgcctgccctctgcctggatcatggctccttactgccaatgtcagcagccaaacaggcttatctctactctggtctaaagttaatattaagccagtgaccagctagccaggaaagctctattaatattacacaagaacctatcatgggttatagctcggccagcaccaaagggaaagccagaggatctgaaagtggggaggaatttaaaagaggaggctctaacttctctcaagcccaaagccatgggctgagggaatagacacatgctcactgttcttcccagttagctgaaggaatgcaaaaagcaggttctggtggcttgacaaaaaaaagagacagcagtgcttaacttaaaagcttgattctgggctgggtgcagtggctcacgcctgtaatcctagcactttgggaggccaaggccggcggatcaccaggtcaggagatcgagaccagcctggccagcatggtaaaaccccatctatattaaaaatacaaaaattagccaggcgtggtggcgcctgcctgtaatcccagctacttgggaggctgaggcaggagaatcgcctgaacccaggaggcggaggttgcagtgagctgagatcatgccactgtactccagcctgggcgacagagcaagactccatctcaaaaaaaaaaaaaagcttgattctgtgcttgtgggtgcccttatatgcgcgcgcgcgcacacacacacacacacacacacacacacacacactcacatgtacaacacagctcctgtgaagtttaacttgggatagacagcacaatcagacaccactcctcctgagtggtcacttcctccagagacccagagaagcacagttagactcctgttcagaaaacatggggtcttcaaggttgaagagcaaaagggatctcttggtttgtccagtatagcctcagacctgatgtaacgccaagggaaaatgtataaaactccacccagtatgacggaagaaaaatggttaagaactcagtgtgtgtctgccgagtaaccctgcttacactaatgtctccagcctgctttggaagaccaagagcctatgaaaaatgcacagcaaagaaaaccatccacatagttcctgtcacagcaaagcatgaaaaccagacagggacacatgggatgggctgaaagggcaaggaggagaagagaatttggctcaagaatgtcatgaatccaatgcatgaaagctaacttaaatatactatcccgtaaattactcatacagtggtatgagtatgagtcaactatatctctgtcttgtatctatttcattctagtttagccagaaaaaaaacaaaaaacaaaaaacaagccatttatttctgaattatcccaaattctaggaatccctttgccccaaaaaggaataatgaaagcttaggtttcagactgctgggaaataaaagatccacatctttctctaaggggatcaacaactactaggtaccaatcaataattgtgtcagttccaattttatcatattaatcttaaaaacatattgtgtgtggttaatttattaggtttggatatacgttaataacagtcagttattaagtttaaattagaaagtcaatttcctcttcaaaggttcactgttatgggctgaattgtgttttctctccttccatgcccccatcaattcctatgttgaagtcctagcccctaaaatcccagaatgtcagcatgtgaccttattgggaaatggggtctttacagaggcaatcaagttaaagtcaagtggtcatgccagtaagccctaatagaatatgactgatgtccttatttaaaaaaaggaaacggcccagtgtggtggctcacgcctataatcccagcactttgggaggccgaggcgggcggatcacctgaggtcgggagttcgagactagcctgaccaacatggagaaaccccgtctctactaaaaatacaaaaaattagccaggtgtggtggcacatgcctgtaatcccagctactcaggagactgaggcaggagaatcgcttgaacccaggaggaggaggttttgttgccactgcactccagcctgggcaacaagagcaaaactctgtttaaaaaaaaaaggaaacttggccacagagataacacagagggaagggaatgtgaagatacagggagaatgccatgtgaacataaagacagccatctacaagccaaagagaaaggcctggggcagacccctccctcacagctctcaggaggtacctgacagtaccttgatttcagacctctagcctctagaaatgtgagacaataaatctctgttgtttaagctgcccaatttatggtactttgttttggcagccctagtaaacttgtatgttcacttaaaccaaaatctttgggacacagccatttccctgcagacttgattcccctcttcaaataacagaactttgtactgtaatgttttagagttttaactattcatttaactaaaaagccagaaccaccttctcaaaaaacaggtgttccattctcctgcctaattccacttctatcacatagccctgctgtcactcacagtccctgctttatcaatcaagaagggaaaggaagaggtcactatcaggtctaaacactcataaagaactctgggtctttcctagcctggcaacatggcaaaaccccatctttataatataaaaaatatttaaaaataagccaggtatggtggtgtgtgactggagtccagcttctcaggaggctgaggtgggagggctgcttgagcccaggaggctgaggctgcagtaagccaggattgcaccactctgcactccagcctgggtgacagggcaagaacctgtctcaaaaaaaaaaaaaaaaaaaaaaaaagaattctgggtctttccaatctccttggaattctgactttggtttggctaaatgctctgtaacttcttatgacctccctactgctggacttcctaaagagatgcatcttccaggactgtgaaccagaggggcccgggtaggaaggcatagtggtgagtgaaggaggcacaggcaggacacaaggcttcagggggaggaagccgcaacagtctggactcctattgtcctggagagagtgggcttagacgcattcttaaagactcacctcaaagccctgcagacgtcctagattcatcatgtcattgcagcgtttgggaacaaggcacattaactccactgctttctgtgggaaagaacaactgttactcaggagggggaacagcactcaggcaggaagctcttggtaattcagtgctggaaaacagggacttcatctctggtggctcctttattctaggaagggatgctggttctggctgtccactctcagagagtgtggggctttctgttctagagggagggtgttggtcctcagcacaggggctccatgtcagtcactgagcatatgttgggggaatattactcagcccctcttttccctaccttcctgtttttgttcatcaattcccttgccttctcagattttctttcttctctctgttgcttcctggctgcccaggcaacagcttagcctggcttgtgaaacactagaggttttcaactaaaataatctgtcagaatggtctgtaacctccctggcttaaaataatcccatagtgacattgtctcaaaggacttcacttggaagtagtctgcagggtttggacagggaggtgaaaatggaatactttatatgtttgactcaaataatacttgccttcacgaataaaattgcatactgaggcttttgtgcaacttacatctaatctctgaaggatattaaggggttaccctttcccactatgtgtcaccaggagccaaaagaacaccagtggggctaagctctagtgcaccccaggacagatttctttagttctaggaaacactgtgttaacacttgccattcctcaagcaggtacaaagctgtttacaagagcctcttactgtctgagaggggtccacctggatccacggtcctcctgagacaatcttttcccctctagagaaagatatccaatatggtccctaagaacagcaagcattacaagcagaaaactcacctcgatatctgaacactccaaaccagccttctcactgtatctcaggaagtcctaacaagtaggggaagcagggaagagtgtgggaaggggtaaaattagtaaaatagctgggaaaaaacttatcataaaaatacaataacaccctggagactttccttcccagcagaagtggcaatggtttagagtagctgagaaatgaaattatgagtcatgtaagatgtaataacatagagagaactcccagaatattcaaatttcttttctttctttctttcctttttttttttttttttttgagacatagtctcactctgttgcccaggctggagtgcagtggtgcaattttggctcaccgtaacctgtgcctcctaggttcaagcgattctcctgcctcagcctcctgagtagttgggattacaggcaagtgccaccacactcagctaatttttgtattttcggtagagatgtgtttcaccatgttggccaggttggtctcaaactcctgacctcaggtgatccacctgcctcagtctcccaaagttctgggattacaggcgtgagtgactgcacccagcctcaaaatttcaaagctatgggagaaggaagagtgagagggagggaagacaaaggaaagggggattatgacaagaaaggagagaaaggaaagttaagtctctcttttctatttagcctcctagttccataagatgaatcaagttaagccattgtttaaaatataattaggccgggcacagtggctcatgcctgtaatctcaacactttgggaggccgaggtgggagggctgcttgaggccaggagtttgagaccagcctgagcaacatagtgagaccctgtctctacaaaaaaaataaaaaattagccaggcatgatgacatgcatctgttgtcctagctacttgggaggctgagaagggagaatcgcttgagctcaggcatttgaggctgcagtgagctatgactgtgccactgcactgcagcctgggtgacagagtgagaccctgcctcaaatatatacatacatattatactttataatatatattgattatatataaaatatattgattttatataatatattgattttatatatatataaaatcaaattttaggtattactaatctaagatttctaaagccttgcctttccctttctttctcccttgtagttcactctgatatcatattcttcttattttttaaaggtatcaagtcaatgattgagacaaagtaagaatgtgaattgaaaaaataaaatcaagtaacaacccaccttaagggcaggaagaacagccatgcagtttatttgggagcaaagctgacagagtaaccagcagtcagataaaagttcccacgtccctaccacccctcccacagttcacagtcctttgggacagtgtggtggagacagaacccctagctctacccctagctcagaacctgctctgagcctgatggatccttctccagccctcacccaggctcccagcttcttaccttgaggagcaactggtattttgttattctctgaatgggcttgatgaggaagtcactcagtgtcagcctctgatttatctcctgttttacctcctgaaacacaggcagcaatattagaagaaaaaggaactgaagaactggggtgctttgaataagggttcaaaggcatggaagacaggtctgcatgttttccaatgaagttgaagaatctttaagtaatgtgagaggtaaaattgcctagaggactgttcacttgttatgaacaacacataacacacatcaccactggcttcctgccttcctcccatgcttttacagtgagtacttccacaccttggtcttcatcccagtcctgggagaaaagctggaggggccttattctctccaccgcttcagggcaaaggcagggaaaaggggcttcttctaggacacacaagcctatggagccaggccctaaacttagatctccaaacactcagctgagcgctttttctaagtgatgatgctgcctttctcccagcaaaataaatccttctgggctagaccaagcagactaggaagtggctgcaaacccttcaaccaacagaagactccttagtaagtggtccctgggggactggtgggtacagtctgctccagggtcacttaagaagaactggagcttctcaaaccgtctctgtgttcaggcttattctgcaaatgggggattctcaaatcagaacccagactgggccacctcagctcctctcaagtgaaggtgctcatgagaatttagctaagaagctgctttctctgttgaggcagctattcctgccatgaatgggtcaacggtgctgtgtgggggtcacatatggatggatgacgtctggtatttctgaaagtggctgttttggcctgagttttcctcccaccccagttcagcaaagcctgcacagcttacctcaaagtaggcgtcatactcagcaacgatgtactctgagcgcggcttattctgacaataccacacgtagatgtgcagcttccgctcctgaaagagcagagagagacatgtggacagtcaggcatcttgtgtcttttgttcaatctcagagtgccgtgctggcctccacgtggacaaaggacaaaggcgcacttggggacgcaccaaggcagctgaatatcaaggatataaatgtggtgggcaagagccactttccaaatcgccaaggtggtcaaaaaaacaaaaaaacttagagagggctgagaaagaaggtcagtcaaggaagagcagaagagaagaaattttatttacttttttttctgagacagggtcttgctctgtcacccaggctggagtgcagggtggggccatcatggctcactgcagtcttgacctcccaggctcaagcgatcctcctgcctccgcccccccaagtggctaggactataggcatgtgccaccagccttggttaatttttaaattcttcgtagagatgggggcctcactatgttgcccaggctggtctcaattcctggggtcaagccaccctcccaccttggcctcctaaagtgttggaattacaggtgtgagccactgtgcctggccaggattttaaaatgaatataaatgagcctagtgaaggagttggggaggaggtgatgggagacacttacgtgcttaataaagagctgtgccaatctgtcttgctcctggatacacttttccagttccgccaggaaaaaactaaaaggagaaaggggataagagaaggaagccacattattcagaactgtattatttctcaataataagatgaattacagaagactctcccctaagccctactccttgagtcagatgcaggaagaggactcaagtcctggattcccaggacactggatcctcggggcagcattaacacttactccttatgccagtcataaatctgatgaatatttccaaacacgattttgtcctttcctcgcatatcctcagggacacccttttcttctattctcttcatgaagccctgcagcagcaaaggcaatggttagtagcatattttcacaggaaagctttctgggccatgccacacaccacagcacccctgcaagcccacactctctgcgtgagtttgcggacaaatgcttctgtggtttctcactattcaaccaggtctttaacccctggtgcagagcaatagagaaaacttttatgagtttcaggatccccttctttgtctccagtccccttaagaaagcagagcacagaagaaaacaataagctgtccctcttccttctcccaatccaagttaatcaggtctataaaggctcagaactagatacatctggcctagaaataagtcttaatatgttaatactttatagtctataaaatgtgatcatagagaatttcatttctgttttaaaatcaggttttgaggttggacaggtagcattatccccatctgacggacaagaaaacccaggcacctgggtgttggatgatgacttgtccataatcgcaccactgatgtctgagttccctgcatttcagcctcccagtcttcagattccctcgtcctctactcctgggctggactgcatatggaagctattgtacctcttccaccccccagccccacaaaaagacaagaataactttccgtaagttaaaattcaggttttctatatggctggttaatctgtttatccaagattcagaataagcaaatacaaaaccctaagtcagcagatttcacaggatgggaactcaggccaaatgtaaggaaccagcaggcaatgtaggctttaggcatagaatttttatttttttgttttatttttacttttatttttattttttgagatggagtcttgctctgtcgcccaggctggagtgcggtggcgcgatctcagctcactgcaagctccgcctcccaggttcacgccattctcctgcctcggcctcctgagtagctgggactacaggcgcccaccaccacgcccggctaatttttttgtatttttagtagatacggggtttcaccgtgttagccaggacggtctcgatctcctgacctcgtgatccacccgtctcagcctcccaaagtgctgggattacaggcatgagccaccgcacccggccgagaacttttagacttcatgttctttcaagatgattaacaatagggctctaagccattcaagttacccatttactttctcaggctttttttttttcatccaagtgtctaagtccctcttaagtgaatccctacagagctagatttgtttaatttactaccaagtcgactcttaactgtggacctgtcaaccttgctcattggtgggtttttcttttatctgtctttttgctagctgtaacacttacccttgaaatctatggaaatgtataagccctaagatcccactaagaatgaactgttttatgcctatgtggctcatagctctgaagaatatatgtccacatagttaaacatcaaagaaaagctcttaagacaatagcttggtcacctaaaacaaagtggaatgagttccactctaaccaagaggctcccccaaatgctataacattcaggccactacttccctctaaatatcttatttcaaggggaaaagaaaaatattgcctacatattctacttattaccatttttattttcatttctgcaagtgctcagacagtaaagtacatgtaaccatcagattaaaacaccttggcctaggtagggtccaacgtgctcctggttgggtgaccacagacccacctggaaccctctacttacctccaccacaatgcccagatccttgacatagtctttctctgtctgtaccagctcattcaggacaaacctgagcaggagattaagaacagtgagtgttcctcttcattgttaagccaaaaatcttcacttaagttcacagaaaagttactttggcacctttataacaagaccccttaaaacacccacacttatctcctgggaaagatgcttacggatgctttccctagaggaggccctactgaagggctgaggacaccaaggccagaaaggacttccccaggtgacatacaatagtcacacgaaaaatgacgctcagtacctagcattcttctttctattcttcatgtgtttctccctcacctacaactgaacgattgtatagacagagggcagaaagattgacaaccattttggcaaaactgcgttctgaaagctttgaggctgggcaggggttaagatgagacttttcttccttcatttcagctccattcttcacttaacaagaagagaaagacatttatttgattaccaacctgtaagtcctccaagacaaggatagatatcaagtgaagtttttaagatatggaagctgcaattattcagataggtatcatggtaactggcctggaaaacccccagtcaaggccagaaagatggactgcagacattccaaaatcacacatttaatgcagcactaccttctccaggatgcaggatttaacaattacaaggacatttgctctcttggtttctttcttgttaattctttctaccatttactatgtgccactcccttcatctgggttttcccatgcttataataaggtaggtattgtaaaacctattttatataaatgaaaatgcagagacagaaagattaggtaacctgaccatgattgcaaagtgagtagcagagccaggatttgaacccagttgtgcaagagtccaaagaccatgctctttcccagcagcccactgcttggtaaactactctgactggctcttgggagtccttgaagcctcaaacccaaacactctttctgtcttttgtccagacactaaagagctttacataaaatgctaaagttgtgcacaggggcagggtggtgctgtgcaacctactggagtcaaactcttccaatctgattggaatgagttttgcctgggaccacacaattgcattttgggcacaagtagcagaaatgataaagttctgagatgtcaaagtgggaccccagcacaagggtggtaaccatttttaacccaggaagcaattcatctgaaactcttgctccgtatagccccagaagccaccacattcctggagcctggggcctctgggcaatggggaggaagcagaggaacacatgcttctttatcagtgcacccagcacttccaacagctccctctccagcacagacaatcatgtgttttaggccacaggaaggaactggcaaggccaaatgaaagcatttaaatatatctttaccatggcccaagttaccgcctggtagaaagtggcaaaagaaaacccacaggaaagttagagtgggaatatggggctgggagggccctctggagatgaagtccagctctctgtctccaggcgatatttttatcctaagctatttgctgacagatgagggctatctttggcttctcagcctttagagaagggaactgtattaggtgctgctagtggacctgtcatctcttcccttgaagggttaatgaaggagaccatgacgtattaaaagacattctgaaaagtgacatcaaggatttaaattgcaggcattgcaaggcagtgcacaattaattgccaaatgaactgacaacaaggcatgtttttcatgataagttcttattagtagaagttatttacaaacaaatgttattctttggtccaactaaaattatttcagctactggttagaaccacttctaacctcctttcacagggatagggaatggctggtcttccacagaaaatctcttagattcattgcactggctgttctctctcttgagaacactttttctccatggctaatttacctcccccggtctttgtgcaaatgccagggccatttaaaattgcagcatggcctcatttattctctggatctcccttacactgctctatttttttttctttttcttgtttccaacataatacataatttattttgtttattgtctgatttctcccactagaatttaaacttgccatgagagcaaagacttatgttgttattatttgtcttattcactgatgtatcccactgatggtacatactggtgttagaccagtatttgttgaatgactaaaacttgaagacaagtaactccattctcaacttttttcttctcctggacaaatgactatttgtgttcatcttttctccacggagctctcatttaaccctttgacgccctactgccatcttctggattgagtcttggttcgctacacccctcagcctctggcctcacatatggtttacagtgaaacacctatacaacaccctttcatcaagaccataaagtacagcaggagagaataaggatgagatatagtaagaggtatgagatactctaacagctgcattttcaagatagctcaggatgtgaagaggtgtggattttggcaagaatgagaagagggagaagagatgcgtaaagtgggcaaaagagacagcaaacttttgtggcctgttgaatctggacaatggcttaaatgactgctcaaaggccggttcaagctacatgctaagagtagtgactggcggctgggtgcggtggctcacgcctgtaatcccagcactttgggaggctgaggctggcggatcacgaggtcaggagatcgagaccatcctggctaacacggtgaaaccccgtctctactaaaaatacaaaaaattagccagatgcggtggcgggtgcctgtagtcccagctactttgggaggctgaggcagaagaatggtgtgaacccgggaggcggagcttgcagtgagccgagatagtgccactgcactctggcctgggcaaaagagagagactccatctcaaaaaaaaagagtagtgactggcttttcccagggtcacctgccacctcagaggtcacctttctgacttaagctttgctttgacttgacaaaggactaagacatcagctccaacttggcctcacctgtgtaacaacaacctgagaagctaaggagactcagctttgtgcaagtgctaggaaatttccctttgggtatggcatttatcaacctctattccatttaccaacttcttggggttccccctgagtactcacaaagctgagggggtaaatacagaatttcaggatttacatgctacttgttcatctccactatgaagtgatagccctgctttcaaaccaggccttcactgtgatgttctcacttttgtttcctaggaaacagaaactcataaatagacactttatacatttctaggtaacagaaggacctggcctcacttatttttgctagttttcatgtctgtggctaggctaaaggagtgatgaatttgagagagaaaggcaggctaattaacaacagggagggacccttcacacctgccttcccaattctcactactgcttataatctctcacatgctgagctatgtctaagactcatcagtagctctgcttccaacacagagtacaaccctaaacaagaaaacaaaagttggccaagtgcagtggatcctgcctgtaatcccaacactttgggaggctgaggcaggaggattacttgagcctaggagtcccagaccagccagggcaaccaagcaagactccatctctacaaaaaataaaataattagccaggcatggtggcgcacacctgtagtcccagctacttgggaggctgaggtgagaggatcccttgagcccaggaggtcaaagctgcagtgagctatgatcataccactgtactttagtctgggtgaccaagcaagaccctgtctcaaaaaaaaaaaaaaaaagatagaaaagaaaaagaaaatgaaagttttggaggagttctgcttttgcactagtggtatgtggtatattcttgatcaactcaaataacagattgacttcatatcaacataggtaactcttgcataacatgggattgttctgcgttatgaattttattttaccactaactattcaaagtggagaagaagttctcttggaactaatcccagaaacagatgcaaaattaaaacctttggagaaggagtagagacaggacctgcttggtggtacaacagctccttcctctatatataactttcctacatttggggaaatgttttcttaggtgatctctatcagactatctgccacggtcagagactctctgattctataggccctcagtaacagtctcatagtttcctcaactttgccattttccttttatcactatgttttaaatttctaacagacctacaaccacactttgtcagtaatagctgctatctcacagaatatactttagcctaaacttcaatcaagtcagtgccaaagtggctcaatgtttatcagtgctatgctgtacagatctgagtcttagaatgaaagatgtcagtggaaacagcgtggggaacccctctcgaattttccccaacctttgtccattgtccaccgcactcacatgtgcaccacagggaggaactggggaagccacttacatcctgcctctcagggccttggctttctgttcttcttctgggtttttaggaggtgtgggtggggccatcccctcattcaggcagcctgcagggtctttcaagctcccccggtatgagcttccttctagactctgaaaagagagaataaacaggcttagagaagtgtactttgaaaagtcatttggaatccctgtgtcctcccagcctagccacagacaacatggaaaatcagtagccaaggctgttctcaccaaaccacagtgaagcactagcagaccagagactttatcctcctgcagcagggagcccagagctgccaccttctcaggcaaccaggatgtacttggcatctatgtgctgccaatttcccagacataatgaaattgtcaaagtgactatctctagttaagagctccagaggtaatgctaacgatcgcaattctataccaaatatgcagttacaaaagaaaacaagtgaaaagggtgaatatggtactccagagggaactaagggtaaaagaacctaaatttgaatcccagacctgctagtcactgaatgatttatgtgagatagccaaaattgttccatgcttcagtttttctcagttttcaaattaaatcttccctctctacagatttctaaggaataggccgagataatagctgtacaacccctttgaaaagttaaaaatgtcctatgatgatggggttttcccctgtccccatggatggaactgttaacgataaaaatattcaaaatggagtcaatcttaacacttttacaagtgtcctggaagaaggattacacagtgacatttagcatttcattatgcaaattggcagaagtagtgtggatacacagtgaggctggagagtaaggtcaagttgggcaactgtaaaacaaataatgagagactaatctaaggctattctttattattattattattattattattattattattattattattttattttagagacagggtctcactatgttgcccaggctggtcttgaactcctgggctcaagtgatcttcccgcttcagtctcccaaagtgttggggttacaagcatgagccaatgcacccagccataatatctatctatctatctatctatctatctatctatctatctatctatctatctattttgagacagggtctcactctattgcccagtctggagtacagtggtgcaatcatggctcactgcagccttgacctcctaggctcaagcaatcctctcacctcagcctcccaaataactgggacagtcatgcaccaccatatccagctaatcttttttgtttgtttgtttgtttgtttgtttgtttgtttgtttaagagactgggtctcattacattgcccaggctggtcttgaactcctgggctcaagtgatactcccacctcagcctctcaaaatgctgggattacaggtgtgagacagcgtgcctggccctaaactgctcttacaagatgcctgcctaaaccagctactgcagctaacagaaacagtttcatttagtagtttttgaaaacattagccctaaggttaaagtcacaaagatttaaaaaaatgcagtccaaaaaggtaggaatgaaaggcttcagcttggccttcagtgagctgcacttggagtattgtcacgatgctctcagttgctctattttaacataggctaaacaggtagaacagaaaggtccagagaaataaatcaaaaactaatgaggttcctgatggtccattttataagaaaagatggagaatatgaagatttgaatctgaaaaacataacactaagcagatatcaaaccttccattcccccacccccaaactgacaaaatgtgccaagggctaaacatgaatttgttaccaacactagaaactggaactaagaggacagggtcttcaaactcaagagagaatttcttttaacttgagataaaagtattcacagaacaagtaatcagccatggaagttgttatatccagagcagcagtataggctaaaaatatggaaaggtcaagaagggtttagctcaatttatagatacaggatctgtaacctgttattaaggaaatgagagtgtctggtgctgaggcttgacaaccaagcacacaggcaggcattccaatgacatgtctcctggtgccatcaccagagacaggctcctgggcagatgggcccagctggtgattgatctgattacatgccttttacttcctcttctctccttctccccattgtcctgtttcagcctttgttctgcagcctgttgagtggtagcatggtgactgcaacgcctgggaaacaagccttggtttataggctcgcttgaccattagatgctgctgaagttcattcacagttccatccctttgcccttagaagaaatgaatgttttcctctagtgaattgctgctcagtggtatcctctgtgctcctaccccttcccagggagacacctctgcccacgggcactcccatggagcatccagctttgtgtggtccactctcaacctttctacagaacaaagaacatctgaggagtccattatgtcaaatggggaaatacttccatctcctcctacctgacctgttctataagcaaagtagcccaggctatctctaggggaggactctctgggatggcaacagtgagagagaaggacaagaggaagaaagaatttggctaaagctatatgctagatagtctgcctaaaacaatgggtttgattttaatgcttgtaataattcaagagtgatggcctctgaagacctagctacctatgctagagttgggatactgagccccagctaagggcaactagggttgacctaaaattctctgttctgctcctgggagaaaacaggcagtggtggccaggtttctgccacagtgaggacttatgccccacctggagctcagggcacaaatagtctcagaggacaaaggaaaaggtacatggggatagagcaacaaatgttcccatagtcaatccaaggatggggaatagaaatgcaaatagattcaaatatgtgatgaagtgtggaggaaggtcatccccatatttaaaatgaacacatttcctgggcgctggatctgggatcatatactcataacctgccccttctctgggcacctatagacactctttacatactccctgcatggctttcatcacatagtattgtaaccactggtttgaattcaggaaaatatttattgaacatctactacatgctaaatatttgcaaagtgctggagaaatgaggatgaataagacaaagctccctggcctccataatctaagccaaaatgggcactcttgtagagacacagggtacaatggagggtgaacaaaaggagcaggtggctctatggtgggatggagaaggaaagacttaatggaagaggcaatgcttgaactgagaatggataaataggagactttcactggatatgccaatgggaggacattccaggcaggagcagcattgtgagtatagggtgaaagagcaaatgacatgggggcagcctgggaagctgaaagtagcctggtgtgggcagagtacagagtgtgagggaaggagggtggcaagtaactgtgtgttttgtgagtctgggtgagtaggtattaaaggaagaggggatgaggagtgaaaacagaatcctggagaagtttgcagggatcagatcataaggaacctgtctgcatggtattaagaagtagagacttggccgggaatggtggctcacgcctgtaatgccagcagtttgggaggctgtggtgagagggtcatttgagctcaggagtttgaaccgagcctgggcaacatagtgagacccccatctctattaaataaaaaaattaaaattaaaattaaaataaagaagtagaaactttaccttctaagaccaatgatggaagggttgtaagcagggaaatagcatgttttgatttaagacttagaaatgtcagtcttaacgttccaaagatattttcataatttgggacaatgtctctgatgtgatagtaaagagaaacagaacttaaattttaagtactctgtgattaactatactatttttaaaagggtctagaagaaaacatatcaaaatttcaatactgaatatgtctagatgatgatttatgtttatactcgtcatttttccaaatttttttgaataagcatatatttcttatattcgtcagaaaagaactattaattaaaaaaaaaaaaatggaaaagaggccgggcgcagtggctcatgcccgtaatcccaacactttgggaggccgaggggggcagataacctgaggtcaggagttcaaaaccagcttggccaacatggtgaaaccccatctctactaaaaatacaaaaactagtcagatgtggtggcacatgcctgtagtcccagctactcgggaggctgaggtaggagaatcacttggacctgggaggtggaggttgcagtgagccgagatcatgccactgcactccagactgggtgacacagcaaggctctgtctcaaaaaaaaaaaaaaaaaagtaaacaaaagatccctctagcagtcacatagagagatgtcggactaaaatctaagaggaaatgatttccaacagtccagggaggagaggattttaagcattaaccctagagactgcgagctccatataaggaaaattctgtgcttgattccaaagcctggtgtacaggaggactccaagaatttattaaatatgctatgtaacttgggaagagatcaaagctcatgtgatgagacaatgggtaagctagctggtccagtgccacctaccacaccaaccaatcacctcttagttgctcctctttgataaaaatttgcatatcacaactgttaggatggctattaagaacaaaataagagatcagggtccgattcccagacagggaggcagcaaaaaaataaaaataaaaatgaaaaataagagataacaaatgttggcaagggtgtgaataaaagggagccctggtacgtgttggtgggaatgtagacttatgtagacattttggaaaacagtagggaggttcccaaataaattaagaatagaattatcatatgacccaataatccctcttctgggtatatacgcaaaggtaatgaagtcagcttttcttaagacatctgcacccccatgttcattgcagtattatttacaatagtatgctatggaaacccctaagtgttattgatggacaaatggttaaagaaactgtgatacacacacacacacacacacacagagagagagagagagagagagagagagaaatattattcagccttaaaacacaagcagtggggaaaggattccctatgtaataaatggtgttgggaaaactggctagccatatgcagaaaactgaaagtggaccccttccttacaccttaaacaaaacttaactcaagatgtattaaagacttaaacatttttaaaacctaaaacctaaaaaccctagaagaaaacctaggcaataccattcaggacataggcatgggcaaagactatgattaaaataccaaaagcaatggcaacaaaagccaaaattgacaaatgggatctaattaaactaaagagcttctgcacagcaaaagaaactatcatcagagtgaacaggcaagctatagaatgggagaaaatttttgcaatctatccatctgacaaagggctaatatccagaatctacaaagaacttaaacaaatttacaagaaacaaacaaacgaccccatcaaaaagtgggcaaaggatatgaacagacacttatcaaaagaagacatttatgcagccaacagacacatgaaaaaaagctcatcaccactggttactagagaaatgcaaatcaaaaccacaataagataccatctcacgccagttagaatggcgatcatcaaaaagtcaggaaacaacagatcctggagaggatgtggagaaacaggaacacttttacactgttggtgggagtgcaaattagttcaaccattgtggaagacagtgtggtgattcctcaaggatctagaaccaggaataccatttgacccaacaatcccattactgggtatatacccaaaggattataaatcattctactataaagacacatgaacacgtatgtttattgcagcactgttcacaataacaaagacttggaaccaacccaaatgcccatcaatgatagactggataaagaaaatgtggcacatatacaccatggaatactatgcagttgtaaaaaaggatgagttcatgtcctttgcggggacatggaggaagctggaaaccatcattctcaccaaactaacacaggaacagaaaaccaaacactgcatgttctcactcataagtgggagttgaacaatgagaacacatagacacagggaggggaacatcacacactggggcctgtctgggggttgggggctaggggaaggatagcattaggagaaatacctaatgtagatgatgggttgatgggtgcagcaaaccaccatgacacgtgtatacctatgtaataaacctgcacgttctgcacatgtatcctggaacttaaagtataaaaaaaaattttaaaaaaagatcctgccatttgccacaacacagatggacctgaaggacatgatgctgagtgaaataagccagatacagaaagaaaaatattgcatgatctcatttatatgtggaatatttttttaaaaggtcaaaatatacacaaaaatatacacggatagaaaataaaacagtagttaccagcaaagtggagaaggcagctaggaaaccgggacatgtaggtcaaaggatacaaagtagcaaatctgtagcatgaacaggtctagagacctaatctacatgaggattatcattaataaaattgtatttggaatttttgttaaataagtacatttagctactctttaggtactaatttagacttccaccaaaattttatttaactaattaaaatataaattttagctacttttgtcacacatactcaaaaaagtaactgtgtgacatgatagatatgttaatttgcttcactacagtaaccattctactatctatgggtatctcataacatcatgttgtaaacctcaaatatacacaataaaatatatgtaaaaaaataacatatggctgtggctgtcactttgggaggctgaagtgggaggattgcttgagctcaggttcaacgccagtctgggcaacaaagcgagacctcatctctgctaaaaatagaaaaatttaaaaatcagccaggcatggcgacacatgcccatagtcccacctactcaggaggttgaagtgaaaagattgcttgagcccaggagatcaaagctgcagtgagccgagatcaagccactgcactccagtctgggcgacagagtgagaccctgtgtcaaaaaaaccgaacaacaacaaaatccttaagtaatattctctggacaaaaagcatgagatctaagtaattcctaggcaaactgttggggggtgtagggacaatacacagttgaaaagcttaagtctggattttccaggccaatgacatttcagatttgtaactgggctaaaaaaaaaattttgtggaggctgggcatggtggctcacacctgcaatcctggcactttgggaggccattgcaggagaattgcttgaggctaggaatttgagaccagcccgggcaacaaagtcagaccctgcctccacaaaacaaaaacaaaaacaaacaaacaaaaaatggtggaaatctaaacttttaccttcttacaagaacctcagtaattggcctggtgtggtggctgatgcctgtaatcccagcactttgggaggccgaggcaggcggatcacgtgaggttgagagttcaagaccagcctgaccaacatggagaaaccctgtctctactaaaagtacaaaattagcttggtgtggtggcgcatgcctgttaatcccagctactcaggtggctgaggcagaagaatagcttgaacccgggaggcggaggttgcagtgagccatgatcacgccattgcactccagcctcggcaacaagaaacaagagcaaaactccgtctcaaaaaaaaaaaaaaaaaaaacgaggcttgggaatctcttccacagaagcatgctagaagaacccagtccctggaaacatacacctctgcaatggatatgatgaggccattattttttccccatctggattctgaacttttgctaactccacccggctattgacaaaacaagttaattcttctaaaggggggcaaagcacacacacaaatacagcctggctgtggccatgttcttccatgacccacaaggctggcccaaggaggagatgaatgctgtcaaaataggagaaccagagggtggaaagtcttgctgaagcaggtagggcacattctcagggtgccaggccaccaagtagactaaataggagttcagtcctggccagtctcttccctaaaggcagaggattattagccagggtccactagggccatcctgagcccagtgaactacgctagtgtgccacccaatgacgagctcagaaaggggctttcttttcttttctatctctctctctctctctcttttaatttttttttttctgtagagacagtcttgctttgtcaccccaggctggagtgcagtggcgcgatctcggctcactgcaacctctgcctcccgagttcaagcgattcttatgcctcagcctccggagtagctgggattacaggcgcatgccaccacgcccatctaatttcttttgtattttactagatatggggtttcaccgtgttgcctaggctggtcttgaactcctaagctcaggcaatctgcccgcttcggcctcccaaagtgctaggagtacaggtgtgagccaccacacttggcctaggggctttctttccagaggcttggtctttcatgccaggaagatagtagaattctggggctccaggacttcagtttagagatacactagattctcacatggccaggaagctcttgtttctcaaacttgggaaataaaaccaaattgtatagactgtcaaactattaccctgcaacattcacccaaccaatctattgctggcaaatactaagtttccatgtgcccagcttcataccaagctacaggagataaggatgacacagttccctttccctgtccttcacaaggcagtcgaggtggctaagaactaacatttgtagatgtttgattatcagtttacaaagcccgttcatgcctactcaattatcatcataactctgttgggattagatttgaatagacagaatcagcatcactaataagtgaggtaaaagagaaccccaagtagactaagtaattttcccaggactatacagtagatagcagaggcaggactaaatcctaggtcttctgattccttacacagtcactgccagcagcaacagtccacacgtctagaaaaggctttattaaaaatcacacagtgaaagcagggggagccctattcctggctcaaagataatcccttaatgcaaaacccagaaaaagtgtgttagttctatctggggagatgggtgagcatctttcttaataaacaaaagcacgaattaaagaccaaggctgatagcaagaccacagaagggcccattaatgtccagaaggactcatgggtgggtggtgactcttcgggagttttatctgcactgcagataaaccctgtttttgttccttaacagtaggtcttgtgcagcagagatcctaactcaccgaggcagaagctttggtataacaaatgaccaagtgaccataaagcaccaggggcagctctgggagataggaacatgggggatctcatggcctttgggtggagccagggagccaaacgaattctaaagcagaattccgtgccgcggcttgagcaaccaataaagcggaaagactttaaggactcagtaaagtccaagaataccagatgctcctgtaagatggaattgaactctgtaaagtggaaagaactttattagttcttcctcatatggaacgaagaaaactcccacccacaggtctagattctgccctctggggtaataaagagttagttgctctttgcaacctcattcccatggcagtgcttcaattactagaagacagctctcatgtgtcttctcctaacttctccccatagttaaccttggtttcctcaactttccttcaaattacatggaccacatggtttggttacctcctctgggcccctccagtttgttcaagaacattgtagaaggttgcatttagaatagaataatagaatgcattggctgggcgtggtggctcatgactgtaatcccagcattttgggaggctgaggtgggtggattactgtggttaggagtttgagaccagcctggccaacatggtgaaaccctgtgtctactaaaaatacaaaaattagccaggcatggtggtgtgcctgcaatcccagctactcaggaggctgaggcatgagaatcacttgaacctgggaggtggaggttgcagagaaccgagatcatgccgctgcactccagcctgggcgacagagtgagactctgtctcaaaaaaaaaaaaaaaaaaagaaagaaagaatcgaatgcattagtcacacacagctcatgacgtgtatggtttgaatacctttgaatactattgcttcttttgatctgtacattgtactttcattaaccaagcctgtgataatactcactatcttcgcagctatcacacagttgtacttagtcaaataaatactccagagcttttatgagctctgaatcttttcttcttctaagcggaagaactgataaggaataggactaagagtctcgaaggtgaaaatgcaacttagtgctcccaagcatggctgagatattctcaacctagtattgttacattgctaccacatgtgggaaggggagaaagagaaagtggtggaaaggaccaagaatcaaattttggtaggaagattctaagaaaccaaaccacggcttcctctttcctttctgtgacgtgagcttggttttacatgttaagccaaagatagctctaattctgggcttactgtaggtcctcaagagtagttattgctggaagaagttatatccttcattatggcacactcaccacagaaaggacattcattcaacagacatttattgagagcctataataaagccaatcaacaccaatgccatcccacatcccctcttctctagaaaatttgctgtgatgggacttttctatgtctttgcttacatgtttaacaccatcgatcacacaaattagtggtctggagactgtcagcagtgcaaagcttagcagtagtagtgggcaaaaaggtaatccaaaatataaaaatagactctggaaacaagtgttcatgaaaaacccactaagtgtaaaagacttttttatactaatagagcaaaaaataataatatcctaaatgacttaccatctagctagggaggtaaaacgcaaatgaaatcattacgatattttaacaaattacaccacagagctgcttaagagctgtcccaggcagtatgtggctttagtaattaccatgggattataatggaaatttggcctgggctggtcagagaagcccttgtagagaggagatctgagtaggaccctgaatgaccactatgctctagataagcaaacataagagggagaacattccagagaaatggggccatatgaacaaaaacttggagggaagaaagccaagtgtgagttcgaggatagcaaagaaaacaatttgtttggaacagagttcaacaaccaaataaataactagatgctggaaaggtaggttggagaacaggctacaaaaatatcagaatattaggtaagtgtggactttatgtataggccagtgattcccaaactttgattatatatctctgtcactgaaaataattttgctcgtgtacccccaaacatgtaacttgtttataaattctatatttatgctactgtactatcattatatacataagaaaacacacacaaaaccattttaaaatgatataaagaggctctaatattttcttcccataccccagtaagttgtcttatgtacctgagggcacccccccattggagaccactgcttatgtagccaagagggaggcaataagcagtgtttacagaagaccaattgggtgtgaaggcagacttagcagagaaaaggcaggcaatggctactgcaatactccaggaatgaattcagggcccatgctcagatggtaaaagaaaaaatgcaaaaaagaaagaaaaaggatgactttaagaaaaaaattaaatacagcatttgtagaatgaagagggtatataggttggtgtggagagggagagcaagtgagaagcagtcagagaggggtctttgaaagtcaatgtagtgcccagaagagtacttaactcctgctggtaggaaaaggaaagatggcaggaaaatagacgattttcaggagtttgacactaggtactgaaaacagcaggtttttgttttttttttttaattagaaaggaaaatttagcaggaaaagaataaactcatatgtattaaacctcatttatatagtatatgctgggatatctgaaaagggagttactatagtcaaaattattaggtagctttccatagagagcatccatcattttcctctagctcctgggccaagtgattaataagactgcccaatagaagtctggcagaagcacagacatttatcctaatgagaattgcaggaaaagctaaatgggtgatatggatgagagtgaaagaaaggaaaatgcttccaattgtcatcctgtggtgatacacttaaatgtaaaaacaggagagtggaggaacagctccatcctaatgagctatccaaaaaggggccctttcaccagcattatgccaaaaccccaaacctgctcagactcatcacctatccctccaacgggctgatgggtccatgagacagtcacaggctagacaggctgccagtggcttatgttcagtttttccccccattgtagggctaggcactgactctcttaatttattgtggtgaggtatccacacacttttgcccattcccctttataatcagcagtctacttttgaaagactttgcacgctggaaggctacccaagtccccataaaatttcctagtgctgtcaaatatccaatcagtgtgttctgggtctcagcatcgcggtgtactagcttctgggctaaccaaatatatatcaatcactgactgaatgccacttgcctgtgggccgctggatcaggcttgcaatgaggtgagtttgtcttgaatagttttcaactttcatcaacactgcagcccccaaatgatgtattaattccctatacccattcccaaacaaagtcaaaaaggactctggggtacagctttttagaaaccatcattagctgcaatcacataggaagaatgaggacaggtgcaaaggagaaaacggcagacagatgcaagcctggagcagtgtgaaggtgagacacacacagaactgcctccaggacccccacttaccagcttgtttttgaccaacttttctattgcattgacaaggtctgcagcagtaggtacttcagtggaagcctgccgggctgctagcaaagaggaggactgcaagacatcgggcagcagaggaaaagcagattagcaaagaataaggaacagtgatcaggaaataaaacagaaagtccaaagctcaagccagggaagggaagcaaagttctgtgtttagacggaagaggtgacagagggagaagagtgtgggtgtaatacatacaggcctgcccaaccccttattaggaattctagccagcagcaaatggatggtactaggctatccttaggcaagcctatgaaggaggggagaggagaaatcactgacttcctgggaggcctacagactagtgttgtacctactgacagcaacagcttggagggcgggggctactgctctgtgggcaaacgagactttggccactacacagctgcccgttgctgttttggggtgtgaaggattcaacaaacccagccttgagtgtgtccaaaaaagggaaacagtccttgctttactacagccttagatatagatctttattatgtgtccagcaaaaatgctaggggcaggacccttagagaccagcaagctagatactcccttcctatattctctccctctgtcttcctctcccgctctgcccctgacacacatacacccttacccctccacaaagcatagctggctctggtaaggcccctgaactggaacactaggaagtaataaaaggctttagcaggagtcctgaagcagctaggaactaccctgttcatagtaaagagagacgactccaggacctccctgtgtcccttttcccctgcaccagcagtgaggagttgtccatgtggttgtttgtgtggtcaatggtttggggcttcctgctcactgaaggatggtggttttttgtttggctttttcttccttcttctacctgagaagaaactgggggagaaatggttaaccctgcaccgtttgtgtgtgcttttacttccagcttatcagagcagggggcagtggtgttcccaaggccaggacataggctccttcaagtttgccccttgggttagagagaaagtttcaaaaatgaagcttctcatctaatctaagttactttattaagtctttgcttctgagatgggaggaaaataattataattaaggaagatataacaatattctttttcctctcttggggactgcaggaaaaagcttacgtccatgtggaaaatcaagttatcctctttttaatctagtaatcctactcctgggaatttattccaaggacagaagtcaaaagaacaaatgctgtatatacacagtgatctgtatgtagtagtattagccatagtagcaaacaatggaaacaccctgttaggatgtccccaacaggctgatcaaacacattatggaacagcaaataagcaaagttttctccagctattaaaattacagctaggaagaaaaaaattcatgcaattttaggaaatggtagtaaataaaacactggacacaacatatgcatattataattgtaaaagtaaaacgtacacacataagaaaaagattagaaggaaacaaggagaagacaattgcacaatattacaacggtgaacttttaaaaattcctttgacagtgttgtaaaaattgttttaatacatccaactccatttgctagatgctctgaagttcatcccactcccaaacatttataaaaaacatacagaaatcaaacaagcaggaataaggagagttcatgtatctgaaaggagactgttgccatctgccccatttctggataaggaaaaggctacacaaataaaggtaagtcagaattctgggttaaaaattatccagaaacaatgtaacatccatttctgtaaacaagctgtgtttgagggaattagagagagaaggtggtgaccttatgcaagtggggcccttgcacagagggctgtgtgagacatgggcaccctactccttaggccatgatcgctgtttataaaatacattacaagtaggcaggtctcatttccatctcaaggtgaagcaccagcacttctgtctcaggaacccaggatggtataacaccagccttcctactatgtctcttcccaataatccagagtcaaagagctggccctgaagacagggccaccaacatcacctaggaggggccacgactaggtgagtcacatcatgggggcagctgccacatctcagagtccctagactttgtccttccggcctagcacagaggaagacttcagttaatgtctgtgggttaacaattcaaatgcaaagcagagagaattaaaataagaactgagatgtcaccaggaaggacacacccgcaggaggctgtcccactacagggcagagcactagagagcacaggagagcctggagggacaggtagacaagctgccacatccactaccaccactgcaacaaaacagcacttgaaaaagcaaatggaaagtgccatacagtcaaaacccaaacctgccgcttccacgtccagagcctaagagaatcagcaacacttaaggcagaaaaaaaaaggtgatgtgaaagcagggctgcaaggagactgagtgacaagtgagggagaacataaagctgccccaagcctcgggtcagtacctggaagcacgtctaacctacgcttctgctccagaacaactgggatgatcaccgggtgactggagacacagggggcatcgatatttcaaataccagtgagcctatgcatgccagcgggccggggaatcttgcaaagcaaagtcaggcaatttcgcatattaagtttgcccacctttgacaataacttccccttagcagcatcttcattcctcataccgtcattgcaaaatttgaccaacactgggcttgactggtagctaccattagttagagtttagagttgactatagggaaaacaactaacatgcaggttgtacagtcaggtacgacaaaatggttgtggactggaactacctggaattgctccttttaggatgtgctgcttccaaagacagagccattaccctttatcaacaggacaagacaccaggcagattcccactttgagaattctgcacacaccccctccactgcctagaatgaagttggacctccagggttggggaagggacacctaccaaatagagacacaattggtatcaacatggattcatgtggacgacgagataacatgggagaaagagtatgactacccccatcacacacaaaaaacaaaatcacgcacggcacgttgctcttttaagtgagcaagtaaagaagttctaccatttcatcctgtgtagggtcgttgtcaaaaatcttcataggtggtgggaggggtgtgtgtgactcttcatcyggctcatcttcaccccaacctttcttgctcttctagaacaaaagagcagcattagttactgtgtcacaaacatgccagtggttctggacttgacattaacaaaaataatacataggaggagagttcctctctcaactcactcttaactgttcagycgcaatttcctcttttgatacatggatacacctgcttatttcaaatgagagtgagcaccagtggggaacacacacacacacacacccccaaaaagaagcaaaaccagaaactatctatcttatcgattagcaagaaaagaaaaagctggaagtagtcagagagagcctaacttttacatttttgtagggctatgaaaccatagcccaaatgccgccaggcttagctgccatttccagagggagaaatggcaggtagcataaaatcacaacaagagggggtccagttacacatcacaaagaatttcttagccacatcagtgattagagcaggattgtgtgccaaataaaacaggtatctcatttccccaaccaaaacatatccactgtcttttggttacagaatctcagcttcatccagcctaactttggctacagtctctcaaaccttccagtatgggcgttcattagttttcatgaaggcccatttaatcactgactractcctagattaaactttttctttgagcggaaaccctgcctattgtaatcttcatctgttcatcatagttatctggagtaactctggatgatctattccttttgatgtgtggcactgctcaagagacttgaaaacagctacaatctcccagcacagtcctgttttcaaaatgaaacaatcttcattcttttattctaaatctaaacaggtctagctggttttaatgtagtccttagtagaggtagggaactaatgaccaaatgactcccctcaggcccaggtcctatctccaaatctggcaaatggtttctgtctgctggaagtcttaggggctagtcagcttctgaatcagccacaaatcaaactggccaatgtcttaagaataaaaagaatccaaatcacttaggctcaaggtaacacactaatggagatttgagatggcctagttgacaaaacctgaggaaggagacatgtcagaaggccctcctgatggacaactccagggccccctgtaagtacctcatcagcgctgtctccctgaggggttgtttcatccccaggcttgggagatcccaggtcaaagctcttccgaccatcgcgaactttcttctgctttttgatgtttccatctgccttcccgctgttragccgacgcacaggactcgtcagccacttcttaagagtgttggtggagcgcttgggacccggggaactgtggatggagttcagggagggctgggcctgcaggttggcyacggactcggacttgcctccattctcgcttgaggaatgagagtatgcatctgaggaaaacggacagacacagccatgtcagaggtgstgaaggcaggccgcaaacctgggactgagacagctccatcctcaggaagctaggacacaaggcagaatgtccaggccagctgtagaccccagtccagagaaccctctcaacaacagtaagaaaggcaaacgctcactcaatttttaaagtatgaagcaccattcccggtactatggatacaggagtgggcagaagacagaaactcctgccttcgcggagtttacattctggtgggaaacacatataatagactataaaaataaaataagcaaaatgaaaagtatgacaggtggtgagaagtgctacatcaaaacacaaagtacgggaagggattagggagtgctggggttggaaaagggggtgcagattgaasaggtgrtcagggccagtctcatgacatgacatgtgagccaaggcctagtggtggtgacgccatctggcgaagggccttctgggcggaagagcaaacacaaaggtcccaaggcaaggcctggggtggccttggtggagtaagccggggggatcagtaagaaaggaagtcagaaaagctrctgggagctgggtcaacaagcatgtggtaagccagtgctatgcctctggcttttacctggagtgaaaacccactggaagattctgagccagagtgattcaatctggcttatatttttaaaggtcattctggtttctatattgagggcaagtggaaatagggaaactggttgggaggccactgcactattccaggtgagggatgttggtggtttagaagtagggtggtcctagtggttgttagaagtgatcagattctggagatgttttgctggaagggccaatatgaattgctgacagactatgtgtgtatgggatatgaaaaaagagtcaagggtatctcaggttttgggtctgaggttaggatggggttcctgagatgtggaagaatataggaggaacaggactcagggaggaaatataggagtttaggtttagacatctttgagatgcccattagatacctgagtggagaaattgaatagcagcttgccttcaagtctggagctcaggggagaaagtgctggtgagctggagataattgcagagttgtcagaggagagatggggttggaagccatgaagctgggtgagatcagcgagaggcatgggtatggataaagacaaagtccaaagactaagccagaagcaggaagacgagaggacaagaaagtagccagtgaggtaggagtaaaaccaggagggtggggtgttctggaggctgcacgtggaaaatgtcttacaaagggagaaatcggcgtgtcaaatgctgcctgataggtcaggagagttgacctaagaattaagtcttaaaactgagcaacatggagatcattggtgactttgaaaaaagcagctgtagtggaatggagggggccatggcctaattagagaggatgcaagagcatgggtgtgagaaacaagacagagtatagagaattcttgtactgttttaaaggcacagtgattggagaacaagagtttgttttgttttgttttgttttttaaatctcagcatattgtttgtaagctgtatgccatatattgactattttcaatcgtatatgcttgcaatagcctaaacattttatgtggactatcatttcattctccgtataactctatgaggtaggttctgtcattatcctcattttacagaagaagaaactgcagacttaaagagttaacttgcttaaggacatacagctcataggggcaaggtgaaatctgaactgcagacagccagacttgagcactaaactacactactggagccgggtgtggtgcctcatgcctgcaatcccagctacccaggaggctgaggcaggagaatcacttgaacccaggaggcggaggttgcagtgagccaagatcgcaccactgcactccagcctgggtgacagagggagactccatctcaaaacaaacaaacaaacaaacaaacaaacaaacactactgggcctttcatgtctacacccgcccagttctctaggctccctctgaatatggggttagggatgaggtttgaggaagagcaagtccagggaaagccacgctgccatggaagaatagagaggctagaacaggcatgtggcagatgtgggcatgcaggaaaaccacattgagcaaactttatttaattttccctaaatccttgatttctgaatactcattaaactcggaggagatcagcattagcatctacctaccttggctttagagaatagttttgagttattcaaaagaaagccctttaagtccacttcagatgtcttcctagttctcagtgcttgtttctaccagtattgagaaagctgggcattcgaaagttgcacaggagcatcagcatgcaaatcaagatcctcagtgaaaattcctaagtaataattatgtcatggagcactgattaggtcatgtattataaagatatataagacagatttttattttcgcagacctcttacctagctatacatagatatccatacacaatagagagaarcagagagagagagacagagagagagararaaaaaatgaaaaagcaagattaagcatgcaaaataaagataaattcacaaggctgtatgtgattaattgccagagggctggtatggactttagctgacaagtaagcagagttcagaggagggtgagatcagtgtaggcgggattgatctgaaaagatttaatggaagagctgtatctgaatagaagggtgaaggaattccaaaagggagaaacagcaggaacaaaagcacagaggcaggaaaaatgaaaaataagttaacagccagtaatagatcctttggatgaaataaagattagtggagaaagagaacctggatagaaaaatttgtgaggacattcaataataaaccagaggagtataaactttattatgagactactgggaaatgacatgataaaaagagttttttttgttgttgttgttaytgctttgtttttaacgaatcttggcaactatatacagcacagccctgcgaaggaggaattagagcccagaaaaccacactagggctgtgcacagggaatataaagaaatgaacgtgagacacttcaaagcaagaagtgataccattagcatctgaacaaatcaaaggtgagttgtctctgtgtatgctgatgcttctcatcatcaccatgatcttgggagaatacctgaccagctctacctcacccrcacataggcccyctgacagtgccggtttgcatactgatatttaaatcaaacacaggactaggtatttaaacaaattattacagtggcttttcatacctactcgaagactgagtcaccttttcctataatgactttgccctagacctagactagaggtctaatctacctgggaggccctctggcctacatgyagccaatagagaagaaataaaatcctgaaatagggtgaaaggatatggctgggcatggtggctcatgcatgtaatcccagcattttgggaggcagaagtggccagatcacttgaggccaggagtttaggaccagcctggccatcatggcaagactccgtctctacaaaaaaaaaaaaaaaaaaaaaaaaaaaattagccaggtgtggtggcacatgactaaaatcctagctacttgggaggctgaggcatgagaacagtttgagcctaggaggcagaggttgcagtaagctgagatcacaccactgcactttagcctggtcaatagagcaagagaaagaagaaaagaaatgagaagaaaagaaatgaaaagaaaagaaaagaaagtaaaggaaagaaaggaaggaaggaaggaaaggaagggaaggaagggaaggaagggaagggagggaagggaaggaaggaaaggaagggaaggaggggaaaggaggaggaagggagggagggaaggaaggagggagtgaaggagggagggagggaaggaaggaaggaaggagggaaggagggaaggaaagaagaagggagggagggaaggaaggagggagggagggaaggaaggaggggggagggagggaatgaaggagggagggagggaaggaaggaaggagggaaggagggaaggaaagaagaagggagggagggaaggaaggagggagggagggaaggaaggagggggggagggagggaatgaaggagggagggagggaaggaaggaagggagggagggagggagggaggatggaaggaaaggtgaatggatgcttttgccaatagacagctgtctccggtggctacaactggctggtctcatgggcacaaatctcaggctttctgagccttgaccctgctggaactttcttggatattgcttgagttttgtgcataacttggaaaacagcagcagaatatttgtatttggaagcataaaaattgagcttctaaaattctctggtatgaaggataactcacagcgttgctatactcagggaatattaggagctygactaacttggttggcatctctttaaggaaaaagctgtaatcttatctcagaaaattccttgctggctgtggtcttgggtgtgttgacattgtttctgaagtgtttggtatgggtcaaactactgttctcagaaggctgggtgataaacatcttcagaacactggtaatagaagcagggcctctctgctatctttctgctgataagtttgcagaagcttttcattcactagacccctgtgatgccatgtggctctactgaatccaagccttcaagacttattawcagcacatgtcgtgtcagcagaactagaagtccggccacattaactgtgccttgcgttaccaggcgagacagatgactgcctaagatttctgttccatggtacatcatggcctggttttgagattcacaaatgcacattttgaatgaccattcctcttcccctgttgtcatttacttctgcttctttgctttctgtgaaaattaatggcaagagtataaagtacaaattaaaaaccaaaagtaatctctattttgttgtttcaagtttgttccatgcaagcaactggagccatgcaamcatggcccaagttatgggaatctcagagctggaagcaatgtaattcatcacctagtgggtgtcctgacttgggataagaccatttccaagacactttaaatgtctggttataaaggaatgtggcatcatttagattagaaacatctacttagttaatcgcttcttcagagggattggcatgttatgctcatcccatcttttttggaaaatggctgccattagctgctagakaacttattttactatctttctagataaaacagytaagtgacagatttggaataactacaacaataatatcgttctctcgtcaaatcatcccaagtccaggcaggtgttatttattaggattcccaccttaggaaacagaaaatgagactgttttaggaaactgaggctcatagtgactggcaaaggcaagacttaaacccagatctgactccaccacacatgtatttaatcttatctctacatccaagttcattccatgtgttcctttcatctttaccattattatagaagggagcatcaagttgcttaaaggtttatatgtggaaaaccacttgtcacaaatcagtaacaaaactagtaccagcatctaggcatccctaggcctattctagggctctgaaccaatgcttcctctttagcaaagaagctttagaaactgcccaaagaccaatgactggcattaagtaaatgggaagacaaatggatccctggacactgcaaataataaagagcccctaatgttctggtatgtacagttggctttctakaattaaaaaaaattttctgaagcgaattttatcatgaaatagttttaaaatacagaaaaatatagaaaaaaattgacatctatgtactcatcacctagatatagtgtaaacatttttccatatttactccaagttttttaaaaataaaagattacagatatagttgaagccttttatgttgcccagttgcaatccyactctctaattgccctcatcaragttaaattctcttctgaagctagtgtgcatctttcttatccatgttgttaaacatttacttttatgtgaatatagtattattttgtgttttatagtttatataattatcataatgtaggtattactttgcaacttcatttattcaaaattatttgagatttattcatgttcatacatgtagatctagttcattcatgttaattttttttttctttgagacagagtcttactctgttgcctaagctggtgtgcaatggcgygatctcagctcactgcaacctctgcctcccaagttcaaatgattctcctgcctcaacctctggtgtagctgggattacaggcatgcaccaccacaccctgctaatttttgtatttttagtagagatggtgtttcaccacattggccaggctggtctcaaactcctgacctcaggtgatctggccacctcagcctcccaaagtgctgggattataggtgtgagccaccgtgcccagcctcatgttaattgttgaataatattctttcataggctacatcataattttgtaatatattttcctaatgaacatttgggcatatggggatatagagataaatagatatataattgtacaaatccatttgcatgagtgtgagaattcttctaggcagtgcttcccaaactgtctgtggtaaagaatcagttttacttgtttccaatctattttggaccagtacttttttttttttggaagaagatagagatggggtctcatgatgttgyccgggctggtttcgaactcctgagctcaagggatcctccygcctcagccttcaaagcgctaggattacaggcatgagccatcatacctggccagaccaatacttttatgaaatacatcacactcttggatgttgtggaactgtcaaaacactcattttctgggctcatctcactgtggattggacttagttcaaagaccttggctgtctgtggtcacacactgaacagcactgcttttactctaaagcataaatctccaggtggaactgyctgrctccaccactgggcackgttatgactctgggcaggttaccttggtttctgtatctctgtatcttggtttcctcatcagtagggaatattagaacctatctcataaggttgctcctaggattaagaagttaatatttgaaaagtgtttagaacaatgtctagacccagagaagcatttgttaaataaaaattaataaaaccataaaaacctcccctaattccatgactgacttttttctgtgtattcattcattctatctgtgtgttcttctacaggctagtctcgatatgttaagcgtcaaaagttttagcttcaaagttctgtgtctcatgaaagcaaaagaaaaacctaatactaccagttgccacctggtaatagattctccctatctccagtaagtaatgatagctctttaaccactcctaagaccaatgcctgmaatctcttcctagaataaggtagcctcatcctttggctatcaggcaattttccccctccctcaccatttggaagtttaagcagcacaggttattccctgaagatgacacctgcctccttctatctatctacaggggtatccctcagaatgggagcctctgaaggactctatgaggaggtaattgaacaactgttgagattatggtctcagataccatcttgggggttagaataagcacgttgatgttattagcctaagccttggggcaacaactccatgatttcaggtattttaatcacagtacagtaatctcccccttatccatgagggaagggatgcagtccaagatccccagtggatgcctgaaactacagatggtatcaaaccctatatatgtttttttctatacmtgtgtrcctatgataaagtttaatttataaattaggccttaagagattaacaacaacaactaataatgaaattggacaacaataacaatatgccagcatcactactcttgcgctttgggagccatcatttagtaaaatacgggtaacttgaacgcaagcactgcaatgccaggacaattgatccgataactgaggcagctactaagtgactaatgggcaggtagcatatacagcatggagatgctggacaaaggaatgattcagattcacatcctgggcaggacggagtaggatggtgtgasatttcatcacactactcagaacagtgtgcaatttataacttatgaactgtttatttctgaaatttttcatttaatattttcagacctcagttgactgtgggtaactgaaactgtggaaagtgaaacctcagatagacggcgactgttttagcatgtttccatgcaacayacataagtgctacctgcttcaactgaagacaaaaatcagaataaagcctaggagagcttgtgcactgaacatatcctaaccagtccattgtctgtgtcaaacattgtccttcttctacttaggtagcctttcattagtgtgatggttaataytgagtrtcaacctgattggattgaaggatgcaaagtattgatcctgggtgtgtctgtgagggtgttaacatttgagtcagtgggctggggaaggcagacccacccttactctgggtgggcaccatctaatcagctgccagcgcagttagaatataaagcaggcagataaaacgtgaaaagactagacaggcctagcctcccagcttacatctttctccrgtgctggatgcttcctatcctcaaatattggactccacgttcttcagttttgggacttggactggctctccttgcttctcagcttgtagacaacctattgtgggaccttgcgatcatgtgagttaataaactcccttttgtgtgtgtgtgtgtgtgtgtgtgtgtgtgtgtgtgtgtgtgtgtgtatatataaataaatatacatatatatctctcctattagttctgttgtccctctagagaactctgactaatacaattagtaaccaaataaaaggtacctgcataggccaggcgcaccggctcacacctgtaatcccagcactttgggattgtaatcccagcaatccgaggcaggaggattgcttgagcccaggagtttgagaccagcctgggcaacatagcagaatgaaagaaaaaagcaaagcaaagaaaagaaaaggaaagaaagaaagagacaaaaaagaaaggaagaaagagaataaaaaagagagagacaaagaaagaaaaaaagaaaagaaagaaacctgtatagacatcggtaggaactgaatataccagaaatttattatatctgatataactaatttagaaatttaatttcttgtttctaaagtttcaactcatrcttacttcaatgttacacctaaaaaaaatgctactcccctttctggtttagtgtaaaatttgccaaacgattctgaaatcagaacacactgtacacaagtcatcaaagagtgcaaacataggctctggcgaatactttattgttgcatccacaggactgtcacccattacttttctaatcacaaaatactgacttagccttgtttctactgaccccaaggcgatttggaagtagagaaggactacaattcccagacagaaaaagaagatarttctaatagtgttaggagcttagtgtccccaaagaccagtagcagtgtctttgcaaggggtaggctgggaccctagagagcaagcatatgtgcaggtggcatccgaggcttccatggattgygggcatcacaaatatattacttatgaggctggctcactattttctacattggcttgagtagtacaactcaaaaatgaaaaaactcggtttcaatccattcttctggagttcagtgatggtattcaagcacaccccaaaggcatgtcttctatataatgcatcatgtgattgttaaaagacaatggggtccagttgctccatataaaccatacctgttttatctagatggtcaataggtctataaatgtccacctggtgttmatcrtaatactgaattggaaactttgactccaatggctgaaatcagaagaaaycacaaagatttctaatatccactaacaatttacagaggggtcctttgaccttctgttcttttgtcttgctttagctccaatggcatgggaataattgcaaactcattcatattgctttcatatggcttgagttgtataaggccaatgtacttcaatacatctgtctgaagatattatatactcaaacattcctattttctttgctttccagaaataatttgctaatataaaaattatagaaatatcatatatacatytttgttcacactggaarttgaatatctagagaagggcacgtaatgggagggccaaaggtgaaaatttcctgggtagccaatggataaatccatatttgttcataagcattgacagcataaggcctgcagtaagtattattacataatatgtcctgcatggtgtacaataatactctggcaaaatttaacagaatacaagctcctggttgcatattcagctgaggtcctgaggctatgtacggccaggttctggcayggctggcttctcagcaaaccatctggttagccatcttggtgcctgggccacttagtgctggagaatgaagatagctgctatggtgacagcaacaggaaatggggccgggaagtggggggagctagaaatactattccttgacactaggaaacttgttgyccttgcaattactcttaacacaactttagactaaacttggcagatgcatcttggctcagaatattccatcttccatctcttagtcatccccaagtctcaaatgcatagcgcaaacccctgcctcccacttactatgccaccacttttagacctagtttaggagtctcttttccaatgcatcctttaccaactcaacatcctttaccttascacttcagtcagacttaactttgtgtttttataaattctgtacaactgaatccttatgcatttagaacatctrtatctattttttcccattaaattaaaagtacaaaagcaagggccacatcttagttcgtttctagttattgtcccccttcttttcccaatacggctgctcctgtcctggcagaatgtgtacagawatctgagccacagaaatgattccagatccagtggcatccacatagggcagggatccttctcatcttcagagcccattgggacattggccctcaacaggaatatttccaacaggcaatctccaaagactcaaaagtcagcacctctggcttcaaattagaagtctcctaaattttgttctaattcagtgcagatctccctcaactactgcaggcttcttcagtgctgtcctccccacgaccctggccccacgctttggctcctgttaggatggcaytggaagcagaggataaaatgaaagttcccaattgactgtcctcaaggtctcctcgacctcgggttctcctgtgtaatcctctgtctgagtcagagacagagggaggaaagccctcaaagggcaatgaactccaccctctgcccctagataagcacttcctgaaaacacaaggccgctgctctgatatactgctgtgctgactcactggactcactgccccatctagctgtctctggaagttaaaggcgagaaaattctctctatattccaccagtsgtggattctgaagcttgatatgtgggatcaagcaaaagtcagtgaaagcagatctgctgctcttctaagagtaaatattctagatattatttcaacctacacacccatttacttctgctagagtttgctgcagcttctggagagggaacacacattttttctaaactgtggagtagaaaactttcccaaaagacttctgaagagttcaaaacataaccaccaaggccgggagtggtggctcatgcctataatcccagcactttagaaggctaaggtgggaagatcaattgagatcaggagtttgagaccagctgagcaacatagcgagacctcatctctactaaaaataataacaaaaattagcctggtgtggtggtgcgytcctgttgtctcagctacttaggaggttgaggcagcagaattgcttgagcccaggaggtcaaggctgcagtgagctgtgattccaccactgcactccagcctgtgcaacacagtgagacctctgtctcaaaamcaaaaccaaaaccaaaacaaaacaaaaaccatagccgctgaaagaatatggtgaaactttacaaattcagactgaagaaagggcacattatattagtataaaatacaggcctttcattgtggaaaaaaaaaaaaccaaaatggtttcactatgatatcatctcatacctgttagaatggctattatcaaaaatcaagagataacaaatgctggtgagaatgtagagaaaagggaaccctagcacattgatgctggaagtgtagattgatacagctattatgcaaacagtatgtaggttcctaaagaaattaaaaatagaataatcaggctgggcgcagtggctcatgcctgtaatcccagcactttgggagcccaagacgggcgaatcatttgagcttaggagttcaagaccagcctggacaacatggtgagaycctgtctctacaaagaatacaaaaattagctgggtgtggtggcatgcacctgtagtcccagctactcgggaggctgaggcaggagaattgcttgagcctgggaggcggggttgcagtgagccaagatcacgccattgcactccagcctgggcaaygagagtaaaacyctatctcaaaaaaaaaaaaaaaaaaaagaaggaaaataaaaaggaattatcacatgacccagtgatccctcttctgagtacacatccaaagtaaatgaagttactacctcatagagatatctgaacccttacattcattgcaacattatgcacagtaaccaagatacagcaaccatctaagtgtttgccaacaaaccaaggaataaagaaactgatgtatgtatttatatacacagacaatgaaatattactcagcctttaaaaagaaggcaattctgccacttggatgaacctggaaggcactatgttaagtgaaataagctagacatagaaaactattgcatgatctcccttatatgtggaatcttaaaaaaaaaaagtcaaatatacagtgatggaaaataaaacactggttaccaggggctggagtagggggaagaaacagggagatgttggccagaggatacaaagtagcagataactatttatatgtatcctataacatcatgtcatatacctaagatatataccataacattcattttaaaatagacaaacaagaaatgcttactattttcaagtgatggccagcaagaattagtggataagtaggaactgagattgcctgaaatctgcactcgcctacgaagacatcacaagcacaacaaggagggtcatctaattatggcacaaggcacctaccaatttccgaggctggagtgggcaccttctcctggatttagctctctgcatgcagccctcccaagctccatatctggcaggtaagcccaatttccccataaatcagggccactcctgagtccatggtatgtcttaggccttcaaacaagccctcaatgagctccgtaaagcaccgttaactctattagcttatctagtaatattttctccttttcttttcagatggtatgaacataaacaagttcagcyctagtaataagcacaaagactcaaaatagcactatacaaatgactgtatataactgaagactctcccacagaatgggcaaggctaacttccagttttgttctcctaccagcagacttttcattcactaagatttctgcatggctgggcgcggtggctcacgcctataatcccagcactttgagaggccgaggtgggcggatcatgaagtcaagagatcgagaccatcctggctaacatggtgaaactccgtctctactaaaaatacaaaaaaaaaaaattagctgggcgtggtggcaggcgcctatagtcccagctactcgggaggctgaggcaggagaagggcatgaaccccgggaggcggagcttgcagtgagccgagatcgtgccgctgcactccagcctgggagacagagcgagactccatctccaaaaaaaaaaaaaaaaaaaaaaaaaaaaaaaaaaaaaagatttctgcactggtattttctttccattcccactggcactcagatagtttaaatctacttgctttaactacataacagctccagactgtctctctgcccccagtctttttctcctattcatttgatatatctctgccaccagagcaattgtatcgctttgttcaaatcacattcaaaacttcatcaatagtatctaatttgtcagcctacttttttatggtagttccacgatcaggcctgatctcaccttgcctgttctctgagttccactttttgataatccaaagttttcaaactgtggtccccagatcagcaagatcagtatcatctggggacttgtgggaaataaaaattcttgggccctactccagagctagtggatcaggaactattggggtggcttagtatcctgtgttttaacaagctccccaagtaattctgatgtgcaccagagtttgaagaccagtgtcctataagaacccttcactttagtctaatttttcagttcactgtactatgttgcattcttccctgcttatacaccctttagcttttctgcttttctgaagcttaccaaggacttcttcgttgtaagcccagcatgttctccttttgctctgaatacctttttgtgctatttgtttggcactgataaatgcttgtttacatattttccctcactgagcaaagtccttgagaggaggtctcctccatctttgcattgccagcacaaattctttgttcatttgtgtgagacagggtctcactctgtcacccaggctggagtgcagtggctcaatgacagttcactgcagcctcaacctcctgggctcaggtgatcctcccacctcagccttctgagtagctgagactatagcctcatgccaccatgcccagctawtttttttaaattttttgtagagacagggtttcaccgtgctgcccagattggcctcaaactcctgatctcaagtgatccacctgcctcagcctcccaaagtgctaggattacagacgtgagccaccacgcccagccaacacaaattctttggtcattaaatggctggtaatgaaaagctagggacaaaacttagcaatataacttttttttttttttttggagatggagtcttactctgtcacccaggctggagtgcagtggtgcaatctcagctcactgcaagctccgcctcctgggttcacgccattctcctgcctcagcctctcaagtagctgggactacaggcgccggccaccatgtccggctaattttttgtatttttagtagagacggggtttcaccgtgttagccaggatggtctcgatctcctgacctcatgatccgcccacctcggactmccaaagtgctgggattacaggcatgagctaccgcgcctggccagttccttaagaagttctaagtgctgcccagtcaattaaagatgagttaagaaagccacctttttctttactgcaagacttctgggaacctctartatgctaatgtagatgatgaccccagagggaacatagagcatttaccaaatttcattgagcttggctattattccctagatctggaagaaaaagggtgagtgagactcctggagatggtattctgacagcaaggtagtcagtcaaactcaaaacctgttatgaatgccaaagtaggagctaagttgcagtctagccgagttattttaggcttatgtactatcacatcaagtatacccagaagccagtgggaagcctggcctggattcaactcacaatgtgcccttcagtagtaaccttaaccaaaggtaactgcaacaggcttaattatagaggctggggggaagagttaagcagggtggctctggaaagtttaagactgtaattaagtgctacttaactgaaaatgtcacaatggaaattctcctaggaaacctgagagaagaagcaagaagaggaaactgcatatatggaggaagtaacaggtggctagaggtcaaagactgcttgtttgcagtgtccttttttggtaaactgtatttttgggtggaacaggaaagaaagtgtgaaggcttagggtctcttggacttaatgtaataggaggctctacagtcttaatctgatcctccttctcccaaccacctgtgccaagtgggttttcttctaggtcttcactacctggcttaggaaaaagcagtagacaagattgagttcagtctaagcctcctgaccaagctcagtgtttcatcctacactttccaagtctgtgctcttcccgcaaaagtctctctgtggttctcctctctggcctccttgctaccgggagcacagattccamactaaagatacacacggctaggaaaatgaactgcctggcccaccctgcaaccggattcgccagtatgatcccactggcaccagttctttaaaactttttattttgacataatttcagatttagagaaaggttacacgactagtacaaayaattcctatatactctttactcagattcctccaatgttaacattttgcccttagctttttcatctttctctttccaaactgagaataagttacagagaagattcccctttattcccagatactttagtataggtttccttaaaacaaggacatctcttatataaccataggacaataagcaaaatcagaaatttaacastgatatcctgtttttttcaaatattgacagttattccaataatgtccttcatagagaaagatcatgtcttttatgatctgcacatcttttataagtacagggtagttattttgtagaatgtccctcatttggtttgccatgtatttccttatgattacatttaaggtgtgtgtttttggtaggaatatcccaaaaatgatgcatcaaatcaggaggcatacaatattgatttgattagactatagttatgttaactttgatcccctagtgtctgtcactgggacagtgttctaatccaccaggtaaaactgcatactcacttagcccagctgttttaaaactctgatataattttggcttgcctaaccctggtcatatatgtgacaaattaactataagtaatgtttgaacataattcccatgtaaaatactcaattccattcatgaaacaatttcctgatcacaaacatgagaagaggctaattttctactccattgaagacagactgaacagtgtataatgaaggtggttagctgggtgtgatggctcatgccagtaatctcaacattttgggaggttaaggtgggaggactgcttgagtccaggagtttaagaccagcctgggaaacatagtgagaccctgtccctaccaaaataaaaaataaattagctgggtgtgttggtgcacacccatagtcccagctacttgggaggctgagtgggaggattgcctgagcccaggaggttgaggctgcagtgagccatgattgtgccactacattccagcctgggtgacatggtgacacagcaacaccctgtctctgaaaaaaaaaaaaagaaaaaagccaggtgcagtggctcatgcctgtaatcccaacacttcaggaggctgaggtgggcagatcccttaagtctaggagtttgagaccagtctgggcaacatggcgaaactctgtttctgtaaaaattagtcaggcatagtggtacatgcctgtagtcccagctacttgagaggctgaggtgggagggttgattgagcccggaaggtcgaggctgcattgagccrtgatcgagccactgccctccagccaaggaaacagagtgagaccctgtctcaataaataaataaataaataaataaataaataaataaataagaattttagaaaaagaaagtggtaattacactaaagactagaactaggttttgttaacattttataagctatgctttaacattctatttaaagttcattttagcctttgtgggcacacaaaatccatccagttgaagttttcacgtgaaacagagattcccaagtgaggattctgaaagctagtctgaggccaggtttatactcaacccatgagtctcttctatagatctcaawttgtcactgaaaatggtgttggaggtttttggggagacataaatccaggctggctctgtaactacccaaatatgttactaataaatacagaaagatcatcaggacatagaacactggctgctcttgagtcttgagtatgggagctgaccagctggaaaggccacaggctgaagaatggaaacagaattctaggaccctagtagacagtgaggcacttccagtctcatgaatcaaatttaacaacattaaaggcaggagaaatggcaagtaggtgatgagagaatagatcagtgagaaccttagaagctcaaatgttggcttctagtttagaaaacactgatttaggttacctaactgttgtagcaagtaataagccttcaactcaagagctgggtagagaggctggatttgaaagatgacacaagaccctggacagatcacttcccaattataacatgtaggttatttgcataattgggaccagaaactccctttagcaagcatcccctgcctttgggcagataaaacaaactgatatcttgccctgttgccatgagcctaatcctgagacttactagcagtatttcaactttccttcaatcaggaaaaacatccaatgtacccactaagctgctagagaaaggggcacttattcacctagggcaagagtcaaagctcagatgtcttcagagaccaacggataaggcaaacatgaaaagatggacacggaacaatcaggagaggtatgggctgtgtcaaactgggaagtgtaaatctgctggggagtgtaagacatatttttttttaaaggaggcaaccactctgctgccaaatactatacatctgggaccaaaggcccaaagattgctactctgccttgcttgcctaatggtggcaaggccacttttcctttactatagctaaaacccctggctccatgatcagcaatgattggtatggaatgtcaccagtactacaggcatccctgcagatatcctttgcagagaaaatactcartcagactatttccataagaatgcccttttcctggagcttgcctagaccttgcatcattataatgtctcttgtattaagtggggatcccataggctcgatttatataacattttatatttgaagatactactttattattcgttcattcaacacatgcttgttgagtgcttcctatatgccaggagctgttcctgatgctgagctatagcaagtgtaggagacagacaaagtcrctgaaattagaaacttgtcattctagttrgggtagagagggagtcagataagaaactaacaaatgaatgagaaaaatttccagtagtattgaacagttttaaagaattaaactgayggctgggctcgacggctcacatctgtaatcccagcactttggtaggatgaggcgggcagatcacctgaggtgaggagttcaagaccagcctggccaacatggtgaaaccccatctctattaaaaatacaaaaattgctgggcgcggtggctcacgcctgtaatcccagcactttgggaggccgaggcaggtggatcacctaaggtcaggagttcgagaccagcctgaccaacatrgagaaaccccatgtctactaaaaatacaaaattagctgggcatggtggcacatgcctgtaatcccagctacttgggaggctgaggcaggagaattgcttgaatcygggaggcagaggttgtggtgagccgagatcatgccattgcactccagcctgggtaataagagcaaaactcygtctcaaaaaataaaaattaaaaaaattaaaaaattagctggatgtggtggtgcatgcctgtaatcccagctrcttgggaggctgaggcaggagaatygcttgaacctgtgaggcagaggctgcagtaagctgagattgtgccattgccctccagcctgagctacaagagcgagactccatcacaaaacaaaacaaaacaaaaaacactgactaatgggctagagagggcctgaggacttcttcagaatgagtagctggtgacagttctctgagaagtgacatttaagctgagacctgaatgatgggagtgaaccagccacatgaagayggaaataaggctttctaccaaggtcatagactatgcagaaatcctaaggcagaaacgagtttgggatgttcaagcttcctgaaggaagttcttgtggctggagcgcagctggtgggtgaagggacatgaaatgcagttggaaagtaggcagggcctagaaccacagccttgcagggcacagcaggaagctggactttatccccaatgcaatgggaagccactggagtgttttaaaaggggccggggtgtgacataggtgatgcaataggattcattttcattracaatctttaatttctgaccactctatgttatatagccagataaatctccctccaactagaatcacctttgcaccaagaatcaccttttcttctagtgatgagtaacagatatggggagaaacagcttactacatatggatgaayaggaaccatcaggatattcaaatctggtctctggacaaaacactccatatccagctcacacatacaaggccatcctatgcctccttactatctgctcatatttcccacaccaacaagtcacctggtatctcaacttaattctttctgctatggtctagggtgtgttgacacagttttaggtaacattatcaatgagaaatgctcccatctctgatgttacttctctctctacctaggcggkccttccccagatcccacagagcccattctctctcttgcttcaggtcattactaaaaggctgccttatcagcacagccttccctgataccctattgagaactacaayacccacctccacatgctgccactctgattccctagccctgttaccttctctatagcacttactgccatctagccaactgtattgtttctttattttttgagacagggtatcactctgttgcccaggctggagtgcagtggcatgcctggttcactgcagtctcgatctcccaggctcaagcaatcctcccaccacagcttcccagtaattgggaccacagtgtgcgccaccacacctggctaattttcttttcttcttttcttttctttttttttgtagggacggggtcctactatgttgyctaggctaatctcaaattcctaggctccagccatcctcctgcctcagcctcccaaagtgctgggcttacagttgtaagccaccctgcctagtcaagccaattgtattcaccatgtctttttatttcctgtattatttsctttgatatctggggtattgctgatcctggagggatagcygcccccccyagggttagttaatrtctagagagaggcgacacctttcctatgcaaacccaccaatccagagcccacacccccaaccaccctctttatcaagctttcatttttgggccaatatccacctgccctaatcaccccaggaccaggtatcagacaactagggacaaccccttgtccccccrgagccctctacaattactcaaactagccagtcctaaacctgcttaccttgcctcacctcttaaagactccagccccctagttccttttctctctttgcctgcatgcaacttcagtgttttcttctgtggcccggtgtgggatgcmccatcctcttggggaactgtgagtaatagactatcttttcagtcacctcctcatctgttggcatgactgaatttcaaatttctattaatattaatgtactatatttaaaaatacttactatgaaatttatttcttatttgttgctcctactctcctcactaaaagctccatgaaggcagggaatttttttcccctgtttttgttcattgttgtgcttctagcagctaaaagagtgcttagcacagaactaaagcactcaataaacatttgttggggaaaaaagatttcatagaaagtgctcagtaaatatgttctaaatattamatgaataaaaaggaagccaagatgcctgtttctgtgtgcatggatgaatacagaagccaagtgtagagtgaggtgaccttgggatttgagttccagttctacctctttacctttctgaacctcagtttactcatctataaaatgaggataactaccacccacctctgagataacaatacttacttaacccaatagtgacagctwattatatgacaataaatggcaatgacagtaatgactattaaatggcagtgaacagtattgtgttgtaatacagcaatggctgtgaggcctcaagcctgcaagacagccagccctcatcctcagactkcaatgccttgartcatctgccggaatggattcactctcattttccttcccaggcagcaacaaagggagaatgcacgtctctcttctaagcagatttaaagcgctctatgccctttacycacttttataacctactactcatcagtcacagatgcagaagsatcctagctagtgcaaatacatgtatacactcataggtgtgtctggcaagcatgaacacatgagttgcatgacatayttaggacttccacaaactcaggtcagagacccccaaactatcaggctcacatggaagaggggatttatgtggctgataacatcacccacccatttcttatgccaaagtaggaagtactccatgacctcaacagataaaaacacttagaccaacaggaggacttagtttaaaaagtcaggatttcaaaagtaatatataagcattacaggaaaaaaaaaattgaggaaaaagaaaagtttctgtaatccacctattttgtgacctttaacacttcagaacatttcccaaatctttgtgtagctgtgtgcacatgtatacctgtaaagcagtatatttgttgaataaatgaacaaaactcaagcccacatgacctttcttcagtccgctgaccctttggctaagtctcagagttccaggctgcctgaatgctgctaaggtacctttcatggtaccttcagtgctaggccaggcctcaggctcccagcgctcaagaaaaggagtacagtaaaagcagcactgggccacacaaagaaccccacgtatgatttccagcttaactcttaacttgctgcatgatcttaggtaaaacccaatcttgctggctttcaatgtactaatctgtcaagtggaagaacaactctagattatccttaccagcactttcacctttaaaccttggaaatacagaagattcagttatgtgttctaagcagacttttaaatgccattactgcaggggagggccaccattgcaaatcctggtctttgttcccaactcttgggcaggcctgcagcagaaaaggcagctcccagaagccagaattagaacctgagctagggagaagcaaaaacatacggtccacagactatcaggagggaggggaagaagggagacaggatgctgtaagttctccgctgacttccagcaactagtctctgggtgcttgggccttggttcagctgycctctacttatcagtactcttcctgrggagacagagcgaggactcatctgctcttcatggcccttgaaaaatttactatctattctagagacttaaagtrtgtgaatttgtaataaacatttaaaggttgcatgagagggtataaatttgtggcagggcatggtatctcatgcytgtaatcctagcactttggaaagacaaggtgggcagatcacttgggcccaggaatttgagaccagcctgggcaacatggtgaaaccctgtctctacaaaaaaaaaattagcygggcacggtgacgacacatgcctgtggtcccagcgactcaggaggttgaggtgggagaatcacttgagcaggcaggcagaggctggagtgagccgagatcaggacactgcactccagcctgggtgacagaatgagaccctgtcctaaaaaaaaaaaaaaaattaaaaaagagagattataaatttgtaaaastgaaggaaaatgcttagataacattmagtggaaaaaaagcaggatacaatgttaattataaaaactgaaccagctgtggaggcactgtggctcacaccagtaatcccaacattttgggaggctgaggcaggcagatcacttgaggccaggagtttgagatcagcctggycaaygtgtctctactaaaaatacaaaattagccaggcatagtggtacatgtctataatcccaactacttgagaggctgaggcaggagaatcacttgaacctaggaggtggaggttgcagtgatccgagattgtgccactgcactccagcctgggcagcagagtgagaatgagagttgagtaaagtcaaggtctctaggattatagggtgatatattttccttattttctcctatgtcttccaaattattggctacaagtatgtattactttaaaaagtatgtcatacataaatacatgctcatgaaatttcataaaatacttyagaagattatagggtaaaaagttcatctctccccaacttactcccagttacttccccacacccaaatcaattctactctgctacctagaagtaaccacagtgattcagtrtatatcttggctcattttcaatgcattcacccacatagacacacagtttgttcttgcacaatgatgtttatactatgtcgttgaatggttctgtatggatttttycccatttaacaaatgggagatcttcctatgtttggatcttctattttgctgtttgtttcagatggctgaataccacaccactgtaaaattataccacaatcattcccctattggaaacaatgtcactgtccatgttcttgttcgctattacaaaaattatcacttgaaatcctgtgacaaatggagaccttctttagggtacagtacaagaagtggtattgatgagtcaaaagacatacacattttcaatttttatagattttgccaaatggccctgaagaaagagaatcaatttatgttcccatgagtggatgaatatctatttggycttacctataattttgccaatctgaagggtgaaacataatcttatcgtttttatttgaatttttgattactagatgttatcttttgaaaagtttattgccttttaaaaagtcttacatcttcatcgcttttgcccttttttaaaatattgggttaattagcttttttcttaatttataagaactcttcatacattctgggtcttaatcttttatctattaggcaggttacacgcattttctcctagtccatcatttgttttaacttcctttatagtgtctttacatttgcctgaaatccttctgaaatttatttttatgtataatgagatctgtggatataatttacctgacnnnnnnnnnnnnnnnnnnnnnnnnnnnnnnnnnnnnnnnnnnnnnnnnnnnnnnnnnnnnnnnnnnnnnnnnnnnnnnnnnnnnnnnnnnnnnnnnnnnnnnnnnnnnnnnnnnnnnnnnnnnnnnnnnnnnnnnnnnnnnnnnnnnnnnnnnnnnnnnnnnnnnnnnnnnnnnnnnnnnnnnnnnnnnnnnnnnnnnnnnnnnnnnnnnnnnnnnnnnnnnnnnnnnnnnnnnnnnnnnnnnnnnnnnnnnnnnnnnnnnnnnnnnnnnnnnnnnnnnnnnnnnnnnnnnnnnnnnnnnnnnnnnnnnnnnnnnnnnnnnnnnnnnnnnnnnnnnnnnnnnnnnnnnnnnnnnnnnnnnnnnnnnnnnnnnnnnnnnnnnnnnnnnnnnnnnnnnnnnnnnnnnnnnnnnnnnnnnnnnnnnnnnnnnnnnnnnnnnnnnnnnnnnnnnnnnnnnnnnnnnnnnnnnnnnnnnnnnnnnnnnnnnnnnnnnnnnnnnnnnnnnnnnnnnnnnnnnnnnnnnnnnnnnnnnnnnnnnnnnnnnnnnnnnnnnnnnnnnnnnnnnnnnnnnnnnnnnnnnnnnnnnnnnnnnnnnnnnnnnnnnnnnnnnnnnnnnnnnnnnnnnnnnnnnnnnnnnnnnnnnnnnnnnnnnnnnnnnnnnnnnnnnnnnnnnnnnnnnnnnnnnnnnnnnnnnnnnnnnnnnnnnnnnnnnnnnnnnnnnnnnnnnnnnnnnnnnnnnnnnnnnnnnnnnnnnnnnnnnnnnnnnnnnnnnnnnnnnnnnnnnnnnnnnnnnnnnnnnnnnnnnnnnnnnnnnnnnnnnnnnnnnnnnnnnnnnnnnnnnnnnnnnnnnnnnnnnnnnnnnnnnnnnnnnnnnnnnnnnnnnnnnnnnnnnnnnnnnnnnnnnnnnnnnnnnnnnnnnnnnnnnnnnnnnnnnnnnnnnnnnnnnnnnnnnnnnnnnnnnnnnnnnnnnnnnnnnnnnnnnnnnnnnnnnnnnnnnnnnnnnnnnnnnnnnnnnnnnnnnnnnnnnnnnnnnnnnnnnnnnnnnnnnnnnnnnnnnnnnnnnnnnnnnnnnnnnnnnnnnnnnnnnnnnnnnnnnnnnnnnnnnnnnnnnnnnnnnnnnnnnnnnnnnnnnnnnnnnnnnnnnnnnnnnnnnnnnnnnnnnnnnnnnnnnnnnnnnnnnnnnnnnnnnnnnnnnnnnnnnnnnnnnnnnnnnnnnnnnnnnnnnnnnnnnnnnnnnnnnnnnnnnnnnnnnnnnnnnnnnnnnnnnnnnnnnnnnnnnnnnnnnnnnnnnnnnnnnnnnnnnnnnnnnnnnnnnnnnnnnnnnnnnnnnnnnnnnnnnnnnnnnnnnnnnnnnnnnnnnnnnnnnnnnnnnnnnnnnnnnnnnnnnnnnnnnnnnnnnnnnnnnnnnnnnnnnnnnnnnnnnnnnnnnnnnnnnnnnnnnnnnnnnnnnnnnnnnnnnnnnnnnnnnnnnnnnnnnnnnnnnnnnnnnnnnnnnnnnnnnnnnnnnnnnnnnnnnnnnnnnnnnnnnnnnnnnnnnnnnnnnnnnnnnnnnnnnnnnnnnnnnnnnnnnnnnnnnnnnnnnnnnntgagaccctgtgcagtgcaatagcgtgatctcagctcacttcaactttcgcctcctgggctcaagtgatcttcccacctcagcctcctgagtagctgggactataggtgcacaccagcatgcctggctaatttttgtatatatatattttttgtagagatgaggttttgccatgttgctcaggctggtttggaacccctggcttaggcaatctgcacaccttggcctcccaaagtgctggaattacaagcatgagctactgcacccggcctaatttttttttttttttaattagccaggcatgatggcacatccttgtggtcccacctactcaggaggctgagacaagaggatcgcttgagtgcagtagtttgaggctgcagtgagctatgatcgtaccactgcattccagtctgggtgacagagtgagaccctgtctctaaaataattagttaataattaaaaattttaaacgaaattaaaaaacatctagttcaaattttgaatcaggaaaaactctgaaaaattctaacccaatagaatggaaattacatagtaatcactattattccccttagtggaataatttattttaaggatcataaaaatatttatagggctttcatgagctcatctccaaccttcgtttcccaaactattttccaccattaagcaccttaactttcaattctatgatcacaaggttataaagaaacaacctttgtggtttgggaagagcaatatagtccaacagcagcaccaagagtggctcttttcaggctcgatgcataacttccacatcctcactctggagaatacactayccaaggcatagagaaagcttaaaaaacatgaaagcattgggagatatacctaatgctagatgacgagttagtgggtgcgcgcatcagcatggcacatgtatacatatgtaactaacctgcacaatgtgcacatgtaccctaaaacttaaagtataataataaatttaaaaaaaaaaacgtgaaagcagtcctgaccatctrtttgttcagagttcttactttgtgggggttttgggtctaccacccatgtttcaccccaactgtttcagagaagggatctctcggtgatagaatccaagtccaaagcatgcaacacagaatcacatgtgtgagctgatgttgttcactctctttatcctagtgatggctctgagaatgaccttctcaaataagatcaccaggctccatctgaagcagtttttctagcctggtataatgtattattctagagaggtgggagggcatagttagatactataaggtaaaaacaccttcattctcccccttttgcccccatcaagttcaaagtcaaaatgaggcaacctttactttaaggcaaaggaacccaatagactagcatatgggaatattgactttctctgagacagaacctcaaagcaaggacacacatttttaatatccatgctcgtgggagrgttgtggggagagatgctccatttcaaaaattgactgggtctctccctataggtcagacacagcttggcctttgggctactatcctctggggaagtcgacacctgcatattggcatgrcctgtagggagagccagggacaggaaggaagaatagctgaggaacatctcaagcagagccacacttcagttgcctgaatcaacaggtgggctccgggaggtaaaatccacaaggagaggtctgtgaattttaaggaaggattcaggagtgttgccatacrgagcaagaaaattaagtgaatcaattagaggctgccaaggctaccaggaggaggcaggtagaaggagatagatatctgggagggctttgawgactagaaacagcctcctccggagagtcaatactattttaggagacaaacaagtgtgactgtggttaaagataatcacagtcagatgctggcaaaggtagacaaacatttccaggcctctgctatttagggtataaaagtctgtgtgtgtatgccaggcaatgcttgtgttaagagctttggcggcagagggtttayatatgcaaataaaaataataccccacaagaaaaggctgcttctggaagtgctaacccatcccatggtttcaggcacatgatgtgaaattgcactagattccactgtagtaattaaaagacaaaacaaaaacaaaacaaaacaacaacaaaaaaaaaaccacgaaaactggaattaactggggccagcagagtaagtgagaagaaaccaggactgaacacacaaactaagtactcttgggagaatcatttaatctctctaagcctcagctttgtcatttgtgaaacatataggctgactcccaaaagctgaagacctaaggatgctacagtcacacacctgttcatcgttaccatggatattccattcctatccaggtctctatgtccttcctggtgccattttctttgcctaacttagatggagtatatccctcctgaccctttaagacccagccctgtgtcacttttccacaaggcctcccctgaacacattcccctcactcctttagaagagctggtagttctgtcctctgggcacgtacaacagggaaggcagagggatttcagttcttaaactcatcatagtttctcattagactacaggtcctaggttgacacttgacatagaggacatctgctggcacccatccatctccccagcatccatttctcttcatgggagcaccccagatttcacagctttgtgagttgaaaccctgtycttgctgagtctccactcccagggtaggtcygacaataagagaaatatttcactcagtggatcgttaactcaaggatgggcatatcacyyaactcagggtagacagcaccaaggaaagtcaatttgggggacttctgacttcttccttcctactgaacatgaaggtctatatgtgattttcactattggaaaaagcctactgcaaactataaatctaaccaatagtatatttagccaaaatgycatttctttttgcctaaaactggtatgtatggttattgaatacaagaagctctgatgggttgctgccaacagaacagaaatttttcttttctttttttttttttttttgagacagagtcttgctatgttgtccaggctggagtgcagtggtgtgatcttggctcactataatctcygcctcccacactcaagccatactcccccctcagcctactgagtagctgggactacaggtgggtgccaccaaacccagctattttttttttcctagagatggggtttcgccatgttgcctaggctgrtctcaaacacctgggctcaagcaatccacccaccttggcctcccaaagtgctgggattataggcatgagccaccacactggccagaatagaaatttctgagccgtaaaaggcagaatatttaccacagcatagcagataatggtagaaactaaaggaatacatccaagatcatcaactttgaacatgaatacaggataatagtacaaactaatacatacatataaaggtccttaayagtgacctggttgaagaattacttaagaatccaacacactgggaggagaccatctctttttaataacaattgtcatcgtgaatcagccataggatctaccagatcagcaacttgttttgaacasggacactcccagggctcaaaacctgggcaaaaggccaatagtttgagacctaggttacaagtctgttttccttaaaagctttgagaaatagtcattaatctacttscatcctacataatggctcatttaaagctattaccctataagttagagaaatgtctgataatgggaagaatgttgctgttctcaagctaacacttactgagtgcattccatataccaggtagccaggaactaccctaagtgatacacacatactttttcacttgaatcttcacaaccaccctcagggatagatgcctgtatttccccaagtgcgcagatgaagacattgccataaagttaggtcaccagactaatgccatacatgtagtaagctctaaygtcaggagggggactcagtctgacyctcctaacccatgcttggctcttagaggtctgaactaaagacagagaattgcccacaaaaagctctagcttacttagagaaaatgacgcatgagcacaagagggccaactggcccatgttccttcttagtcatagccctgtttatgattctaccctgggcactttcagagagtgctagaaccccagcttcagaagctttgtaatctggttttcctctttacttcgagctggggcattttggaaaaacacatgcactcaaggtagcctctccaaacctgcctctaggctacttccaaaatatatgttagcaatcacaatcaaacagaataataaagattgctctatttgaatcacatctgatgccactctaaaaatgtcctacatatatagtcacatatatgatatcacatatatatatatataaatttcatggtataggatgctaatcacaaatataaatacaaattggaggtgtcactaaatcataatgagttaaacgttacaaactaaatcagtttctatgctttgcagtttcactttctagtacctgacttggcaaagccattccacaaccagaattayagccactgccctgtcctgtctttgaaataygtacccattgatacagaaaaacacaaataaaratgtgagccaggcaaccaaacaagagttgaaaccaatataacataatgtgcagattgtatctcataaaccaaggatctgtgactttggaataagagacaagtgccataatgcttggcaagaagccatggtaatgacaaacccakgtgagttatgccattggtatgttacaatgagaggaaacagaggatggtgagtttggctgactttctccaagggacccagccatgctacaataaactccaacagtcccttgggataactgcacttatcctcaccctgaactcctgctcttctttccccgsggctggtctaccttttgggaagccttgcccactttctcttctaactcctacacacacatctcmctgagaacagttcagttctgattttgctcttgcagccctggcttgcatatgctggtagaagggtcatagtttaaatttagacttgaccacctcactgggaattcactgggaaacaagctgtgtgtggaacccatagacactctggcagagttggctgctaacactctaaaatggaagcactagttggtggtgaagctgtaagttaaattgggaaaggggtagaatttctaaaccaaagcccaaagaaatgggaacttcaaaattagaaaggctggaaaaaaccttaaaaggttattgaggtcttctgctttgaagcagaacccaagtaaacaaacaggattatctctggtttttaaatccctttgtggaatgggaattggaaaagatcgtaaaggccactgagtacaacgtcccaaatgttacagaaacaggtctacagcattgcccaaagagggtcatgcagactcagctgaaccctgccagcacaccctgaataacagttatcrcagcaggaggcagcagctgtggatggcaatgcctcagaacagaaatgagagacagatgggaaaggccaaggtgggttgcagggaatgggactctggttcttttaatctggatcccagtgccaacataattatgacgagactcaggttgcaaatcaggaagtaagagccctggcagtgatcctttgtgacttaggtacaggttcctcagaggttcttatagaccaaagaacggcaggagagctcttgaagcaagtyggcytcaagcaaggtcctaaaaaatgtgagcaygataaggctatccagctttatgccgcttttactctacttccctaccttacgttctcccatagtagttagcaaaacctttyggaaatactttttaaacttggtagagaacacaaataatacccacttgcgggccagaagaggggtagtaacaagactcttggtagctatgtcagttcctcaggcagggtcccgactgcccaatctaacccccaccccacccctgtccccagatagtctcagagcatcytgttcttttccttgaragtacttagaaatgtgtgtgaggccaggcgtggtggctacacctgtaatcccagcactgtgggaggytgaggtgggcagattgcttgagcccagctgttscagaccagcctggccaacatggcaagaccttgtctctattaaatataagaaattagctaggcgtagtggcgtgctactgtggtcccagctactcttgaggcttaggtaggaggatggcttgggcctgggatgcggaggttgcagtgagccgagattgagccacygcactccagcctgggtgacagagcaaatgtcacctgtctcaaaaacaatgacaaaaacaacatcaaacaaacaacaacaacmcaaaaaaacaaacaaaaygtgtgtgaatgagacagagggggtaatgaggggaagagagagagaaggacctatatatgatgcccctctacactgcaaaattatgacagcagttccttgtccyctttagatttctgattattgaggggaccaggagtcaggaggcctccagcaaggccccagaatactctggcagccactggcctcactggatctctgggaagacttcacaggactggattaaattagagcacactggcaatcaaggtctggcttcaggtcaaccttcaccttgcacctggctacgggaagccccttgggatgtctcaagaaagtcttccgaccttctttggagattccaggccattggagtagcccttgatttcatcaagaccagctggacctctctctcctaggttctggaaatcaagctgtgatttcagatggacttgggcctccagaggagcagctgatttcccccagaatccctctggacgtttgtaaataccagaaacaagtggccactgtgggacagatttctgtggaatcaaactggagcaggtggctaaaatacagttccaggaacctgagagtgagttccaattcactggggtccttggccctccagattccttccaaagagctgggtcttccctcagactagatccagtactccaccctccctgttcctccaaacataagggcagraccgtcctacacttcactatcttctctamagagatatataaaatttactacagatagaatggaatcatttcactaattattataaagtagaaacaaacaggtgaaattagttttattgcattacatttaacccagtagctccaaaagtttttttttaatctcatatttcatttcaaaacaatagctccaaatatcatttcaatatataaycaatataaaaattgagatgctttaaatatttacatatacagcatatctcaatttggactggcctcatttcaggtcctcagtagccacaaatggccagtggctactggattggacagtgcagctttagaaagcagctctaaccaagttttcctctgtggtcccctgaatatccctgctgctttgctcccactatgtccttggccctttaaaaaccccttcctgctctttagcacgcagtgagaaccctgcatcccctggggagtcctcccagatcatcccaggctgctatgctmacatcagcttctacgtaattatttyagccagcaatctggcaggacctcgcagcactgttccccttattgtctttagcaactgatttttcttttctttttttcccctttttgttatcactgtttcacatttatggaatagctcccaacttggtttacttgggaccaactcggggcagagaaatatcttaagatttctatgtcactagcctaatatctgccacacagtattcaaatatttgggaatcaacacaaaaagtgctcagmctaatttcctgtttgattaaggaattaatgaaaccatctgaatgtgatggttggcacaggtccacagagacatctatgtacttatttttgttgttttgttttgtttgtgtttttgtttttgtttttttttaagacagagtcttgctmtgtcacctagattggagtgccatagcacaaacttggctcactgcaacctccgcctcccgggttcaagrattctcacgcctcagtctcccaagtagctgagactacaggcatgcaccaccaatgcctggctaatttttgtatttttggtagagatggggtttcgccatattggccaggctggtctcgaactcctggcctcaactgatctacccacctcggcctcccaaagtgttgggattacaggcgtgggccaccgtgcccgaccctatgtacttattaatgatagtaataatccaacacctacctagatttaccacaggccaggtgcaagtgatttacatacatcaactcacctaagccttgcaaaaaccctatgaagagattccatggtcttcatcttccagatgaagaaactgaagaaactgtactgtatatttaaattacacaccagatttcaaagacttggtacaaaaaaataatgtaaagcatctcaatttttatattgattgtatgttgatatgatatttggagctattgtgggktttttttgtttgtttgtttttaagacggagtcttgctcttgtcccccaggatggagtgcaatggcgcgattttggctcactgcaacctccacctcttgggttcaagcgattctcctgcctcaacctcccaagtagctgtgattacaggcgmccaccaccatgcccagttaaattttgtattttcaccatgttggtcagactggcctcgaactgctgacctcaggtgatccacctgcctcagcctcccaaagtgctgggattacagacatgagctrctgcayctggtcytttttttttttttttctttaagatggagctattgttttgaaatgaaatatgagatgaaaaaactgtgagctattgggttaaaagcaatacaataaaactaatttcacctgtttgtttctactttttaataattagtgaaatgatatcattctatttgtagaatcattctatctgagtttatgtatcttgcacagagttacagcagagctgggattcaaattcattctggcacctgattccaagttcktaawcatcatgatatattgcctttcattccagaatgccacaaaatatactttttataccctacatatcagtctatatcctatgaattaaaggcattcgcttattatactctcagccagggtatttccttatataaaaagaattcattcagaaaatgtaaacagaagtaaacaggagagacatgaaattcttggtactagaggatgtttctcataaatcctcttaaaacaaaaatagtacaytcttcctttcaaagggtatgaaactgagggtacttggtaacaagttcttgtaattccagacaccctttgattctggaactatttcaaggaatgtatcctaaggaagtaattatggatgtgtactaggacatccatgattgccattacatagtgtttataacagcaaaaatcagaaataacctaaaatagggagattatttcaatcagaacaaatcacatttacatgataaaatgtgtatatagtggtatactaataaaccagccctctaaataaaacaagaagccccaattcatggtgtctggtaacttccatggtataaatactcccaccatggctgatctcaagctactaatagtttaataatctgctctggaaatcctgactatttaacaatccctgtctgagctgagctggctccagtataccatggaatacattcattaaaatgtagtagaagtcgttcaatatgttaggtgaaaacagtttgtaacacttctgtatcatatttctgagaaaaaaaaacacacatggaaaaaaaagaccaaaagaatgtatgttgtgttaatactagttatctctaagtgatataattttatcttcacttawctgtattttcaaattttcccatttatgtatgatttttctcagaaaaaaaaatcaaggttctcttcctagttgcaataatttaaaaatgaactatttcccatggtatatctcaaawaaataaataaataaaatttttaaaaaaatttaaaaaaaggaaagaaaaagaaaaaaggaaagaaaaatccctggacctgctcagtgacatcagctgcacaatgagaaggccccagggtgagaagattcccaatacctcataactaagaaaaagaggggaggggtaaatcctgaggctccagccacagwgcttgctgatctcctggggaggagagataaaggctgatcattcacyggtcctgcagaaaggcaaggtgggaagtgggactggagatatgtcagtcccaggacaagaattagtctgtttatataatctgatcctggaaagatctatttcttaacccaggactcttcccaggatcttcccaccgaactcttaaccattatattaaactaatactaatagttgtcaagtttaagtcttgtctgcaatgaaacacttttatagtcattgaaaatatcctggaaggctgggcgcggtggctcacacctgtaatcccagcactttrggaggccaaggcaggyggatcacaaggtcaagagatcgagaccatcctggccaacatggtgaaaccccatctctactaaaaattcaaaaatcagttgggcgtggtggcgcacgcctgtagtcccagctacttgggaggctgaggcagcagaatagcttgaacccaggaaacggaggttgcagtgagtcaagattgcgccactgcactccagcctggtgacagagcgagactctgtctccaaaaaaaattcctggaaatgcatccatagggaaagatgttcagaagattaaatgaaagcaagwtataaaagcagcatgtaaaaatgaacccatttaagtaaaaagcrgtaaacatacggaaaagaatatagtaagtgattaggtagtggttgtctctagatggttaggattatgctattttggtctttttgtttgcctaagttttgatttttttctgtagtcagcatagttacttttaagagtaatgaggaggccgggtgtggtggctcacacctgtaatgccaacactttgaagggctgaggtaggaggattacttgaacccaggagttagagaccagcctgggcaatatggcaagacctcgtttggcaggggaatgtggcgggagagggtaatgaggaaaacaaaataaaagcaaagtaatcttaagtgagaagaaagatgcaacaacctcccttactggatctttgggctgttaagctcgtggaagacatagataattcctgattcctaattcctattccctgacacccctgtgaaagcaaatagcaaatgggcctctacaatgtctcaaaccaagaattccccagggacacagggagccttccattatggaatgttttgctggagctggggagaggaggcaggttaggggagggtggagggagaaaagagagaaaagaacaaatcaaaaagaaaaagacaagactgagaggaaatctaccttttccctccaagtragcagcactaagttagtagtcctcaaatttgagcgtgcaccacaaccacctggagggcttattaaaacacagactgctagagcccatccctcagttgtggggtgaggcsgggcagggtggtcaatggtgcctgggaatctgcatttgtaacatgttcccaggtgaccacactttgagaacttctgctctaagtcattctgtgagtaggcagacaaagaagagaaggagcactgcacagatatgaaactgagatacaaaatgtgtggcaaacaatgtgtttgcaattcttttaaacaacaaggcttggtttcccctttgaatgggaaaagataacatccctttccccacaggagcaatatgaagattctcatggagagagagcagaaactgagaatatcctgacagctgatgacacamcagatkctgtaaaagaagagatacaagcccacaactaatcctgcgctgggargagcacatacctggaaacagaaacattttaggaggtactgctttgacctagcagcagaaggggtttccctccccttcaatttgacagtttcctcactgtggtcaccagaaaggcaaaaagaatgtggaacaacctgttttagtaactctgatctttgctctttcacttggcaaaagctgcctggcagcctcctggctgcctcacaggtgtaaccagggttcccctccttccaggaattgtaacacagttctgccaagagcaaaagatatgctctattagtcattgattacagsaggcagggaggcaagccacccgtgggcctcacctacaagggagggggaagatactggtggagcctcagtgaaacatccagcaccatgggggctggaataatggcctgagggcagccggttatgatttttatctaggcaaaaacagtctgaagaagaaccaacaaagcctcaaacataaaagatgtgcaataaatattggccaaaaagaagagaaaaacgtttccaatgatattgctaaccaaagtcaaggcacaggcaagaaaaagcaattggctatyttttttttttataatgtagatgctcagcatccaaacttcaaaaatcgggttgctattctccagttcttgtaccttgtgttgcccctaagagaaggataacttagggatatgtaggcttcttgccaggattttttcttttttttttttttttttggttctttgagacggagtcttgctctgtcacccaagctggagtgcagtggctctatctcggctcactgcaacctctgcttcccgggttcaagcaattctcctgactcagcctcccgagtagctggggttatagacgtgcaccaccacacccaggtaatttttgtatttttagtagagacgggggtttcactatgttggccaggctggtcttgaactcccaacctcaggtgatctgcctgcctcagcgtcccagagtgctgggattacacgtgtgagccactatgcccagactcttgccagtatcttctgttgaatcttcttttatgtaacacaaagaaattacaacactggaagtgttatgtggttttttattggtctaattaagytttttaaaaaggaaattcccaccacacatctagatcacaagttttcttccccacagtgacaactccacagcactgaggcactgttgacaatggtttgagccargkccattaaattgctttggaacttacatttacagtgttaccaccaactggacctacagatatttagctgggagtcccctgaggatggggtctatgtctagtattacaattactgctatggttaatagctaatttttttagagcactttatatgcctggcattatgctaggccctttacttacattgtcttaaccaatcttcacagctcaatggggtaaatgtcattagattccttcttgtccactctcccaagcacctagcacagggctggcatgcagtcagcataaacatttgtcaaataaattaaaacactgtgttacacaaaaagcratgttcaaagatgcaatgactgtgaaagggtaagcttcaagaacagggacaatggctgggcatggtggctcacacctgtaacctcagcactttgggaggtagagatgagaggattgcttgtgtccagragttcaagaccggcttgggcaacacagtgaggccttgtctcaaaaaaagaaaaggaaagaacaaggacaaaaaagggcsgggaaaagggacctgaattaagttgaaccagagagaaaaacatgaacagatattaactaagaaaacgtgtacaagctgctctgggagasagagatgtgatggtggtctctgmcatcttcagttttgggacagaagagtcccttgaaagcagaccacatttgaaagcaggtacatttaattccaaatggctccaggcagtgcattcacccccagraacaacagatcaacacagtcaacaccygatttagagtttgggtactatctctacccttctcagttgggtcagtcctgcctctgttcagacgaagacaagccacatgcccaggaatgaaaaagagttgaggaaagaatatcagaaaaggatgctagttctgatcctgctactaaaaggctggatctccattttctcctgtataaaaggagtaggaggaattaaatgattcctggtgttccttcyggctgtagctttccatgatttagtcccttctgcttgagaagacaccctcaggtttcagacctcagccttttccagagccttccttcaggaaaagcctggggttaggtctgaaggaaggggcaggatgtgctactcactgaaagagtagcacttcaaaaagatgggcaatcacttcttggccttttggctaagatcaagtgcaaaaagatgggcaatgtttttagggtagaagaaaacagtatgaagattcttaaaaggaataccacaaaatagaatatcagcaacaytactccagaaggtatgcccagtgttgtatgggctcaagagtaaagtccycaacattcaacttgcttttttatttttatttttaaagttattttgcattaaaaaacagatacagagtcataatttgcaccttttattcccaaggtaggatttatgaacctataccctatggaaccattgcctacaggattatcagtgattgttgggcatgcagctgtaccacaggagggatattcagcttcagtttccaaactccacctcaccccaccaccttcatacacccccatttctaccatgctgtggtttgactggcagtcagtactgttatccagatactaattgatactgtatctaggtaataaatgatacacctatcaccattcagtagattagataatcagacatggaaagagaagcataggattcgggttgaagacagtaaatatgtgtgctrcttcttcccaggttgagtatatccctggttgattctgctgagacatttaatttaaaaaaaagaaaaaaagaaaaaagaaagatagaaatagagtacatccctgggaggcaaagaaaaccaagagacatatcgcaaaagcatacagtaggccctstgtatccacaggttctacatcctcagattcaccaaactctgacaaaaaatactgtatttgtsggatgcgaaacccatgggcacagaggtctgactttttgtatctgaagattcaataaggccgactatgggacttgaacatccttaragtttggtacccgcaggggttcctggaaccaatcccctgtggctactgagggacaactgtatatgctaaataatcaattcagtttccatcatggtaaaggcatttcctagaagatgaagaaataaaaggatacacatcaaggccccaaggattttatcccctggatggtgaatttttatttttgtttattttttggaaacagggtctcactctgtcacccaggctgagtgcagtggtgccatcatagttcactgcaaacttgaattcatgrgctcaaccgatcctcccacctcaacctccygagtagctrggactacaggtgcatgtcactacacccagctaatattttaatttgtagagatgggatctccctatgttgctcaggctggtcttgatctcctgggctcacrcartcctcctgccttggccttccaaagtgctgggattacagtggatggtgaattaaagtcaacaacagtgaatgtcataatggttcctttttgcagttaccaacacctttgtaaaggaacttggtgtcayggtttcacatattaaactccatttatcaaatgggctatattaatttaaggaccaaggaagagatatttacgtcaagtcataaggtttctggctgagaattctggaacaaagtaggataagacaaagttatagataaaaatgcctttggatgccctgtgaatccccatacacttacccaaagcccatgacatcagagacaagcaggaaggactacccaagtaaagaaagaatcrtagaaaccaatccctgcacctccccagtgaagtgattcagtttgggtaagtcccacctccttcctctctttacctctgagatgttcaggtggctggactatctcagtctaaatgtgaagacacaatggcacgtgggcttgggatgcaaggacaatgatacagcaataaacaagtataaataaatcccatgcacactgtggaggatggtaatcaggaaaagctttcaaaaggggacttttgtccacatacctaaagctaatgaaagttgactagaaacttaagtctcttggttgggcacggtgrctcacamctgtaatcccagtactttgggaggccgaggggagtggatcacttgaggtcaggagttcaagaccagcctagacaaaatggtgaaacccygtctctactgaaaatacaaaaaattagccgggcatggtggtgcacgcctgtagtcccagctattcaggaggctgacgcatgagaattgcttgaacctgggaggcagaggttgcagtgagccaagattgtcccactgcactccagcctgggcgacagagcgagactccatctcaaaacaaaattaagtctctaaaactggcttctacctagaaaggtcagaaaaatctctgggctccttgatcacaaattccagtgcaatacataacttagcaatttccaggtgatttgaaatcttttctgaactgacccactttttcaggcttgaaggacagtctagctagtcaaagctatcccaaaactaactccccacagagtgtgacatcaatgatttatcaccccttagacacatgcatgccattatctcacttttggttgtttttcaccttcaaaaaggcagttataaatgcatttgccttctttcttccttctyacccgatatctatttcctttctatccttggttttcagttttcctgcctttcaacaccagtttcaagatagggaagaaaaatcatctttcatcaaacctgctttctgtactcatactcaatagaaccaaaaaggctaagtgcagtggttcacgcctgtaatcccagcattttgggaggctgaggcagtaggatcacttgagcccagaagtttgagaccagcctggcaacatagtgagaccttgtctctacaaaaaataaaaatattagcctggggtagtggcatgcacctatggtcccagccacttgggaggctgaggtgggagcccaggagatccwggttgtggtgaaccatgatcaaaccactrcactccagcctgggcaacagagtgagaccctgtatcaaaaaaaaaaaaaaaaaaaaaaaaagkggagggtgggggtggagggaaaaatacaagatagtcgctttccatactcttccaaatcaaaagataagttcagtgaaattcatccatattttcctcaaatgtgatatttaaagaccacacaggtaytttatctaaatccttgactctgaccctagtgatgacaattacaaccactcasaattcaccagagaaatcccaatgtagctcacttagcttcaagtcaaaaatagccaaaacattccacttcctcttggttcttttacttttgtccttttcctcagactttagaaggaggtatcctttaaatcctgcatgactggaagtcagatggycaagtcccyttgccttgggaaccacagcagtgggctctgagtcattgcttcagagtcaagctactcaagccgcaggagacagccaagttctccctgagagagaagggatagagaccaaacaaccggccgcctttatctacaaggtggagtgkggaggttgcctttccattgtattttccctaagaccagaggaactggttcaaytgaaaagggaggcagtcmgtcccytgcagtgcacaccctccacttgagagacagcctcaagactctcccctcagcccttttgggtgttgcaattgggcaagcctcttcccaaagagtccacggactctgggccatgcactcaggctcaatacagaccttatcktttcaatctgttttcaaattgatgcctacaggctgagtggagactgttttcggttagagtgagcctgagggagcctcagggcatgcccaacacctcagacacgacccccagcctagccacaggcaggagttttctttggagagtggctaactcacctcccccaccatcgtcctctgatgagcccgtttttcatcttcacacatttcagatctaggggagtgaggagtaaagcaggagaaggccccgggcacccaccttgccacccttcttttcccttttaaactggtctcattgcttggacctctgactccctcagtcttcatctgagggtcgctagccttttcagctccsgctcctacgatagccactcgcacgcctcctctcctagccacggagccagcagccactgccttcacaggccctaggcaggaggcacttaccaggccctggagccagctccccagccctcccctgcatcacagcgagagtgaaagtcgggcaattcctcaacaaagcaagggccagcaagacgcccagagagttaccctgmagggcagccagggctgtcacacatctggactcaaggaggcagctgtggggacttcagataagcaccaccccagcccccacattctgtctgacaggaaacggactcccaagaaatcctgcagagaaactctttgcggggaaagcagggcagccttcgagcgaacccacccactcagattccccttggccatttcctgcttcctccgcgctttattccccctttccctcaattcccagccttggttttgaatgtttctgaatcagacttagagggtccctggcccctcacattccttcttcatctgaattctsgtttytagagctcaaaaccacacggttccaggctgctctaattaaatacagagattgagaccatctgatgctaagattatgaccttaatgacgcgcaggaaaagtcattcagatttaattagttttggtaaccttatatctgctcaggatagaaaatttctcagggctatgttgtgtgtttgtggcacagaggatgctgaaaggtggcttggatgaagtttattcaccagtaactcagccagaaagttccattaggattttgcatagcagatgggatgggagactgggtggggtattgtaaaygsgggtggaggccagaggcccaaaaggtgaaactttttaaaagggcaaatgtcaagtagggggctacattctcatttctacccacacaaaaacagtcttcccccgctatcctagcgtgtgttaaagtgacatgaacagccttaggagcatctgcttatcctatttgggaaggttctgattttttttttcagragaagccacacaattgagaaccctccctctgtgatccttctcgccctcctgttcgccggctgctttgggggaaattggktgcttcctgcaagtctcttccacgacrttaagattagcagaataattaaatacagtcctaaytgggcacagagagagttgttaattaatgagccaagctcyggcccggagctacaaatccacgctggcctgtgaaaacccaggcagaaaaaaatgtgctccagtcccacgagaaaattgtcacttggcaaaaatagttcctggtgtacagacaggtgtcaaacacattcctgtagccaggagtcacacgttaatcccgcagctgagatccatgtgtaaatgagaggtgaggtacttctccgccactatagggacacacgcggctctgcgtccccttcccacccccgcgtccgcatcccactccctagcaggctggcgccctgacatccaaagtcgctgctaggtgactgagttcccaaacagcagctccgcatccaagtcagaacctcaccgccagccagcgagcgcgcgcgttctgtctgggaaactgtgaaacggatcgcagcaaactctctcacttcgccgccctcctgatccccagccccatccgcctaccccagaggcctccccaacccttccctccctaccaccctccctcgcgctgagcgcgaccagtctggctaasagaaggcaccaaggccgccgacagccactcacctctacacgggaagcaacagcagcacttagcaaagagccaccccaaagagggacctcgggtgtaagccctgtcgccgcccttcatgttgccccgccgccccagcgctcccgcatggcacggggcgccagcccggggtgagagcgcggcgggaaggaaacttcagcgccgccgcccgagagccggctcccgccctccccgctgtgctctccccgcaccgcggccgcagctctgacttactgggagccactgccaccttgggaagcggggaggggccaggcggggagggagggcctaaggggcggagttccaaggtccagctgtgggcaggagacctggccagcagcggccggagcctcatgyaacgctgcctgtggcaccaacgctgtgggcacggggcaaacgggtggagtttgagcccttggcaccaaacaggtaggtactccttatgtgcaacttcctcccttcaaaggccaccacaatgggcgttggcttaaaaaawacaactagatggggccaaagaggtaagagaggggcagacttagatgctccaagactcaaggatgcccttttcttcctygcagcctcacccgttccctccccacagcctcctctgtattgaaaacaccgtccccaaccctttcctttccttccgtgtaatgctgattactaataatgataacagtgcctcatattgatcagctctccaactgtaatgacgtraaaacacactctgggtttggaatcatacaaccaaccttcaaagctcagttttgccacctgctagctgtttgamcttaggcaagtcacttcaccttttatcttcagtttccccatttaaaaaaaaaatgtaaaagaattcctatattccacggttgtagattttctttaaaaaatttyctttaatagaggcagggtctcgggtcttgctatgttgccccagctagtcttgaactcctgggctcaagtgatcctcctgccttagcctcccaaaacattaggattagagatgtgagccaccacatacagccgatggtagaatttaaaaatatctatggatgtctcccagagttgctgatttagtaggtaggaggtggggcccgagaatttgcattgctacaagttcccaggtgatgctgatgttggtataggaccacactgagacctacttgagattcagactttttccttgcctatttggcaactgtccccttttctttttgtaacagccccttgacttgtctttgaggaaccagtcctcctcccttctcaggccatgtttctgggctaacatcctgttacagaggtgaagtttaatatttccaggtgaatgaatgcctacagagaaacttcgaacatcttacttayggtgcaagacttccattcaccatcccctckgcccaatatgcccagtagacctatcattcctttacttatatccctatccctatcttttaaatctttttcatgtttcaaggccaagcttgctttccacaacccccttgaagcccacttggaccacatcagtgggacctttccatgaaccactgyatkrmtcacagggtgtctctcccattcctttgtgyccagctttagggcaaagggcctgctggaaacacacaacactcataaagagggcccattcatcagaaaaaagggaagtttgtgggaggaatgaaaaacagaagcttgatcacccaggtaaccaatgccttcctggaagaaacacactcatgggacaaggcttttaaaagttaccaggatttggggcttcctttcccagttggaaccatgcttagatttgtgctttatttatctatgtgacagccaggcatggttgctcatgcctgtaatcccagcactttgagaggccaaggcagatcacttgagcccaggagttcaagaccagcctgaacgaygcagggaggccctgtctctacaaataataaaaataaatgaataagtacataaatgagcggtgcttggtggaccatacctgtggtcccagttacttggcaggctgaggtggaaggatcacttgagcctggggatgtcaagcctgcagtgactcatgattgtgctgctgcactccagcctgggcaacagagtgagaccccatcccccccagctcaacccccccaaaaaaaatgtgccaaggcatctgccacatggttgggataccagtaaatgatcgaagcatgacctaatgagtaataatagcttacatttattgagcatttatatgctaagcagtttcctccatgttctccatatactatctcatttatcctcataaaaaaaccttgtaaagtagtgtcctgttttacctttgaagaaactgaattaataaactatgatgaggctttaatggtttaattctaaagaaaagctctaaaaagcttcacccctttggaacagtagaacataaagtcaaaaatctaccctctagttctgctactgccatctccctgatggtttctcttggcaaggtttacataagaacgtcactgtcaagcaggaaatgaatctctggtgctctttctaacacatacaaaaacagagaaattacagttcaaattgctcatgttggctgggcgcagtggctcacgcttgtaatcccagcactttgggaggccaaggtgggcggatcacctgaggtcaggacttcaagactagcctggccaacatggtgaaaccccatctctactaaaaatacaaaaattaactgggcatggtgatgcatgtctgtaatccccactattcgggaggctgaggcaggagaattgcttgaacccggaaggcggaggttgcagtgagcggagatcgcaccattgcactccagcctgggcaacagagtgagactctgtctcaaaaaaaaaaaaaaaaaaaaatagctcatgttgtctgcacccaagattcctgattcactgaccatcctgataattggtcagtctcattttgccagactgaattactgcaggatccttaatcctcacatagttatcctgggttccagttctgacccacaacaaccagcactattatttagttctctcttccatgtcaccaaagacaatacctattttgtttttcttgcaagcccagaccaaaactgtctgtaaaaattaactttatttgcttgtgatccatagtatggatgctatggtccaaggttcaatatttggtttacccacccaatccctctctttttacactttgggggcattatgatgggaattcaaagatgcttcaaaatttcatggggaataaccagtttgttttttactsaaatcttccctcttggtttttgtgttcagataacactggatcacttttttgtcacaattctttgcaagagactaatgacatmtcatcctgctgaaactggcttgagttacatgtttgagaaagacccaactcttactttagaaatcaaataccagtagaccctaaagtagtccactataggcaaaatggatccactgggcatgtttccaccgatactttttttttttttttgagcagagtctcactctgtcacccaggctagagygcagtggcacgatctcggctcactgcaacctctgcctcccgggttcaagcaattctcctgcatcagcctccggagtagctgggaatacagacgtgcaccaccatgcacatctaagttttgggattacaggcgtgagccaccatacccagcctctactaattcttataacccaggaattcatcctactctcaatttaaaggcataaaaccattaggaacctcttcctatcttaagttggcaaggtcaacacatttttggccatcatggagattcattctagggttagacaccaataacccaagagtcccattgccatccttacatgccttccagaatgagactagccaatgtctataacctaacaaggaaatcctttcctttcctttattattattattattattattattttaatagagacagggttttgccatgttccctgggctggtcttgaactcctgggctcaagcgatctgcccccctcggcctcccaaagtgctgggattacaggtgtgagccaccacacctggccatcaaggaaatctcaaacaacatggggacactaactgtttgtggacctactcgttaattcatcaaatacttactgagtgcctactctgtgtcaggctctgttctaggtactgggtctacattggtgaacaaaaacaatttcagtccttctgaagctagctactaggacagactcatcatgaatgtgagagaaaagtgaatccacatcagatatgtgaccaggtttattagttgagagggttaatagatgcctagattctccagcctgcatccagatgttttaagttaatattctcaagacaatttagaagggatggtggagaatatgattttaaaacattggtgctgataagaatcaggagggaagcatttaaaaatattaggcattagcattttttaggctctgaggtggaaccaagtctgaggccattgctgcctgagtcccccctccccacccacccccacacacaccctgagatttagatcaattgactttgggtgcaactgggcgcaagtattttaaaagttccccaggtgcttgtaatacgcagcatagtttgaaaaccactggtgcagtacggtggttctcaaactcaagtatacatcagaatcacctggagggtgtgctaaaacacagattattaggctccactcccagagctgctgatttagtaggtctgggctggggcctgagaatttgcattgctatgagttcccaggtgatgctgatgttgttggtacagaaacacatggagacctactcgagattcggacattgtccttgcccatttggcatttgtgccctcttctttttgtaacagcaccttgacttgtctttgaggaaccagccttcctccctttggagaccatgtttctgggtgtggctgacatcttccccttgtccaccctctactccaaagataagcccatgacctgggtgtggccaggcagccacagggattggttcagatttagcacatgactcgagtttatgcaatgagcataaaccttgtgatcttagcaagaacatctgagaaaacagccatccctttcaacaagatttctaagttgatggaatgttagcctaaagcagctgggggtattttgctrtaacaatgtgggaagaagctctccgagaatgaagccaatacagggaaaagatgagagagagaggtaggtttcccatgatatcatttgaatagctagagaggcttcttcctaaagctttattcctggaccttacttgtgcccgcccctcgcttatacattcctttttgtgtaagccagttgaatgtctattatttcagggttttcacatacctacccacccactcccaaagttcaggctaaaagctcctgagctataagcaatatatttaaagtagtcttacttttcaactagatggctgagtctcatttatatttttggcagactttgtcttcagtgatacctgcagcctaagtccattttacatgaataaggctttctgcctacctacgtgaccactttatgtcccaccctcatttccaacaacagtgaaccccaaagaatttctggtatcagcctgcagatgtagtaggccaggtgtaccacaatgtcaggcctgacatcaggcaccagtgtgactgcctctccctccacattaaccacagtcttcagtaacactsgaccatgacctcaggtacctgtctcttacactaacagacatatgccatttttttttcctttagggttattctcttcagatggacaggaaaagaattttactaaatcacaatcatttccccacatttcttaaagctcaggayagagaaagaaggaacagcaaccatgccccaattcaggcctagagattcataggagacccttcttactgtgaccttttatagarcataggcttggtgagccgtgatcatggttcctggtgagtgcagaggcaggccctgatctccttaactccactccaaccattcccttgctctcctttccccacaggggtgattctcacctgtagcactcacccccakatttggattctataggtttttttttttttaaatggagtttcactctgtcacccaggctggagtgcagrggcacatcttggctcactgcaatctcyrcctcccaggttcaagtgattctcctgcctcagcctcccgagtacctgggactacaggcaagcgtcaccaagcccggccaatctatgggttttaaaaagctctgcagaggatttcaatgtgaagtcatggctgagaaccacggactttagggcccaaggccactcacactgtggatgagttcctgcattgtagagtttaggaaacacttgaacacaaatggttttactttctcaaactctgacaatcggtcccttgacccattcttccactgcctgccatgctccctggttgctaactgcaggttccttaattctcatcttccctgtgtagatttctgatctatgaactgcctgattgctgatatcgggatggctaatcaatattcccaaattaccaagccctggcctccatttgtggctgtggcctaaacatctaagattctttccaagtactaatcatttattcaacaaataattggtcttggaatatttactatttgtaagtcactaagctaacctatacatgggagtttataaggaaaatgtaaattaaataaggcctgttccatgagaaaagacaaagaagaacagggtgaattctagcagaagttggtttaattttctgtggmagaaaaaagaaatggaaacagaatagtactggacataaggttggggtttcttctttatgtgaaaaagaggaattgagacaatagtcatcagtaaccagaaacacttcaattagagagaggaggtacaatgtgtacattgcttctatatttaatttgaactccaaatatggtggsggkttttgtttgtttgtttgtttkttttgttttggaggtagggtcttgctctgtcatccaggctgaagtgcagtggcataatcagagctcactgtaacctcaaaatcatgggctcccacctcagtctctcaagtagctgggactacaggcatgcatcaccacacctgcctatagagatggggtctcactacattgcccaggctggtcttgaactcttggcctcaagcaatcatcctacctcagcctcccaaagtgctgagactacaggcatgacccactgtgtccagcccaaatatgttttttttcaaaagtgtataatatctgtgtgggtaaccattcccaggtaatatgcgttattttaacagtaaggtgtacagaaaaagtgtgcttgccagaatcacgcatagtaatctcttctccttcttatctctgtttagtgtggtctaaccactgcaccactgctggccctgtgggtaccatcatccacttggtgacagacagctcctggactctaatgactgaaccattactgagctcagtccatatgtcttcacctactgacctttaaatgtgttcctctgtacttgcccaattgacacctgtttgcctctttctagctgtctcacttatccttaagagaggccccagctcagcctgcagccaccctctttttttttttccaggaagtattactgatcactgtcttgtctgaaccaggttcaaggtaggggggtggttcaggccatactgagaggacacagatgtctccccagaatggccaacattcctcttctgtgaggacagagaggaasarctgctggcaacaaggacaggttcctggatatctgtactgagcagccgcctgagctggcctgagctcaggggcagatgagctatttatcaaagtgaaagatggctgcagctggaattgctaaaaacaaaccactccaggttttatctacttccaaaaaygtttacctctaagtaggtcaaagtgttcccaaagtagggcagtataagagtgccagtctatcactctgagtttcaattaaggtaaacttatgattgctaagtgtccactatgtgggatggcattttaattctgccaacgccaccttccctcctacaggcacaaatagcagctgcagcagcatgtacattcacggagtacagtgcagaggtttctgatgagtcaaatggaaagtggattttgtcttgatgtaactcaggtgagtttattgaggatttccaataatagaaaggatgtacatctgccaataatggaatgtggataatgacctgctcatccttcaaccagtccaaataaatgagaggtacttaacccatacgtccccagagaagacttcctcaatcaggactcctagcatcagaacatgattccccattcccatcctsaagtcctcctgmtaaagcttaagccagtttcctttaccgttctacatgctgagcctggtccttcacataagaactctgcagaggtccctgatgcatgatccgtccctcctttctataaatatttactgagaacttcttacatggcagctactgttttagatgctggggatagggcaatgaacacagtagacaaaatccctgtattggtaggggggatttgcagaggaatattaacaaatatgtcaggtagtgataaatgcaatgaagaaaagtaaaacagagaagggagtatacactgtgatgggagagggtrggagttagggaagacctctctaatcaggtgacattcaagcagaaggaagtgtgacagcaagacatccaagtctctgaggatctggggtatctggtgtgttccaagcagagggaacaaaagatcaggccctgaggtgagygtatgcatggcttgattggtaatggctcagtgaggcaggctggtcaggtgaatggtagacagaataacgtccgccaaagatgtccacatcctcctctccagaacctataaatatgttaccttatatggcaaaagagactgtgcaaatgtgattctgttagggacctcgaggyaaggggattatgctggatcattctggtgaggacagtgtaatggtgggtgttcttaaaagcagagaacctttcccactgtggcccaggggaaacattaccatggaaggaggatcagaaagatgcaacattgctggctttgaagatggagaaagtgtggtggtctctggaagctggaagaggcaagaaatagcttttccctaacagcctacaaaaaggaatgtggccctgattgctgaaactgtgattttagcccatggggactcatgttgcatttccaacccacagaactgtacgataatgagtttgtgttgttgtttgaagccaccatgttcatggtaatttgttacagcagcaacaggaaatgaatacataggagatgaagtcagagaataggctccagaacaggttttgtggagcctctttgcagtcacagaaaggacttcgttttactggaaatgagacaggagacactggaacattctgaactgagatgggtcttcagcctgggccacctccctgcagctgggggcaagcaacggggcaattatctgttcgccctcctgtgtacaaaggtgaggagccagacttcctgtggcctagaggcccatgtggaaagtaaggcaagtgggcacaatctgagaatcaagattctggctggggttagtggayacggggagaaaacaagacaacccagtcctaccacaagggcaaagaaaggggcaggctgttcagtaactgcccatagggcagagggctggtattcagaatggcaattagtagtaaatggaaagacttctcatgcttgtttgcagggtttgggttaaggctgcagtttcacccccacatagatcctcggtgaggagttgttctcmaggagcaagtgagacagggaaggcagtgtggcggtgagaggagggtgctgactgctctgtcctgcagaatcctgttgctgagagctcctagagctgtggcctgcaagggctgctcctcaaggcctttgaggtcctcccatctctgcccttccctgagcagacaggatgggcacatcccaagattgtccagaccattgccttgccttctcttttcctcaagtcacattcagtgcatgtcattcctgggtccccgtgttcttctagggggaaagtgttcagcttagctagctgtaagcaagaaaactgcaccatctttcctctgggggaacattctgtttgctggggtaacctcctctctatcatctccagcttcttctcagaaagcagtcagtggcagcctttcttctctgggatcaaatcctgaggctctcattttagctctgagctccatcarctggttcatgtggctccaaagagcatattcaagtttgcccctgacttcccctctggatgataaggggcatcatcatcatgtagatgtcacagatttacagtgggcaccagcaggcatgaaaacatgctgttgaaattggcatttaacataagcaaagtcacagcaggctggctacaaaagggaaaaatgcaggatctctgcagagggacccagagagaccagctctttccatggacacctgggtcttcctgcttcagttctacttggagacagcacgacactgagttgtatttagagaaggatgtggcttgccctgacatgttcctatttgaggctttgattctaagccctttcatgtcctaaatagtattagatggatgtagccacaggcaggacatctcaaccagaacaaagcaggcctgaggcagtttccacgaaactcctctctgtcctgctcttctttgaattaaagagtggtcccctcatatacmmccaacactcacagtgtcagcacaacccccatcacacaggtcagcccatctccataatgtggtccaaatgttaccttcaagtaccacagaattaatgacagagaataggtcatggagaggtgccagaggtacaagccaaggaaaaacttgaatttttagctcaaatatatcaaatattatctcaatcctctgggttaaagtcaaaagaaagttatgagaggattaagccattatttcttgggaaatcacggagccagatggacctgctgttggtggactgtagaaaggacccagggtaggttaggaatagagactgagggaagggagccagtgcagacaggaggttgtgctggggcctctgaaaacctatggaggcacaatggctcgcacttgtagtcccagctacttgggggttgctgaggcagaaggatcacttgaacctgggaggtcaaggmtgcagtgaggcctgatcatgccactgaactccagcctgggtaatagagtgagaccctgtctggtaaaaaaaagaaaaaagaaaaccaatggaaactagaaagagaaccctgaccccttgaacaatcctggggatgattcaggctggaaacaccctgtactcagccctatagaagtatcagaacttagacaaagagcaggcagggaacttyacattaactgaccacctttggtggggcataactggactgcaaagtctaccttgttggagtttaagtgctattaatcaatttcacagattttttaaagttagaatttttagaaayggagtcttgctccattgcctaggctggagtgcagttgtgcaatcatagctcactgcagcaatgaactcaagccatcctctctcmcgtcccagacagctaggaccacaggtgtatgatcacatccggcttatttcatagattttaagtgtcttacccaaggtcatcatctagccagtgaccaggattcagactcaggccttccaccccaagacatttttttggagacagggtctcgctctgccgcccaggctggagtgcaatggctcaatggcagctcactgcaggctcgacctcctgggctcaagtgatcctcttacctcaaccctccaagtagctgaggctataggcactcaccaccatgcccggctttttaaaaatttttcctagagacggggtctcgctctgttgcccaggctggtctggaactcctgggctcaagaggttctcctgcctcaacctctgaaagtgttgggattacagacagaccatgtttttatagtctactgcataccgaggtaaagccacagacaacttttgttttatcctaaacaatcagcctgtgcacataataataaaaccaacctcacagtttaaaaatcacttttacttaacatttctacccttgagcctcccagcaactctgttacataggcatctttatcagcttccttttgcataaatgtggaagctaaacccaggaagattaggtgacattctactcaaaataagtggcttctcatttcataccctgtcytcttcccaccccatctgattccctgagaactaaattctgttccgttttcaaagatttgccagtacccttttaaggaaaaaaaacagtagattacaatacattaggytgggccatttttaactgaaattgctgacattcaacctgtttttttttttgttttttgttttttgttttttttttgagatggggtcttgctttgtcacccagactggagtgcagtggcacaatctaggctcactgcaacctccacctcccttcccactgcagcccttcccccacctctacccccagcagctgggaccacaggtgcatgccaccatgcccagctaattttttgtatttttggtagagatggggtttcaccatgttgcccagtctggtctagaactcctgagctcaagtgatccacctgccttggcctcccaaagtgctggggttaaagatgtgagccactgcacccagtctcaaccacttttttactacaaaaatggagatttcatgcaccccaaattaaaaaattggacctcaaaatgaagatatttatgctatgcttatatgcatcaaaaataggatatttggctgggtgcagtggctcacacctgtaatcccagcactttggtaggccaaggcaggcagattgcttgagctcaggagttcgagaccagcctgggcaacatggcgaaacctcatctctacaaaaaaatacaaaaattagctagggatggtggcaagcacctgtggtcccagctatttgccactgcactccagcctgggcaacagagtgaggccctgtctccaaaataaaaaatagaaaaaaaataaaataaacacaggatactttggttaatccctttaaattaacaaaggtaattacctgatgcagagagaaaaaarcagacatttttagaagtggaaaggatcctagaggtaattcaggaagacatgaataaaaggtaataaaaatgctactttagaacaaatagcaatatgaatgactgtagggaataaccaggaaaaaagtccagcctatasagagtctcagagtrgaaggcacttgcctctaagctctatgcccagagaggacaacagatcaggtgtctgtgagtgagaaaccaggggatgcccaaagttcaagggtaaggatggactgtgaagttctcaaatccaaggacattggaaaggactattaatccataaacacaarcaatcwctttaaacaagtcaggattgttgaatttaattaaaaacattttgttctgctctaagcgtttaataaaaggatttatggagaaattgctaggcttatatagcttaggaaagaagtgtttaacattttatctgcaaattgtattactttcttctagatacagatcagaaggagagggagaataataattagcactggtggatttacactcggggctcggacgggggagaatagaaggagacgtgggtagaaagtgtttggatttcagtgcaatatatgaggaatattctagcccttagaattacactaaaatccaacaggctctagaagtaataagctcccagtccctagaagtgctcaagtaatgcttagctgaccacttgtcaaggacattgtggaargggtttcttgtatttggaaagagagtgagctagaacacctttcacctgcttttcaattctaagatcccaggagccaaaagaagccaatgttctggagtcaaattaaatctawtcaagaaccggttttatccagttataaaaagagtaagtttcaactctaactttttatrattctgaaaaatgtcaaggagctccttttagactctctccatctatctttaaacatacttttcttcaaaaagtatcagtactcaaataaattacaacatttcttattcaaatgcattatttttgggtttcagctattcttacccaacagtattataatttwtaaaaacaccataccacaccttttcattgcaaacatagggtaattcagctatgctaatataaaggaaaatgttgtgggctagtgtggaaacctgttctcaccctcattgatcatactcccatgtayacttctgcttctatgaggaagtgagttctgaatctcaaaggactacctcacatctagtcaattaccagtacaatcctatacaaatgaagaggattgaaggatcgtacttcaatcctgcaattgaggactgtaggataaagtaaatcagcaagctgcaatttataacatgtcacttcgtacctgaaaggaaatgtttagggaatattcatcctctaattatttttttagcctcccatagtgaagccatgttaggcattatggcataaatgaaaaacctgagggtagggctcctaatgcagaattatactgaaaagtaagaggtagrgaaagacctttggaggactctcctggtaggcagaggagcctgaactttttggcattttggctcctggcagcagaaagtgcaggggacttccatcctgcagacaatctgttgaacaggctgggccagcaccaggggttggcaggccgctatcagagttggactaagctcagcctgctgtccagagtgctccttggagtcattctgctccagctgaggacatcagaatcttattagttggcaaagcacccacaggacaaaatctgtctctgattactaccactcctcctagagagtggggcatttggggccagaggtgagagggagagtgggaaggtgggtatgtgtaactataatggggttaatgctcttagattcagctagactggctaacaagccaagtcagatgggagaataaactaaagtgcctgtctcaaaggctttcagacttgggagggtgtagaacacagtggtaaagtgagaccttgggaaatggacaggcgtgggttcaaatttaggcccactgcttgtcagctatgtgactttgagcatattacctaatctttttaagactcagtgtctttatctgtaagatgaggaaaatattattgctattagcataaagcaacccagaacctgrcccatggtaaagctcaataaatgttaggtatttttgtgagttggtgacacacttaacacaagtcgacattatcaaacttgcccggcattctcaggctgttgatggtaattgccttcagagcccaagttttatccacggttctccaccaccttctgcagcatggggaagctgttcctgaggccaagtaggtggtaacagcagaaatcatcaggaggccttcagggagaggactcctcatgaacaagccaggggtgccatgggccactgtccctctcctctagagcatctgcttctgaggctcacgggggaagccttggacttggtttcataagcagagaggtatttccttacagcttctccagaccctcagccccagccagggaagaaagtgcacaggaaaaggaacacaggtgtcctgtacagccaggtacagaagaacctagactggttattggagcctggggcagaagtacccaggaccaatactttttaaaagccattctcaccatttttaagtgtacagttcagtggcattaagtccattcacattgtcatgcaaccatcatcaccatccatctccagaacatttttcatcttgcaaaactgaaactctgtacccaacaggcactaattccccattccctccagcccctggcaatcatcattctttytacatctaaaaagttgactactcaaggtatttcatttaaatggaatcatatagtatttgtccttttgtgtctggcttgtttcacttatcctaatgtcctcaaggttcattcatgttgtggcatgtgttagaatttcctaactttctaaggctgaagagtatcccattgtatgtatatattcaattcacctgttgctggacactggggttgctttcaccttttgactattgtgaataatgctgctatgagcatgggtgtacaaatttctgcttgtgtccttgctttcaattcctttggatatatactcagatgttggattgctagatgatatgataatcttatttttacttttttgaggaatcccatactgttttccayggcagctgtaccattttgcattcccaccagcagtgtacaagggttccaatttctccacatcctcataacacttgttattttctgtgtgtgcacattttaaacaatagccatcctttgcagtgacatgttattgttgttttgattatcattttcctagcaataattagtgatgttgaatatcttttcatgtacttattggtcacttgtatatcttctttggagaaatttctgtttaagtcctttgtccatttttaaatttagtttttggttgttgttgttgagttgcaggagttctttatataatctggacattaaccctcaacctttctaatacatctttaagtatctcctaagcttgacaccctgggggtgctgagtccacaaagcagtggttctcaaccctaagggaacatcagaatcactaagtttgttcttcttctttttttttccccctgagatagagtctcactcttttgcccaggctggagtgcagtggcgtgaacacagctcactatagccctgaaccctcaggctcaagcaatcctcccatctcagcctcctgaatagctrggactacaggtgcatgccactatgcccggctaatttttttctttttatttttttcacaaaagaacttaaaaatatactgatgtccaggtccttggcagctggattaattgttctggggtggatatgaggcatcagtatttttagaaacctcctccaggtggtttctaaggtgcatccagagttggaaaccactgctacaaaggcttgcctcttgggaggtgctgccctccaccacctgctgctgtgaaagtgagaggggcctgtggaaaggcaggactagggctggagggcccaatcccagtgagaagccctaagatgtcagagtggcagtaaagtagcaggaaaggcagccccaccccaattctgacacacagccccactctttttcaccaaccccatcatgaatgacaccaagacttatcaggaggaaataaccaaccactgctcccacagaaggcagaggagggaagggcagagaggagccctagcactacccagaagctcaacaggtgctgggagccctggtctgctccagcttggccacagactccctgtggcttcagggaggtcaccttgctttcctgagcctgagtgttctcttggaagagaggagaccgggctagtgcagtggttctcaaccctgactgcaccttagattcacctatggaacacttaaaaatactgaccctcaggccccatccagagattctgattccatttgttctaggtggggtctgggcattgtcatttggaaaagctcccagatgattctcatgtgcagccagcgttgggaaccctgtgctagtggatcatyaagaaccatcctgtggttcttttgtccccatttctggggtgatagtcatggcctgagcactcacaaggtgcttagccctcacacatagtccctgcttcacacagcctgcaagagtgctgacttggtgctctctgcaaatgctaagaggaccagttctcttatgggaattgaaaaaggaattgattccaacctcctgacaccagatgagaccactctgtcctattccacaacccccagaggaacattttattctcaatctagttgtgcataacttataaggtaaagcacccactggagacaaattactgckgagagaagaaaaggcrgtttgccaagcaggcagccagctggaataagagaaggaatagcttattgggtcttagctaaggccaacactctgggcagaccccagagagacagggaaagggttttgaggctgggctatgtgcataactgcacacactttcaaatggggtctagttaagggcataaggagtgctccatggagaatgcagacttaggtcctttttttttttttttgagacagggtttcactctgcaacccaggctggagcacagtggtatgatcatggctcactgcagcctcagcctcccagggtcaggtgatcctcccacctcagcctcctgagtagctgggactatataggtgcacaccaccccacctggctaatttttaaattttttttgtagagacagggtttcgccatgttgcccaggctggtctcgaacgcctgagcctgagcaatccacctgcttcagcctcccaaagtgctgggattacaggagtgagccactgcgcctggccgacttaggtccttgactgttgggagtcggggacctctgtattcagagctcacatgggtgagaagatagtaagacctcacaggatgccatttgaaagctcagcataattggcctaagcttggggaaacaggaaccaacctggaaataaaaagccaaagaaatgggtgataggcactgctggtacctttaagaagctatgctggttggcagaattagctggaaagttctatgacagcctccctcccagctttgtctcttgcctctattttccattcctggtcttcatctcctatttttagttaaatctccactaatctgtcctatagtcgagacaacccccagtcctgtgcaattcttaccctgaatgcttccacctcccacttcgggatcacagattgactctgacactgctctctgrctttccaccttgggtttgctcctgygaagttgcacatgtggcagccccagcagggagggagtgcacattttacccagcctcaggctaggaggccaggtctaggtcaggaagtctcatcttcccttgaagctgagtccctcctgatgaaaacgacccacacctggggatccaaggaacgttagccttttgcggcaaatgaattgctgtgcttgattttgtctctgcagatgggtctctcaactggacttgtgggagtgtgtagttattttgctggataatctatggcaaatgatataatagcaaaaacttatcatgacaactaargtgcattgaatgccaggcactgctgtgttttgtctccattacctcattttaccctcacaatctaccttytgtgtaccctcttctcctcttggctagacttcaagcggaaccagattcctgagtttccttgattttcctcttgtgcctgcaatttcaaattcccacacaacttcctgacacagtccctccttagtcctcagaggacaggggggaaagcaggcaatgattaaattgggagtggagggcacgaggagaattaggacgtcggtyttagctgacatttttctcctggtggaaaaaaccctggaaggctggatgcagcacaaacaatkcagcctgctgctgccatctagtggaggaaaggaagtcaggctttggaggtagaccagatggcactccagacaccrgmgtgttttaaatatgytctgagttcacagttaaccatcaggaagcctgcagcaggtctccatgctgaccctcgtccccatcttcctctcctagaaatatctagcacaggtctgcatagaaggcatgcctgctgctgattatctggccagttacaaaaataagcccagaactaaggcctggctttggcttcctcagtgtaaaatgcttggctgcaaggcctctgccacttggacttcacaagtcagtggatctcaaactcaaatgtgcatcagagccacctggaaggcttgttaaaatacagactgttgggacccaccggctctggaggagtgggggttctgatcatttgcgtttctttcttttttaaaattaaatttaaaaacactttttgaggcaggaccttgctctgtcacccagtctggagtgcagtggtgcaagcatggtttactgtaatcttgtcttcccaggytcaaatgatcctcctgccccagccccccactgagtagctggaactatgggtgtgtgccaccatgcctggctaaaattttttakttttgtagagatgggggtctcactatgttgcccagtctggtctcaaactcctagcctcaagccagcctcccaaagtgttgggattacaggtgtgagccactgtacctggcttttaactttgattttttatttttagaggtgcggtctttctctgtcagccaggttggagcgcagcgatgcaatcatagctcactgcagcctcaaactcctgggctcaagtgatcctcctgcctcaccatgccctgagtagttggaactacaagtgaacaccaccttgcccagctaattttttttttttttttttttttttttgagacggagtttcgctctgtcgcccaggctggagtgcggtggcgcgatctcgactcactgcaagctccgcctcccgggttcacgccattctcctgcctcagcctcccgwgtagctgggactacaggcgygcgccaccatgcccggctaatttttgtattttgcccagctaatttttttaattttttttttttttttttgagacagagtctcgctctgttgcccaggctggagtgcagtggcacaatcttggcttgctgcagcctcatggcaacctcagcctctcgggttcaagtgattctcctgcctcagcctcccaagtagctgggactacaggtatgtgccgccttgcatttttaaatttttgtagagacagggtctcactaagttgcccaggctggcacctgcatttctaacaggttcccagggcatgctgatattactaatccagagaccacccctaaagaaacactgtcatgaggagtttagtctccctggcatgagaaaaagtgagtaaacaggcatgtgaagggaacacagagcttacatacaataaaagccaaggctagaatactttatctgttgaaggcacataaaggagtcatggacctcaaagcctggctgggctgagggaaggatcagatctgactcagctgtggctcctccctgggtgtgcctggtgtctccaggtcagcatgtgagtacttggtcgggggtcagagagccagaagttgctgtggagsgggagtgggtcagtggagaaaggatgagtctaaaccatatttggccaaaggtagaagaggactttcccgaatgtagtgtgatatgatgggaaaactggaagagatcttggaggttacttaattcaaccttcatttccaagatgaaactgactcaggaaggctaaatgactttcccaaagtcacacacagttactcgggagctcttcctctccaagttcccaacccattctcttcacagtcaggtcccaaagaaaccccacagggtaaaaatgggtctgtgagacaggtcacttccatggtggtcttcagctagagtcaggccagcgctcrtggcctccttggtctgtgcctcccacccgctctgttctcctacctttcaccaaggggaagaagcagtccatctccacgctgcttcgggagtgtgagatgcacagggcgctgctggggaccagaccctccaagggcgggctccgttcggtggtacggaccagacaccaaccaggccgctcgctgggccgctccagcagctctaccgtctgccccacctggatggtcagctcactgctgtggcccgcactgaagtcctggaggaccactgtcagctcacatccaccagagagctttggagggtggtggtggagggagtagaacaggagggcatggaggaaggggggagaaatatgggagagggttggtgagaggggaygaaggatgtgtgagagcagaggtaaggaggaagagaaggggaataaagaggaaaaatggtgtttagggcagagagatggcagaagatgaaaaggagagttgagaacaggaaagaaaacaagaaaaaaatgtaattagcacagtgctattcaatcactcaggctttctagctgtagccacagtctgaagcctgcccagaaccagggctttgattctaattcctcttacttcgttagagctcattattcctttgccaagcttcagctaattgtgccgttaaaccccttccctrtatgcccctttactccttccaagggttctaccctgtgccctgtccctgccctgactaccaccctcagactcctattgtatgggcatctattctaactcacccctcccattagattctcactagatgatagggaataatggaagagacagccttccttccttctaacccctgcaacacctcccatccccaccccttactggagccatcagcctaaaatcgaggctacgaggactacaaaaagaatggggcttcaattcaaaggcagaagtaaagcaatgtctgtctgggaggggaatagcctcaaaggctcaggcactggggaccaggaggaagaatcagaagggaagacgggccacttcttacttaggagcatacgcccagccctcatgctccatgctggcttgtctccacactggcatcttcctaattcactgatcctggggcagaagcaataaaaggggttgacaggaacaacccctactggctgaatgctgagacttctcactttttcaccttggggatttggccccacttcccccctttcttctggcttcatatttccatgagaatccattcggttattagtttgtctcatagaactaagtacagtctccctcttggaagagcagctgcacttagaggcagagtgacaggtagggaacggaaggaatgaggaggctgaggcccagcttggtagcctgttatcctctaaagttcaccccaaaagcagtttggaggcaaagtccttgcaccacctccaggaattcgacttcagtctgtgcatctctgatttaagccttcagggcccaaattttctgcaccagtggccatattagtgcacttgtccaaatatgttgtgtagccatttcacacacattctgggaagcttctgcccagtggcatacacagtgaacgccacagtgagtagataattaacagtcccaccaggaccaaaagctcagcattcaggactgtgagagatttacactaaagggacttcgatatcagagggggcttgaaacggttaaaataatgcatcagactgatgttggcaatatgcatcaccaccagttacagggcagggagtctgtgctaaccacgtccccataggactgccattgggatcagatcaggaaatctgcaggacagaaggtagaaggtagaaggtggaaggagacagaagaaaatatttttccatttaactctcctggtcccattaaatgcagtcttcactcccccactctcctggtgctatcctccttaaaaacatcacagagagaaggattttgtgggatggaaacacctcaaatctctagagtacttttacagttagcaaaatacctttgcattaattatctacttggtcctcacaataaccaggtggtactatcatctccatctcatacatcaggaaattcaagctcagaaatgtcaatatcagtggttaggcattgagtatacataaaaatcatgtggagagctaataaaatggagattccctagcagttccttctcttgctccacccctcaatcacacatcatgattcagtaggcctgggttagggcctgggaatgccttccactgcccccagacagggtctcattctgaaacccaggctggaatgcagtggtgcaatcttggctcactgcagtttctacctctctggctcaagtgatcctcccacctcagcctgctgagtagctgggaccggtgtgtacccagtaggtggtacaggtgtgtaccaccacactcagctaatttttatttttatttttgtagcgacatggtctcactatgtttttcttgaactcctgggctcaactgatcctcccgcttcagtctcccaaagtgctgggattcagattccaaagtgctctgtaagaaatacacttcatattttgaccagggaacactacatgtgaatagatttatcactgaaacacaagctccactctgacattctattttatgtttttctctattgctgttgacatcccactaatttgattccacctcgctaatggactctgtagaatgccggcctagatgactgaaattctttctaactgagagactctctatcactgagcttctgcacctcagtagagctgctcctctgcraccacgccaggggctcagggttgcttcttgaggccaagctcacacatagctggggatgcaacttgcagccctttcagggcaacatggttgaatccagggatgagtgtagtccttttgcagactgttagagcagaaggggcctgaagctctagttgcaaacagcccagcatggcacccagatacaagacccacttccctctagggtgggttacaatcagacccatgggctggacgggagaggataaaaatcaggcttctgtctctctacaattcaagacacagttcctggcgagaagcctagatacgccactagatggcagtgtttgcctcctgtaggctgcctagtccagccaaaggaagaagtggaaacaagatcaatgggcaatttcttccatgctcacacgttgtagacaaccgggctcaagctttagatacagcccaaaagccattatggttcaaatagatgatgaatatcctggttcacttcacctcaatggcttgatcaaaaagatatactacaccaggtccctaccctggcaagaagcgaattccaaagaatggccaacaagggagggtgctggggaaatggtttgaggggtcaggcagagctgctcctgcaacagtccctcccatcctctcctccagggatgctgtagggtaagattctaagaccaaagttattcctactcagggagatgctggragctgagtaggcagcacagaatctcggcatgcattcaggttatgtttttgattcttctctgatcttgtacccctgcttctggaatcttctctcatcttactcccctcactgtatgctcccactccagcagcgagtccctgtctggcctttcatgcctaagtcttggcccccttcccaggagctctcagatattttctctgcctaattccctagaaccctgcctaaggcctgctaagccttcttgatgctaattgtctgcctggcttccctccaagtgcctgctgctgagtcaccatccaactccttgtccttactttccyagtctctctcctttctgggtcctggccattcccagtggggcctgttcccctgctgaccaatccctgggtggacacggcctccttcaccctccgcaatgcttcccagaggggcagaaggagctcctcctgtcctcactttcctccagctccacagtgatagctgtgctggcttctttccagcatggaccgctacatacataagggacatttcgtaaccactctttgtaactccatctgcattttcaaagttctcacgttcaccagaaatgatcattttcatttaggtctatttttacatgattaatatttggggattaactgaacctccttcttgtataaactgtgtgagctagattgtccctttgagcttcctcatgttatggaaaagacacagttattctgtgatggtttcccaatggcatccagagagtgaggacaggacccctgaagaattctcctgttgtcatttcagagcttccatttgtgcacctctgtgtctctgctccattctccaaggcagcatagcctcgtttagggcatgggctctgcagctcctcaccaactgtgtgaccaggagcaagttacttcacctctttgtctcaatttcttcatctgtcaaatggggataatgacagtatctacttcacagcttgttgtgaagattaaatgagatagtattaaagcacctaggatagtgccttaagcagagagagctaaatgattgtctaaaaaataagttctgggctgggcgcagtggctcgtgactgtaatcccagcatttcgggaggccgagggcggtggaycacttgaggtcaggagttccagaccagcctggccaacatgttgaaaccctgtttctaataaaaatacaaaaaattagccaggtgtggtggtgcacacctgtattcccagctactcaggaggctgaggcaggagaattgcacaaacctgggaagcagaggttgcagtgagccgagatcatgccattgcactccagcctgggagtcacagtgagactccctctcaaagaaaaaaaaaaattctggcggtattagtgaattattatttaaatttgggaggaaaggagtacagaagaaattttaaacatcaattttgatggcatgttgtttggtaacagactgtatcaactgtatatatgcatatacattattatgtaagtgaatccttttttttaaagtaatcttcatggagttttgccctaactagaagaactgaccctgaggctcactagggaaggtgactcagacctccctcaaatcagcacatacttttcctgttatgataaaaacaaagacatggtgggaccgaggaatcccttatgcaaaatgaggattcactcttgcctcttcattccgcattgctttccaggaagcttccatgtgaagaagcccccttaccccagaatctgatacctgccctcaatacttgccaactgagccttctaactgtgaatactgacttctgacactgccttgcagagcacttggatctgatactcttgacagagggggagctgtgcccaagagcgcccatcagataagtccgacctcctcttcctccyctggctgcctgccctgcaacttcttccatctgatcatctgattcctccacaactcttagccagccttaggcaccaagttcacatgaattaacatctacatatgaacagcctcacaggaggccagagctggctggcaaaaaatgtaaagctggagcatatctacttggcacagtttcaagggcaccgtgaagtcctgccaactcctgtgcaaaaactgtctttctctcctcccctcaacactccctgcacctgctgctaatgcctggaattcctccatcagaaagtgatttcatttaattaggtaatgtcccttaacatgaaacacctcaaaccagactatgattcccttccaaatgcaaaaagatgagatgcaccacacaagtgacatgcagctgtactttaagcatgaaaatgctcataatagcattttttcaaatgaagaaaattttacaacaataacatcaccgcccccctgccccaatactaaaatataaaaatctacccagtgggaagtggatgagggttaaaaagctacctattgggtactatgctcactatctaggtgacgggatcatttgtacccaaaacctcagcatcacacaatatacctaggtgacaaaactgcatgtgtaacccttgaatctaacatggaagttgaaattacttaaaaaacctaacaggaagggaatggttaaataattatgatatatctactaagtgagtaattaattatgcagccattagattatttataaagctttgtaatagcttaaatacttatataaagtaaaaaattttttaagaggacaagacgtacagttgtatawataactgtgtgaacatcatcaacaacttagcaaccctattcataggaaacagaaggaaaattcgttgaaatgttaacactggtattgttgggtggtgcactctgggtaattttccctctggctttctgatctccagtattgcccagtgtttctcacataagtgctgctttataatgaaagtaatgataacatcaacaataacaatctctaaaacaaatcaacaaaggtaatggggaaaaatgcaaatatttcaaggaggtgtaacactttgaggggagaaatgggggagcggatagacagtttccaattttgctctagggccactatagaagcttcaggaaagccccaaattgctgatgatgctttagtatagctgcttcaaatccttcctctactaaacttctgtcctcgccctactataaaactctgaaggcttctccagaaactaggttccattaaaagagcttagtgctgtgcttttatcttgaattgattataattttttttttagcaaatgtgtaaagcaatgtctgggcatttaggaacattgtcgtggagctctgggatttcatcagtttgtatgttggaagcccatggagctgccaggtccaattaagaggctaaagcttacaatttactttatctttgcttgctggaactgtggcttctactaactgcaactgaaggagctgtttggtttagttgtttcccatggtgtgtaaatgagcaccatggtcccctggtcttgcaggtcttgtgaattgcatagtaattaatagtgggaagaatgcaggagtgggaatcaggaggccttggtgctggtgcaggttttacccatgtatgacactcagcaaaccccttcccttcttcatacctaaatttcctcatttttaagatgaggaaattggactccagggctgcttccagttttaatatttgataaatagagtagtttctatattgaatctctaacacacagtgctactgaattttcttgagcacttatcattaatgtgttgccttgtttacataaattatgtgttactcttatcctatgtaagatacagaagagcagagcattccgtcttgctcatggtcctatctcccgagtttagagcaatgcctggcacacagcaggtgataaatatctgttgaatgcgcgagtgaataaattccatgaattattgcctgatatataactgagatgcctagttacaatgtctgagaggtgtctcccattggctgcccacctattcctattagtatcttacagataactgttaatttttttttctcagcccctttcaaccaaatttatcttgccctttaatcatgtgactatatctccatgaattcctaaacctgacaaaaacaacataaggtgttagtggggggagacacaaatccacaagaacaaagagaatgggaggtagtaaacaagataactttatttatttatttatttatttatttatttatttatttatttatttattttgggacagagtctcgctctgtcacccaggctggagtgcagtggtgcgatctccgctcactgcaagctctgccttccgggtgcacgccattctcctgacctcgtgatccgcccacctcggactcgcaaagtgctgggattacaggcgtgagccactgcgccgggctgagaacttttttttttctttaatgatagaaagcagatgcaagaatgatactgacttggtagaatgagaagatgagattcaagctcctgccagttatctctgctcaaccctcagacagccccagggagtggaagcaccagacggcactgaggatggacctacaggtggggctaaaacaggaagatgggacycctagatccctcttctatcctatgcgcactttcctgaaaaatgaaattcagtgaaggcttaaatgtagaatggagagatggctagtatccttgtccctcttggatcccagaatgctagcagccacatataaacatgttagggagattttagaatcattcatgggagaaaccaaaagatgtacagatactcaaatactgacacttagagatccctctctgctcccaaaacctccagtgycctgccagatcacttcacagtgagaactttaagtcaacaagttccttcctttacacagaatattgagtcagcctttgtgcctcagtcataaatgtgaatattcagctatagattaccagacttttcagaaaaacctctctaacagagaccaaaataaataaacagaaaaaggaccaggaactcagaggaaacaaaatgcaagcaggacaataaaacatcagtaacactataaaatcctcagaaagataagagaggatattgtatccatgaaaaaagaacaagctgttacataaagggaaaaagttgtagagtgagaaagagctctcagaagttaaaaatgttatggctgaaatgagacatttcatagatgagttgcaagataatgtcaaggaaattttccagaaaatggaacaacaaccctgaaaaaggagaatgtaatctgagggccttttggtcaagttgtgctgctggcttcctttgagcatgtagcctactaaaaaccccaacttaattcacaggggcttctcaaacctccacctcccaggtcaagtgattctcctgcctctgcctcccaagtagctggaattacaggcgcatgccaccaaacctggctaattttagtatttttagtggagatggggtttcgccatgttacccaggctggtctcgaactcctgggctgaagtgatcctcccaccctggcctcccaaagtgctagagttacaggcgtaagccacggtgcctggcctgtgcctgttctttatctctgtactccctgcctaggcttcagagaacatctaactagacactgactcaagtttgggtgagaagggcagagccatactctcctcggggaaagaagaggcagtagtagcaactggtatttattctcccttctatcttcatctcattgcccctggggaacccacacaagttgtcaatagagatgcggctgggaggattaacccactggcaactttgcctctgcaacactgaccctcaggctggaggtaactgtccaactgtcctgtctacagggaggcatctcctggctcctttgtgcttaactgaggctgtctatactgctgttttgattgtgcttgcacaggaaggcatttcctgcaacacaccctatagctttggaaggaggaaagagctcatagacatgattctgaaaatcccaaggctacctatagaagagggaggagaggtggctgggtgaaacctgatcaaaaagagcaattcatggttagagagagagaagaagttacgggcttctctgaaagccccaggcattcctgcaaattgtctactgtatggactgtgcaacactggaaaactgagcttcagaggaaaccaggccaaagaccagagacgattttcacagaagtgcaaaatgtcatcaaacctcagttattcagatgtgggtaaccatttccctttctgtggattactgggtctggagctagactgcttaggtttgaatctgtctcaatcrctactatctgtatcatctggagcaagttaattagtctctctttggctcattttccttatctgtaaagtaggaatcatattaattcctgccatatagagttattggaaggattacattaacacaggtaaaccctgatatgcattacatgcttaatagatgttatatattgtttatccagtaatcataacttggcatgcacttgagatgtgttttcttgcactgatatcttgtgtcgagggagtagaaatccatttccagggctgggcgcggtggctcacgcctgtaatcctagcacatcaggaggccgaggtaggcagatcacctgaggtcaggagttcgagaccagcctggtcaacatggtgaaaccctgtctctaccaaaaatacaaaaattagccgggcatggtggcgggcgcctgcaatcccagctacttgggaggctgaggtgggagaatcacttgaacctgggaggcggaggttgcagtgagcagagattgcaccactgcactccagcctgggcgacaagagtgaaactccatctcaaaaaacaaacaaacaaaaataaatcaatttccaaagcacccttaatgacatatcttgagataatctggcagactagaaagaaaaaaatagtaaactattcccaaacccacggttcaaagatttagtaccctaaatttaggctataatttccctttgtagggccacggatgtgactttctgctcttcctatactgggcatcctagagaaacaacagattggaatcagactgggaagagaattcttggaactggttgccaaatcagggtagataatacatgtttatttacactgtggttgtagggtggaggtcaaggtatccagtcacacatagaaacctggcaaactaattcctggaaagaggccaagctctcctctggttgaccaggaaactctggttggtctaattattgttaggtaatctggggacrggcagcctgtctgccaggactggagatgggaagagggcacatgcggagcacctgagaggggaacaacctgcctctgtaaggggtcyggctgggagcggggtgacttacagattcgtgttcagaagaaacagcgcattctaaatgctttgattcagaaagcaaatactcctggtcactgtctctcaggccagaagaaatgtcagcagacatcttgttaatttttcatcctcaggcasactaagataataattaacatctgtatggccctttatagtttataaactatttcatagacatcatctgaccctcatagatctcataaggttggcattatcatccaattttatagatgaggaaattgaggctcagagaggtaaaatgactagctaaagattgcatcctaatagctaactgcaaaggcaggactccaagcctaatgagtccagcctcctcatccatgcacttattcttcttcaccagccagctgctgtgctgggcatggggcatacagcagtcagggagacagctgtgatgtccctacctgcaccatgcttacagtctctaaggagacacacatcacgtgtatgcatgctgaatgtgacaacaggagaaatgagggatgctggcccagggttggggaatggggtccctcagaaagtgattggctcttaccagtgctgcctcagtccattgctccacttgctactgctgtggttgtgtcttctcagagctgtttatcttgttagtttgtgagccctcccttggctgcaacagtcaataacatcttcacgcccgcttagctaggagccagcaggaccctcgagcatctgcctctttctaggtcagttgctgagcaccaccaacatgagcccatctccagctgtgctggcaccaccccagatccagcacatgtgcccagcaatgagtagaattggtatcagcaacggaaagggttcccagcatcttaaagcatcttcatgtcaagtttttgccctcagcaaattactgttagggtttccccttatccctgaccttaccttcttcagtgtaaagacaggcctttatctatgaccccatactttccatttgctcaggttaacccacttactgggtgagtcctaatgtgattttctgctcccatctgctattgttggttggttttgctttgggactgactgcttccccatgcctcacctctggttcatgacatcatgcctcctttgtctcctcctctcaccatcctctctggataccaaccatcatgacatgccctctagggaacactttgtactgttcccttgaacatgtgcatggtttatgatccagctccatcttaactttttatttatttatttatttattttgagacggagtcttgctctgtcacccaggctggaatgcagtggtgcgatctcggctcactgcaagctccatctcccgggttcatgccattctcctgccgcagcctcccgagtagctgggactacaggcgcccaccaccacgcccggctaattttttgtatttttagtacagacggggtttcaccgtgttagccagggtggtctcgatctcctgacctcatgatctgcccacctcggcctcccaaagtgctgggattacaggcgtgagccactgcgcctggtcttaacttcttaattttcaattcrgactggctctccagggacaaaaagagtaaaggcagaggtctagtggcactaagtagccactagagggaagcaaaagctaggcttttctaaaggaaacacgtgcttgggttccttgatcagaagactggtcccaaagagactcatactacactggctagggcaaccaccagccctcagaggaaatataagacaaaaaaaattgcatacagtaggtggcacatattgggggcccaatacatgtttcctggatgaaattcctaattttagaaatgagaaagcagagactagggcaagtaatgggatctgatcacaaaactaggtagcatcggggcccagtcttgcagattctctttcccttaccctgtaccaggcctcttcctcttcctcccttccggctccctccactatagctcagcccagatgaactacctgtccatcccaatctcaaaatatttttggagaaactgtagtcatttgagagagactcttttctctaccccttatgtctgatctatcacttagtcctgcaaagctattaagtctttcctttgtctcttggaagcccctatgctcatccaggtgttcatcacctgcctctccatttctgcaggtgtctcctcattaactggtctctcccactgtccattcttctcataacactctcttatttcagaatttacatgggctctgccatccttgtcctggcattcaaagcccttcataacacttccccacccacttcttcaaccccagcttccactacttgtctgtgtattttatctgcttgatctcttgagggtgccccaaatgtgtcctggccatttctgcctctggatttccatggatgggcaatgttccatctcaaytgtttcccttttcctctccagaccctgtctttcctgcttttggaggtcaagtacaactctcaattccccacctctctcacattctttcacagtgatttctacagtgatgtccccttcctgggactaattttgttcatcttacacattttaacactgaagcggtgagaaggacatattttggatggcttgtgtgtatatatgtatatattataaaacttttgtgtatatatgtatatactataaaactaaaataaaacagtattccctatttggcttactgaatagtcatttttagagtggcttcttagttttatcacttttctcctattttatggcattgtttcaacaataaggcatcccagagctctgtgtttggcattagtcagaaggacccgtgtatgtgtgtgtgagattttgtgtgtgtgtgtgtgtgattgtgtgtgtgtgagattatgtgtgtgtgtgattatgtgtgtgtgtgtgtgtgtgtgtgtgtgttggcttcttggggttttctttccttaaaaaaaagtcagtatttctagtccataatctgtgtttcagttggcagtggcaagatagaggaggctgagggaattggtaagtctaggagcttactagactacatcatggtgatttataatctgggttttgaactcagcagccctgagtttgaattcaagttccaccactgactagctgttagctgtgttactgtagaaatgttaaagatataagttctctttctaagcttcagttcctcgtcaataatattagaacactcagttcagttcctcattcaaaaagattaagataagtaccaacttaatagggctgctgtttcaattaaagattatcatgcatgggaccaggcacggtggttcatgcctataatcccagcactttgggaggctgaggcaggcagatcacctgaggtgaggagtatgagaccagcctagccaagatgatgaaacctcatctctgctaaaaatacaaaaattagccgggcgtggtggcacatgcctgtaatcccagctacttgggaggttgaggcaggagaatcatttgaacccaggaggtggaggttgcagtgagctgagattgcaccattgctctccagcctgggcaacaagagtgaaactccatctcaaacaaaataaaacaaaaagattataatgcatgtgaacacttgatacctacttaatggctgttgttattatttggtgtgattgagccactgaggtcacatggaatactcccttctagaccttctgtcccattttcctgctgaatggctcagtggtgctgagcagagagggttcagaagaattggacagttttgccttccatttgatagctgtaagagatgggggctagatagtatgggagataattaaaatgtaggtcccattagaatatttgggctagatttaagatttaatagctatggcaaaatacaaagtcaagatggcagaccctccaaaaactgggaagagagggcaattttatcctcctttaaatataagtcaaccataccaatatggattgagagcagccagatagtttcagagaaagcagagaaagttctacttatcttataaatttttacagttctttctttcctgtaccccttcccctgtagttatgagtttggtagctagagagagccagcttgacttgaaatatgtcctggacaaaatattataaaaaagaaagtgaacaaggacttggtgatgaaaacttaggcccttgggaataccaaccacactcgctgagagttccttgtggcagtgcttagatggagagcaaatttctttttatctttaggaaaaatcagaacctggaggaacacttgggcaagttatagaaaacctggaaattgcccctgtgagaaggctcctatgcccccattttagcaaacagggagaagaatgagctcttagctatggagatggtcggtagtatcaacctcacaacatgtttggtacatgtaagagaaaaaaaagagagtcccctgcttgagccaaaaagtttggtatacataggggtaagggggtagctggggggtggggaggggcacaaccataaccagcatcatgacaggggagccacattgtaaccatcagatatcctttctcccttcctgctctcctgggactttagctacaggcaatatattggattccaatctagagacagtcactctgggtacaggttgggcatggtggctcatgccctataaccctagcactttgggaggcccaggcaggaggattgcttcaggccaagagttcaagaccagcccaggcaacacagccctgcctctacaaaaataaaaaaattagttggcatggtggtatgagcctgtagaaccagctactcaggaggctgaggtggggggattgcttgagccctggagttggaggctgcagtgagctacgattgtgccactgcactccagcctagatgaccaagcgagaccttgtctgtaaaaaatactaaataaataaaaattattttggcctggcacagtggattatacctacaatcccagcactttgagaagcccaggcaggaggatagcttgaggccagaagttcgaggccagcctgggcaacacagtgagatccttgcctctataaaaataaataaataaaatttaaaataaattaaaataaattaaaatggaatttaaaaaagaggtgctcctctcccggtgctttgaccaccccttctggagggttttggtcgacttcaaaccaatttggtttctaaaaggaagagactgcatagaaagttctcctttaaggctgacttcaagttctttgttcattcattcgctcattcattcattcaacaaatccgtgtgagtattctgcctctggattcacagccaggacagaatgtagttcccaaatacctgccccaagcccacagacatgtatccccagcatatatgggccaggatgtctctgtattctcgaagttctctcacagctaagaccttcctaaactgcatttttaccagcctcctccacctgcttctcatctccctgaaaaggcttcactagactctgagacctacaagagatccttccgagacactccctctctcctttcagctgcatctaagatggatccacactgggcgcttttgggtctaagaccatcccctatattgtgagggtacaaggtttccatggtgaaggaggcattctgattttgtacttctctttccctaacccccaacccagcttccacaacaaccctcttctatattggagtccatatgaagtcactgttaaaatcaccactgtctgcctttctttctttctctctctctcactctttttattgacataaggtctcactctatcacccaggctggagtgcagtggcatgaccacggtttattgcagtcttgacctgccaggttcaagtgatccccccagctcagcctcccaagtagctgggactacaaggtacatgccactatacctggctaattttttttttttttttttttgagagatgggggtctcactatgttgccagagctggtcttgaactcctgggctcaaatgatctgcccacctcccaaattaccaggattacaggtgagactggccatatcactgccttttaatcactaagcactttgacaaagtaacagagttgtcaacaaaaaggacaatggtggttatcttcttttgaaaatggccattgtatttaaaaatgggattagtggctaagtgccttccctttcccatagtaagttactctccaggttttctagttgcttctgtttatattaagggaactagaaaaagggagacgacttacggaaaaaattcctatgtgtgatctctgctttctcaaccataatgcatctcttttctcagtcacgtgtgggtggggttatgttctgagcttgggctgagagatttcagagttaagacggttgctgtccttatctaaaataatgttcctttagagaggtctgggctctctaggacatcaaagaagcatcatcaaggtgaggctgcatcataaagtctcagccagcatcccataccttccttaatggggacgctgaacagaggttacatgagacatccacaattaaggtgggatagccccctcacagcaggtggggcccaaccccctgccctggcctctgggttgaggttgttgagacccagcctagagactccatctcttctagcaaagggcaggaagcagaggtccctcacccctgggctctaggacagtcatgtccctgtgtgagcttcccacactgcctacagttgctgccagcagcaatgaaatggattcttgaaaaaaaatctcagcatataagatttgagaaaagaaaaataccctacacatcagggacccttgaaattatagcaataaatttatgattcattccctaggcataaaactactgtgttacagccactaccaatgccactgaatttcccagggtctaatgttgacctcaggctcgccagcaaaggaggaagaacataagagacctcaatatttagagggttttacatttcctatacaaaaaaagagcaaacgaagagtgaagagctagctgctacagtaaaagaggtaggattattggtcaatgtgtagcaaatcaaatgttaggtaatataggaattgtgggaaccttcctggtatcacatattcttaaatgcagcaagatcatagagaaaaagcatggatatcactcctggccttaaaatttaagtgggctccctttgtgtacaayaaaatcctaactccttcacaaacatcctctagtacctgcctttctgatctcaccttattccacagcaactacagtctgcaggcccagccacacagtggctttggtcagcttcccttctgcctagagcaccctaccctccagtccacatctgccaagttgtcctgcccctttaggattgagctcagtttccatactaattgattaattatcttactgattcattgaacaatacttacaaagtgcttattatgtgccaggcactcctttaggccctggggatacagcrctgaacacaacaaacacttttgccctcatggagtttgtattcttgaggatgtaatcaagataatgacaaaataatcaagatgttacatagtgagatctatatctatatctatatagatatatagatatacatagatatatctgtatctatatcgatatagatgtatcgatatagatagttttgttttgttttgagatggagctctgtcgcccaggctggagggcagtagtgcaatttcctctcactgcaacctccgcctcccgggtacaagtgattctcctgtctcagcctcccaagtagctgggattacaggcacccaccaccacgcctgactcatttttgtatttttagtagagacagggttttgccatgttggctaggctggtctcgaactcctgacctcaggtaatctgcccaccttggcctcccatagtgctgggattacaggcatgagccactgcacctggcccccttgtgataagtattgaagggaaaaataaagcaaggaaaggatatgaaaagtgccagtgtgcatgtatggtaatggagtggtttgcatatcttctgcaaggctttacaaaccccacagctactgaattgtttccttccttcatgttcccaacacacatgacagtttcctttattacagtatttaacataagcttaggtaacttcatgacagaatttaatgtaagcttccatgttatttatatttgggctagttacatatatgggtcatgctctgcaactagagttggggtacctagaggctttgtaccttcaaacccctgcccctagacatgattcacatagcatctgttcactcagtgtttcctgaattgaaagaaaactctgcccacagaagtcagaatctaatgcacccttgcttctgtttttcccttgtctttcttttcttatactgttctctccctgttttacccttttgttcacattagaggttttctcaatattatcctgagaagacatccttataaattaatttctcttctactaattactgccgaatgagaattatctttcatcaagtaataaaaaaaaaaaacctgctgatttctgatggaaactcatttataaagaaaatgccacattaaaagaaacctgtggtgttttgaaaatatgtccacaaggccgggcgcggtggctcacacctgtaatcccagcactttgggaggccgaggtgggcggatcaagaggtcaggagatcgagactatcctggctaacacagtgaaaccccgtctctactaaaaatataaaaaattagctgggcgtggtgatgggtgcctgtagtcccagctactcgggaggctgaggcaggagaatggtgagaacctgggaggcggagcttgcagtgagccgagatcacgccaccgcactccagcctgggggacagagtgagattccgtctcaaaaaaaaaaaaaaagtccgtaaatttttttaatacctcacccttcagggattggtggaattgaattcctctctcctctacttgagtgtgggctgggtttagtgactacttcgaatgtgtagaatatgacggaagtgttgatgcgtgacctctgaaactaggggataaaaggcattgctgcttcctccttgttctctactaaatcactcactccgggggaagccagccaccgtgtcgtgaggacatttaagcagccctagagagaggtccgcaaggtgagaaactgaggccgcctgcygacagccatgtgagggagccaccttggaagcagatctagccccagtcaaacctccagatgcctgcagctccaagcaacaccttgactaccgcctcasaagaaaccctgggccagaaacaccaggcaaagccaatcttggatttctgacccacagaaactactacataataaatattgttttaagtctctaagttttgaagtaatttgttagggagcaatagataattgagtgagcgttactctggtactatcagtgacattgaggaagtcaattaacctctctaagccttggttcctcatctgcacataaagggagtttgggtcagaggactcaaaggaatgccaatgctaacaacttattctctctgaacaaagcactctaggaataatgcagtttgggtcagctatgtgtaaagggtaacaaccttgagctctctgggctatttctgcagattctgacaacaaggggtagtcatctgaaaccagaggtacaagctttgtgccggaaagtgacattcaatttagaaagggatatccaaaaatcctacaaatggaatattttatgcttcgagggacttacaggaggtaatataatatgctttacgtgggtgtggtgcttcatagttgacaaagtgttttcatgtgtatcatttcatttaacccttataaatccctcaacagaaakttgaggctcaaagttgctccaagtcacacggctactaagttccagagctgaaaactgaaccacaaactctttgttgttaaattctattttccattactttcagccgcctccctgatgatttacttattttattttgattataatattaaattaagcaggccaaggacattgtctaacatggccacaaccccttctacaagaagctgccctgcttatagctgctgacaaggcaggcctgaggcagcagcatcttctatcacataacgccagtccattctgtgcccacaggtgattggactagggtgggcacttggcccatgaaaagctaccctaagaagatctgggcttttcttttgagacagcgtctccctctgtcacccaggctggagtgcagtggcaccatctcggcctggggcaaaaaaaaatgatctgggctacctttttttttagacagagtctccctctgtaacctgggctagagtgcagtggcaccatctcagctcactgcaactcccacctcctgggttcaagcaattctcctgcctcagcctcccgagtagctgggactacaggcatgcaccaccatgcccggctaatttttgctttttttttttttttagtagagatggggtttcaccacgttggccaggttgatctcaaacttctgacctcaagtgatcagaagtgaaatcccaaagtgctgggattactggcgtaagccactgtgcccggccgatccaggttatcttgagagagctcttttccaagcaactaaatgaatttaactaaagtcggtaggactgatgtaaaattagcaaaataaaactgcgtggttataaaggtccaagaattatatgggttttttttttaattttaattttaattttttgagatagagtctcactctgccaccaaggctggagtgcagtggcgtgatctcggctcactgcaacctccgcctcctgggttcaagcaatcctcctgcctcagcctcctgagtagctgggattacaggcatgtgccatcatgcctagctgatttttgtattttcagtagagatggggtttcaccacgttggccaggctggtctcaaactcctgacctcaagtgatccacctgcctcagcctcccaaagtgctgggattacaggcgtgagccaccatgcccagctgaatcataagggttttctaaaacaaaacacatatacacaaaaaccttcatgaattctgacagttaggtaacaaaaacagttctgtcgccaaagacggcttatattttatgccaccaagacacaggaaataagttccactccctcacagaacaggctgtgactagcaactaaccaactgtttttcagtttttaagaaactgtttccaactgtgctaaagaggtgacagtcagcccagagtaayagggagaacaattaatacttacatagttcctaagctctgctgtggggggttgactggcatgcagctagggaacatgatcgtgaacccctaaatgtcagctgtgatggacataaaccagtgcctcacataaggcttagttttggtaagtggtgcccacggagtggccctagatctgccaaaaaattgaccttcacagcaccatgatagagagatacaatgtcaagagttctggactgaaaatgaagagccctggatatgattcccagctctgtggcttggacaagcaactttaactttctaagccacggttattgcatctgtaaaacaaaagggttggactaaaagatttcaaggtccactccagctctccaaaattgtgtatatgtatgattcagagtctcaaatacctgtgcatggctacccacccagctagcccttcaccttacacctatggtaaccatgttatcatattatgtctaaaaaactcccaaatgagaaaccaagaaacatcgtctggctacacgacagatttctttaaaatgagaactgctccataaactgctttatatatagacctgggcgcatggctaccctgacatatatttttcttctaaaagagcctgaatgggtgactaaaaataaaagggacttctttgcatagctcatttatcacatatgcatttataataatttaaagtattaaatgtggccgggtgcagtggcttacacctgtaatcctagcactgggaagccaaggtgggcggaatgcttgagcacaggagtttgagaccagcctgggcaacatggcaaaaccctgtctcataaaaaatacaaaaattaacacaaaaattagccgggtgtggtggcaggcacctgtaatcccagctaatcgggaggctgaggcaggagaatcgcttgaacctgggaggcggaggttgcagtgagtcaagatcatgccactgcactccagcctgggtgacagtgagaccctgtccccccccccaaaaaaaattagcttggtgtggtgatgcatgcctataatcccagctactggggaggctgaggttgagccygggaggtcaaggctgcaatgagctgagatcacaccactgcactccagcctgggcaatagaatgagacctatctcaaaaaaaaacacaaaatgatacaaataaagtcaaatgcacaaaaatatacaaaactctgactcttgctctttttttctcccttccttccttcaaaagaatctggaaaacccaaggcttgtctaccttctttctctcaggttttcctataaaaacaccagtggtcatagtcctttctttattcagcacctcactaaacctctgggcaaagtatctgcattcccctctgttttgctttgtgctgagccatagagcttgcagcctgccaggggtgtgcaggtgcgtctggtgggtctcaatgagttgggtgctcagctgtgcaaaagttagataattattgtcatgctcatccttcctaatggaacaatggtcgatgttttaaagcttccagccttctacctctcagatgggagaggatttggaactttgtggtctatctccctcagaggatcaatgcattttagagagaagatctatcagtccccagaaggcacagaaagcctaagtgcatgtgggaggtttgcactgcattttaatatccctgaaayagggtggtaagtagattttttcttctaaaaccctctcaatacccattttagagcatttcctgaaatccccatctgactgcttcccttggctccccttcatctggcaggctacagatcacatccccatagttgcatctttgggagtggcacgtgcagccatcagggctgcacagawctcagtggcactttcacagtgatctgcaccagccccccaggcaccatgcgacagcatggtagaaatggcaggaggagcactgggctatgagtcaagagtctggatggccatctagttctgcccctatgtggacagtgatcttgggcaagccactgactctctccggacctatttcttcatctataaagcaaatcttcaaaaaaagatcgaaaagcattcttaagttctaacttagtgctccaattcgcagctttccccaggcagaattacaaggtggagatgccaagactcagcgtgagtgtggtgggagagttgctccagccactctgagctctgtggccttttggggccccactattcgctctgctacagggtcgtcattctgaaaggtattctgcttaaatctccacattcatctttactgttacaatgcccttgtgaaagaagtaaggggaaaggtctgtctccctcctgctccaccagataatatctcttaggttatcatctaagtttctctttgtacaagtttctctatggaaaattatcttcttttagtgtcattttgacccagaatactcagcactgctttaaaaactcatccaaatgtcccaccttattcacaatgcacacacacaaccttctcctctgaccaacaactatcacccagtgataatttcttcttaactacttaagacaaatagtgctcctctctcctccccatctctcgcatcctgtctctgtctctgcctctggttctctgtctctcacacacacatacatacacacacacacacacacaaacacacacacacacaaacactctttggctcttcaatatcaccttctttggttcctatatcaaggtcactcaaaatcgtcctgctgtgctgaaagaaggcagtggtgagagaaggtacatacgtttttgcctcatggtatatgtacttgcacttgtcaaaagccaaaatgttatttaatctaatacattttacttttgtcaaaaatgtgaagacaaattcacttccaacacctccgtggggacttcgacgtttctcacaattcttttgcttgtttcttttttgattccttaccatattatcctcttctaaaccctttacattctttacaaactaacaaacatctcatgaacagaagatttgctcactacttactgagaaaacagaggtcatagaatgtgagcatgctcatcttccttcttctcctattcctctactgcccagagaaccaggtccaaatccctgagcataccacataaggtttctcagatcaacctctcagtctttcctactcatctgctacctagacagatcctgcacgccaaatctcacctatgcttgctgattctcagacagagccaacattttcccaacttcttgacttttatttatgatgtttttctcagcctggaatagttccttccttcctttcccaaaccacacttctgtcatcttctggaaatccttttccatcctcgaggccagttcaaaggccacctcattcacgaatcgcctccataagcagctcctgtctgcatcatcaccaccagcagttcccagtaacatctccctaccttttcactctagcagaatgatatttgtatctctattccagcacattttttgccttggatggtatttgtctacattcctgtacctttcactggattgaaagtatcgtggttttaaaaaatttctcttggccaggcatggtggctcacacctgtaatcccagtacttttggaggccaaggcrggaggatcaccttaggtcgggagttcaagaccagcctggccaacatggtgaaaccccatctctactaaaaatacaamaattagctgggcgtagtggcacctgcctgtagtcccatatactcaggaggctgaggcatgagaattgcctgaaaccgggaggtggaggttgcagtgagccgagattgtgccactgcattccagcctgggtgacagagtgagactctatcttaaaaaaaaattctcttatggagtaggttttcaattattgtcaactggagtttgctgaagtacatggaaagtgctgtacttcgcctcatcataaatttgaaacttctacatcccctgcatgaagatgtggattctcttatgtttactttttaaatttcacatcttttttagtgttttaattgaactttctcaagtcctttcagaaataagtgtagagtgtatattttaaatgccttttactggtttataactttgggcttttcattgtggcatcatcaattttgaggaaaatgtctcataactctttaaaaattgatctgtcttaaaatatattttaaatgttaagaaggaaaaatacaacgcttctttatgatatatggaataagttaggagttatgagtctcaaggatacctttgctatacattaatactcttctgcacaaataaagtaacatctttttctgtacaaagtaagtacacaatgtggaggaggaaactaattagatatgtacaatggattgctactagcaatttttctggtaatacaaaatagaatggaggctggacatggtggctcacgcctataatcccagcattttgggaggctgaggcaggcgaatcacctgaggtcaggagttcaagaccagcctggccaacatggcaaaaccccatctctactaaaaatacaaaaattagccggacgtggtggctcatgcctgtaatcccagctactcaggaggctgaggcaggcgaatcacttgaacctgggaggcagaggttgcagtgagctgagattgcaccattgcactccagccttggtgacaagtgtgaaactccatctcaaaaaaaaaaaaaaaaaaaaaaagagtatggatggcaaagacttgcaagtgcctcccagagtccatygtgcccttacttcttagtaacgaagactcattttgggtggctgggggagacacattgttacccagtaaaagactacatttccctggttcccttgcagctattgcaggcatattatcacactctggccaatgggatgtaactcttagtgtttgttgcaatggtctttttaatatgggggatggcacattttcccttcccttccaacctgctccctggaacaccatccatctaggatatgagaattagactaaaccctgggaatggtgaaggaatcagttagaaggagccgggtgcctgaggactttgtggatcttctttaccagtcctggaccgcttacctgcagttatctgttatgtgaaagaaaaataaacttctctgttatttaagccggtgtcacctgggscttttcttttatatgcagccaagccttctgatcctgatctagatgacagagtcttatgaaggtagacaaggaaaggttggagatgttttttaatctctgtgtttttctattctgatcagaagagaaaagaaaattcaaaagcagcttggatcaaaaamccatatctcattgacaaaggagacagagagtgaggggaataccagagagctaattatgagtgctcagccgacagcaatgcctgtgacactcctgatctgaaacccaagtgaccagacagattgaagcagactgaaggggcaagttttcatatcaggttgtgctgtagcactcttggaaaacttaagtatagctggtataagcagagccagaaagtctctgcctaaaagaaaagatgagaaacaagctgtaaattggtgtaagaagtgaatacagggaacacttggagtgactgatgatgactgagttttgtgagcatatctgtacataatctttttccaaatttatttcattttatatattttaatatattcaagggtgtttacaagttgctagtgttttaaaaaaaaaaacttctttataggaaatatccccccatccacctcatttactatataatcatgcactgttttttaattttaatttttatattttttgagacagggtctcataggcagaaacagagccaagtttagtctaggatttattattccccactactcaggttaagacccttctgagtactcttcctgattcctgggaatttgagatttttttactctggctagaaacaggcattctacccctccccgcattgacgcctggaaactcaaagcagtaagctggggtatttgcagggttcgcttggtttgtttattgtctctcagggatcacactgtccttgttgtctgatgtccagtgtcttgaaaattattgtttcttatattttgcccattaaaaaaaattgtttcaggccaggaaggaaatctggttcttacttctctatcttgcttagaattagacacctcatatcttccttccttaccacagcttcctctccttccaatttgctcattcaggtactcacaccttttgatcaccccactagacttccagttcatagagtcctttactttctcccaatccatcaatactctctcttcatcggtttccttcatatgtagcttagatgccatgactcatttttattttattttacttgaagttctgggatacacacgcagaatgtgtaggtttcttatataggtatacatgtgccatggtggtttgctgcacttgtcaacccatcatctaggttttaagccctctgtgcattaactatttgtcctaatgctctccctcccctggccccccacgtccccactggccccagtgtgtgttgttacccctcctgtgcccatgtgttctcattgttcaactcccacttatgagtgagaacatgyggtgtttggttttctgataaatgaaccaattttaactaaagttcatatattattcagattccctgtttttacttaatattctttctctcttccagaatcccattcaggattccacattacatttagtatgtcatcttagaatcctcttgggtgtgacagtatttcaagatttccttgcttttgaatatattgagttttggtgaggtattttgtagaatatttctcaattggatgtatctgatgtttttctcatgagtagactggggttatggatttggtgaggaagagcaccacatcatatcaagggtacgtgctatcaacgtgacctctcactgttgatgtttgatggaggtaacctgttgataataacctgactgaggtagtgtttgccagatttctccactgtgaagttactctttccctccctttcacactgtactctttgaaaataagttactatacacaggccatagttagagtggggaattatgcttcaccttttggagagtaaagtgcatggctcattattttagtaatgctcttgccagtgtccttaatgtgcttgcacctctccactcacttaacccagctgattacatgacatatgctcaacagtttctttatttgtttttggtttttttgacacaggctctcacttctcccatcacccgggctggagtgcagtggtgcgatcttggctcactgcagcctcaacttgccaagctcaggtgaccttcccatctcagcctcctgagaagcttgaaccacaggtgtgctccaccatgccaggctaatttttttgtattttttagtagagatggggttttgccatgttgcccaggttggtctcaaactcctgggctcaagcaatctgctcaactcggcttaccaaagtgctaggactatagacatgagccactgcacctggccttgctcaatatatttttaaatgaatggataaataaatgagagagaaaatggagcatatatgttaatttcygaaaacatctgtgcctatatttcaagctaaataatttttaaattattttttattttaacttttagtagagatgaggtcttgctgtgttgcccaggctgctcttgaactcctagactcaagtgatcctaccaccttggcctctcaaactgttgggattacaggcatgagctaccatgcccagccataaacaattttttaaaaattactattttacagtatctatgtctcttttatcagtatagataataattatgtatataattatatatataattaggttattatttatatataaatatgtttttttccaattcaacattacttaggatgtgtatttgttttttttttttcccataaaagtcatggaattattggtaagaactaataggaaagtatactgattaaaaaagaaggaaatgtagaaatcagtttatattactttccactgttacagattaggaaacagtttttttcttttgttttgttttggagacagagtcttcctctgtcgcccaagctggagtgcagtggtgggatctcagcttactgcaacctccgcctctcaagcaattttcctgcctcagcctcctgagtagctgggactacagatgtgtgcgaccctgcctagctaattttttgtatttttagtagagacagggtttcaccacattggccaggctggttctgaactcctgacctcaagtgatccgcccacctcagcctcccagcatgctgggattacaggcatgagccaccatgcccagcctaggaaaaaggtgtggataagagatgattgggctaacacatttttcaaagctcatatacctgatcaatagcagaattaggatcaaaactaaatttcctgattccaacccagtgttctatgccattacagtgctacattttcttgcccaggtttgcagataatctgaatgtggtttacattggaatttgccctggcagtgataccacaagctacgtaataatggagtaactatgtgatttctagagcaatgtcatgcaatcttataggattacttataagaggtgacatgacatatgtggcatgttcttacacttatgtaaaacatgctttgcaacattggtcagtgactctgctattggggattcagtaagttcacttccctaccatgcatcatctactgtgtagagaatcttatgccagatgccaatagagaactccactggttagcatatgaataatataataaattaagctctaagatacagaaggctcatgtcccactagactcaccaggccattgtaccctaagaattggttctctaagtcttgaaaaagttccaagaagaacacgaagctttcttacctttatactttaaacattgacgttagcactgaccccctacatatgagacctatcattcatggacaggggtgagtagaaattagggtagtaggactgatatggtttgagtctgtgtccctgcccaaatctcatgttgaattataatccccaatgttggaggcaggtcctggtgggaagtgactggatcagggaggtgtttctcatgaatggcttagcaccatcccttttgtgctgttcttgtgataatgagtaagttttgtgagatttggttgtttaaaagtgtgtggcacctcccccctcactctctctcttgctcctgttcctgccatgtaagtttcctgaggcctccctagaagcccagcagatgtgagcatcatgtttgctgtacagcctgtggaaccacgagccaattaaacttcttttctttacaaattacccagtctctggtatttctttatagcaatgtgagaatggactaataccaagattaacagaaagcaaaccatgagctaaacataaataacactacttcaaggtgtaaattggaaattcacatatacaaatctgttgagtagagccaaaatttgaaaatctatttgagttaaagccaaaatataaatattagagtccaaatgtaaattatttgcaagtatgatttgttgttaactgctaaggtagtcattctgacactcaccaaatatttctgccttctggatatataactcaattgcttttcctgggctctttgtgattgagtaggtctatgtgactagttctggtcattggtgttgagtcatttccagtttggagcatttaattgtgggagtaagaacattcagaattatctttctgtctgggatggtaactggcaactttagaagttggtcaaccagagaatccctgagggcctataatgaacagagccccctgctatggataaaactacattacaaacatgtagtgttaacaagaagtaagtccttgttgtttaaatccaccaacatttttagagttgttaccatagcaaaacttggcttatcccaacagatatattcacttttgttctcgattgaattgtcttagggatgagtattggtaggagtccgggaactttgaaagagtggcaggaaaaataaagttaagaaagggagagagttataatggggccatactaagacaaatacaaactgaatgcaattatagccgacttactggattttattattgttgttactactactatcatgattattactagcagttcttaaaacaacccggcttgtaatcctcgcactttgggaggctgaggattacttgaagtcaggagtttgagactagcttgggaaacagtgagaccccatctctacaaaaaaatacaaaaattagttaagtgtggtggtacacatctgtagtcccagctactcaagaggctgaagcaggaggatcacttcagcccaggaggtcaaggctgcagtgagctatgatcacaccactgcactccagcctgggcaacaaataaaaaaacaaaaacaacctgaagatgactgccattacatcaaatgactcatcttcggtgttggacagagataaaaagggaggcgagatcattctaacttttggacctctcaggataatgcaatagctattcctatcctacatggtatgaattttgttccctgagtatttatattttctctctcccaaatggactatatgattcttctaattaaggatattttctatcccttttatgtatttttggaacagtcctaaagctcattaaaatcaagctgaagatcagcttcacttgctaccagggaattggcatcagatgccactgttgaccatttcttgggctgactcacaatagatggattgattctcacattttcatttcctggagcttcaggaatgttgaatgagatgggggtggggcagggcagagagaagcgcatttgcaatcaacactgtctttgagacttcagtctttctcattggtaaccaactcagtgaagcaaaccaaatgagggacatttttcaaatctgacttctcatagcagttgtttctttcttttttatttgacatgtgccctgttggatttattctcttgttcattgttcttggcccttggtgcttttttttttttccatcttcccattttccattcttaattagaaatgatctacagggccccagaagtcaagtagcacatttaaaagctcatgtgtagaataaaactgtgttgagagaagagttggcatttatcagaattatttgaattgtcagtgaccaaaccaccctgtagtttcccacatctggctgtgcacctrggttccactgtccaccttgattatggccttagagcttctttgctacctgaaaacctagcaaagaagctccaacgctataatttgctaggtttaacaggccctacctgttaaacgaccctggccctcgattctggatttgagttttgcctaccagatcatgcatcagacctgtcttccactcttgcattatcaagaactggaactcaagcagcatgctccttgtttttgccaagtataacatcattctggagaacttcctactcttcagcactgcaacaggggaggtcctcatctaccagtctgcttgcactaaagatgggaagtttttctctctctgtttctgtacactaaggagactgcacttgctgtacatgctatgtaattgtacttgcattatctacaatgtgtcagatactagcataggtactggggatatagcagtgaagaaagcagacaagaatccctaccctcatggaacttatcctgtggcaattaccagtttgggtactagtatgatttgacacgaattttataaaactatactgattctttatccagctaatgatctacacgtacatrtaagttcaaaagtttttgcaatctacagatgagtctgagtcatgttcaaaattaaatttttatcaggataggacaaaaagatggttgacctatatgggtatgtttagagccccccctgctgagcacaagtatagatccaagaaaatagaaaataaccaagtattacatttgatttctcatagccacatagagaatgtgattttgtttgctgttacattacttggctcctataacaagacctgagttggaatgaacctgccccattcagccattatctggaaaggctaaccaatgccatcttagactaatttttcaacatagcaatggcaaacaacctcctgaacttagtcttgcaatgtatctctctagagctaaccttagcattagatggtaactagtacacaatgaatgggagggtgggtgtgtgtgctggtactctaagctcccctcccatttggcttcaactttaaaagcttgtctcttgagggcacactgaggcagttgggaggagagagccaggttctccttaactctcgagtctgctgcataaatttgatgagtcctaagtggggcttggggagaggacatagggaagctacatttacccacaactgtgactgagccatattcctgctgtcatggcctcagatctaggttgaacatacctactacttgggcacagggaaccaagcaataggtatactctatatgaattattatccaaagacygtaacaggaattcctgcacctcttcactgggtcccctggagttctgtcctatttgtgataaagcaaaccgggactttctctgtccttgtactagttaccatggtgggtctccatgcaggcattgttggaaaccatgcttcctgctgctgctgaaactttatcaaactagactggagggactgtacagtctgctgggaatcaggaggaagtagccaaagggaattaatatttttaaacctcttagggacaaaacaaatacctgtcacactattcagaatctgcaatgcccctttaagcttcccttgatttataaacagtgcatgaatagtatgaattcttggctcccagattcatatagaacttggaccaaaccttgatttgttttcacgaatctcgccatgtgaacttgaaggatgtttaaccacaccataggtgaggtcatcatcactttgaatggaatctaggttcttcaaacctaggctgatgtcatatcagaaaggcttctcttgactgctggtaaaggatgggggaatagtttgaggttcccacttgacttctggggtacatttctgggcaccctcttcgcttcagtggaggcatgaagactggggcagacgctatcttatctgagagttcctacttgctcctagataaaattgcttctccccaatgcttcttcttcttcttcttyttttttttttaaacagtcttgctctgtcgcccaggctggagtggcacaatctcggctcactgcaacctctgcctcctggtttcaagcgattctcctgcctcagcctcctgagtagctgggactacaggtgtgtgccaccacatctggctaattttttgtatttttagtagagacggggtttcaccgtgttagccaggatggtctcgatctcctggcctcatgatcctcctgccttggcctccctaagtgctgggattacaggtgtgagccaccatgcccagccaatcttcatgctttttgtgggaagtaataaagagagatttataaaatcttctgtatgtttcttgcaaaacccttacctctccatttcccccgacactcacagactcattactactatctgccttgagatcatctggatgaatttcctagtgctctgtagccctgattgtgtcagtcattggatcttagtttctccctgcactccttcctcatctcctgcactccctacattcctttgcagctttatttttcaccataacatgtatcatcatctagcattttatataccttacttatttgtctgtatttccaccagaatataaactccatgagggcaggaattcttgtctgtggttgttgttgttttctttttcctgtctagaatagtgcctgacacatagtaggtatctaataaatagctgttggatgaataaatgaatgatgtgatggatacccagtacttcttgagagtcactaattattagcaatacacattctcttgttttggagacgtaactccttcattggcctctgggggaggtattagccatttctatagtctctgatagtggagggactctccagaatcccaatcattatactattttggacataaccctttatagcccttctcatgtcaaacatttaccaaagatgtgactagtggtgctactctatctaaccctccacatccttactcctcctacccctgctcccatatgcactattattatcattattattattattttttgagacacagtctcgctccattgcccaggctggagtgcagtggtgtgatcttggctcaccacaacctctgcctcctgggcttaagtgatcctcccacctcagcctcccaagtagctaggactacaggtgcacgccaccatgctgggtaatttttgtatcttttttggtagagatagggtctcgctatattggccatgctggtctcgaactcctgggctcaagtgatctgcccgcctcagcctcccaaagtgctaggattataggcatgtgccacccacctggctccatatgtatttttataagacttttaatcgagaaaaaacaagttatccagattttttactattatagccaaatttgaggtctgaggcatgttgggaaactggcatgtggtgatgatctaagcaatcccctttgaatgaccatcacactcactaggctcattattttctcactttaatttctgaatcattcactcctcagaagccagaaatgctgggatggcttcatggcctctcctggaaggctgtgaatgtgtgtagccctacaagcaacatattgctgtgccattaaactgaaatgtcatcacttttattctacaacaccaaccaatcaatcaaggactccaaggaccctgtccccctcccacccctccacctctttaatgacctattccatctccaagcctgcctatgtggctttgcagggtagacagagagtactgtgttggcctggctttgagggttatacctgtggctctcctacaagtttgttggttgaatagtcccagaaataccaaaacataaagcagtaggtcagcatccttaacagcaaacgagaacacaggaaagtctgagaagtacaaagcctcctattttcattgctaacttccagctggccttggagaagctcaattgtgtcaatcaattttatcaaccacttgcttttctcaaggccaagatcccaggcaagtcctcgtgaatctgtgagacaccagagcaacactcagagtgctatccttacaggtcactctcggagtgacagtgccataccaataaaatctaaactctctttctacatcaattattttttatccccacccccaacctggtacttccctttactcagatgcatgccataacaaccacccagcagaactcaacacaggcaaatctaaaacctccacattatgttaggtataaagctgattagaaggtcaccattaataggtaacagaatcactggacatccttacagatagaataactttccttattccaccatcccagaaactcaaaagcagacacatagaaaccccctctcccatcactgctatttctgaactctctaaattctaactacggctaccattatccatgtccacatccacccatggtaggcctggctgtactatcatgccactggcacctttgatggtcattagtaagcctggatataagcactgtgctgagaaaactctcttcagggccaggacaggttttcagaaccagtaaaaacaggtttcaaaggacagatctgagaaccagctgcatatctaccctgaacccctggcttgtgattctattcacgaagcccaatctaaaaaagagtggtcagaggctgagcccctctaagctgctgagagtgtgaaaggtgctacaccttcaggtagctccacacaaatgggaggaagatgtgtggtcacctaacaatcttatctttaactctgactgcacttttggttttctaaacttgtcttcctttctggattataagtttgaaatatatttaagagactcatcctcataaaaactggcctttgacacatttcctgtgcatatgtatttgtgtacctatatgcacatacatacacattgttggactaggatctgaatctttcttatgggttctctaatactgattcagctcattgaatcttgcattccactctctcccacaactcaacctgttttctcttatgttcagtccttgtgttgcagtgaacattaatttttttaaaggatagtcattttcacagcacactttggagtctaaagctcagcaaaaccacattcacactggatctttcatcaatatgaaacttctagtcatccaagctttatgacccacatatatcagtttccatggtccacacatggaatgtctacagcagatattagatcctatactgctccctgtttaccatgcttttgggctgccgatacatacctatctctgtgtgtactcagaatcgcagactagttctccttcctcatcccacttttctcttccccaggtgtattttatttcctaatggtgcctattttatgttggagctgaaaaaactcatcaactagctttctttgagcatagagtacagagaatgaaaatggggagcagcttgcgtgggactgtaacccacatagagaagacatccggatgtttatgactccatgtgatttagggagtggttctataacatgccatgttctttgaggataggattatttcaaactcatttttgtagcctgttcagtggctcttagagtgtctgatacatagtaaatgtttactgaataaatgaatggtcccaatggcagtagagaaggaagaagatgtaagaatatcaatgtattgggtgacagatgagagcagatttagaaattaagcttctaaagccttgggctgctggatagtcaaagacagtatagaagcagaaggaagatagctccttgtgacccacagggtccctaccatgagagtcaatgggagacctcactgtctcaccaagaggagacagtgcagacatggagaaaatgactagaaggacaagaactggaaaaaaggattttatgcttcatttccattttttgtggaggggtaggtagatttaaatactcaagaatgtgattaaccagtcatcagatataacaaaatctactctcattttgctgggtactttcgtgaaacagaaaactttcaattatctctactaatggaatgaaagcaatggtacatataatcaaaatgtcttttctatttgcctttggaaaggattatgtgtgttttcccccagcaggtttgctttcataatgctaagttctagcttaggctaataacaaaatgagttagcattttctccgtaaaatacccagtggagaagaataaaaatgtgtttatggcagaagaaactgatgcagggcctaggacgtgacatagttaatcacttatatgaataatctacttgcagcaagtgggattctgaacagggcaaaagaccaagagcagctgtatgtcctggattttaatgatcccagaatagatgtctcaggcgaaagctatagctagtgttatgaaaaatgttaatggagaaagaaaaatggaataggagtaagagatctgggagtctcagacttgatagctcaagggaggccatataacctctttttgtctcaattttcttatttataaaatgtaataattcatttgcactgcccacctagtaggttaactggtcaaaagaaagtagtggtcaaaagggcttataaaagtattacgttatgaaaatgtaaagcattgatagacaaataatgaaatactgttggcacctcctttcaggacacatcccttgtttaattcctccatgcttggggtctttggctgtggcttctgaaacttacccctgttcaaaaaaatagtccaatttttaaacgattctgctgtttaaggataactactttgataacatccatgcatcctaatgaatggatgcctcatttctcaggcaatagcttcattttaacaggaacctcctagctataacagcttaatttagtggttctcagactgtggtccctggaccaccagcattacctgggaatttgttagaaatgcaaagttttgtatccatccaaatcttattgaaccacaaactccgggggtgcagccctgcagtctgtgctttaacaatccttccaggcaattctgatgtacactcaagtttgagaactacttctttagtgccccacaaaaagggaatgctaggaattgggcattggtacatgcyatgagaagctttttttttcttttcctttttctgtaaggagtaggaagcagcttgtgggacttttcaaattacacaatatgctggctattcagagctaggcccacagcgacatgttaaatcatgtcaaatgcactgtcacacttaaagagatatatttatcaccaattcatttgtatatttgtatatgtatagtatatatatgtatgtgtatatgtayatatgtatatatataatgatgactcagtacatcattttctcaggaaggtcttacatatgtatctgtattatataaattatatgtatatatgcctgtgcatatgtacatatgtatgtatatacatacatttatttgtcactaaataaagaaaatgatgtactgagtacatcattttctcaggaaggtctttttcctgactaccctatttaaaaatgcatctctacctttggcactccctaccttcctttcttatttttctttgattcttctaatatgctgtgttatttattttgtttattgtctgtttctcccagctagaatgtatgctccatgagggcagcctgttttgttcactgctgtgtccctagctccaagaactgtgcctggcacctagtaggcactcagtatatatttgttgaattaatgagtgaataagcaactgctgaatctgggagatgagaaagtattggggtgagaccaaaacactgaaacacctgtaagcacccttattagtcagtgtcgctacagcatgggagccttgcctctctctgtttctgctctgggctccgagataactctgaaaacaagctttggtaagtgccaccctgagggatttagttcactatactctttaattatcatttcaaaatactctctgkttttttctaaaaatggcaatagtgtcctgatggatcaacatgattatatggctggctggggcttgggggcagtctattatggatatgcagcagaccagagtgtgacatattagggtagggaaaacagtttaagaatgaaaatcaggagttctgagttctagtctttattctggccctaacttgctacatggtcttgggcaaattgcttgggcaactagcatttctgggtctcagtttcatcagttgatctcaatgatctccaaggtccttttcagttgtatttatatatccactcatgtgttacttgactaatatctgtctcctctactggtaagctctgtgagaacagggactgtttactcacccacttcataatgcccagcrcttggaggcactcgaaaaatatttgctaagtaaacaaatccctatgaaaaccaaatggtgatttccgcctcatcagcctgtgctctacacaacaaggcaagggtacatggatgtgtgctgcaaagaccctggccgtcagggatctccaatcacacaaggaagagcaggacactggtctgcaccccgagggcatacagaactgcatagttccttgatgtgaacacctgtgggaggtgtgcaaggaagaccccaggctgggcacctgggccatcagcccagtgacctggaaaagcatggatttggggatgagagatctgaatttgaatcacagatctgctatgttctggctgtgagtttaagttatctacttctcttcatttggaaaacaaagtactacctgcctctcaggatggctgtgaaaattagaggatatcaagtgtcttcctggtacttggtgtcagaaaagcgcccagtgaatggaaacctccttgactggttctgcctccccttccttttatgaagcctttaagccatgaggttcttaacaatgcctcatttcccaaagagttggcccaagtttgttactagctcatgggagtgccttagctcagtggtccccaacctttctggcaccagggactggtttcatggaaggcaatttttctatgaatgggaggggcgagcaggtgggtaggggatggttttgggatgaaactgttccatctcacattatcaggcattagttagtctgcagcccaggggttggggacccctgccctagctagtcttggctggaggggcataaagattaggattaaaagtgtttctcaaaatatctaccttcagagatatatatatttcccttttgcttccagtttgcctaatgagattttgagatttgtaaattgctatagcttgatatcaaaaggtttaattttgtaaataaaattttaccattgattatcacttgaacgtgctgaggactaccactgaaaaaagaaagtttgaagtttgcctttctctctttttggctgcttttctctcccttctaccctgctccctcattccctcctgggggagtcaattatactcctgttcctgccctgccccctcctctgccttccccccaccacactcctgttctacctatgattatctttattctgaaaaacaaattctgttgctaggcaaccagaagacaaaattgctgtggttgatatgattctcattagtgctgcaattgcagtggtgccgccatcatgccggacacacgctcattgcatctgtccccagcttgacagatctttctggaaagtgggatgggaagggttcttggcagagaattaagggcctcagcactcaacagaaagtatttataaatcactgtatatcaacagcctgctttagaatcattttattagaacacattcaagaaagtgacatacggaaaaaagacagcagcaattctcagtcatgcaaatgcccgtgttaaagttctccattggatttaaattcaagtacaaagacagtcctttcctgagccaggtgcaattccagagaatgacactttgcattgagagcacgattccttcgaaaagttcagaacactgaacaagtcacatcctcacaataagattgtgagatacatagaagtgtaaacttttttaaggatccctttaccctgccctcccccataacccagccagggaaataagcccaacttcaggacctctcagaaatcaggtttaatctattgaaaataaagcagtgggcctttaaaaaaagttagaaaatgagtgtatatatgaaatggaatcatcatctctgcctcttgccttggtgtggggtttccatgaaactctgtgtttggggttggggctctctcttgagtgtgttggaaactggaggacttttaaaacttttttattatgaaaaattgcaaacaaatacagaagtggggagaatgktataatgaatgtccacgtaccatcatctagtttcaacaattatcaacatgtggccagtttttcatttatatcttctcactcttcccacccaccctcaacaggataacctgaagcaaataggggctggtagggtggtctttgaaccagagacctcgggagggagtgaggttatggaggagctagaaaaacctgaaaaaatctgagtaggctgaagcaaatagaaaaattgttgaggaagtggttgttgccagtgtttgggaaaggctaaagttaaccctcatcttctctaccacacatcatcccttcttcttcttccctctttctcatgatgtggggatacaagctagattagaatgatgggtttttccagattaggggccactgataatagaaatgttcagcctggagaaaaacttcagagataagtgtgtccctctaattaacctcttcactcatgttgcagacctctagggcagcaggagcctgggcgtacctgctgttctgagtgggatctgggggaagtacattgggccattgggcctctcacaggtccctactgccccaccattttagactttggagagaagctcagcaacctcgaattgcacccagtagagaagaagggagccccgagggtgagcccatggcccaggcggggagattttgcttggaacatgttgccctctgagcaaaggctgcaccccacaccagccctgccagagaagtctcaagagaggtgggtgattggagtcctggtgggaggtcccaacggtgccacggctaacccggtgagctgcagggacaagtcccaggatgcgcgctaaacgtaagtggagaaaggatctccaggtcccaggtgccaccgaggaacaaggttgccatcctgttaagaaaagggccgggctctgtgatttgcatataactttgcaaaaatctgcatgagatcccgtagcccttatagaaaacagagttaaatcatcagtgcaacctactgtatttctagtaacccagtgcagagtgcaacctgaaaaatacacaatcattttgtagaagaggatatagaggaaacagtgtgtgtaagactttccttggtctgacggttcagaagaagcccaccaggtccacaatccagaggaggatcactgatgaaccacttttactaacttggttggaactcaaatccatacgctttcatcccattagacgcctgtaraccagtcctgcagtggcttcccaacgttccagacccataagcaggagtagtcaggaataatagaaatggggatgcattaaatgtgagrtcctagtgacagtgatcattagtgtttatttcatatcctttatttgttttcttgtttaagctcttttagggtccctgtgccctaccagcaaatcttgctatataacatttaattgggagaaagaaactgacaaaagtttacccatttatatagtacatcgttgacagtaatggacttaaaattcatgatttaactgtttccagggaccatgacaggtgacaatctgtaatttttccaaggcatgcagctggtttgggtagactgcaaggctggctgagggagtgaattcctgagtgagagagtgaacgagtggggagccaagctggagacccagcttccatatccagcatggcttccaccatctctactgggccatctgaagcaatgaaatcactgtttccttaagaaaaatgacctctcaaggaaggtcaacttgtaatgctcttggaagagtgatatattctaaagagcaatggctcttggccaaaagaaaagttcaggatcaattccagagtataatctcacagtctcacattgactgtggctcagctccatgatgtgaaaggttctatcacacttgccgcatggaaatgagaaaaacagtctgaaactctcttagtaagaactccagctgggcaaaaactgttcatttagtgagagaaaatacttcagcatcaagctgaagtggcagttaccctgagcttccaggaatataaggtatacttaggattcagagaggagatgagattctgaagaaagccaggagctatacacatgcatttgtgaagtaactcacagcaaaaggactggtgaactcactgagcccaactttacagggcaaaagtggcttaagaattttaaatcacggccgggcatggtggctcacgcctgtaatcctagaactttgggaggctgaggagggcggatcacgagatcaggcgttcgagactaacctggccaacacagtgaaaccccgtctctactaaaaatacaaaagttagctgggtgtggtggcaggcgcctgtaatcccagctgctagggaggctgaggcaggagaatcacttgaacctgggaggcggaggttgcagtgagccgagattgcaccactgcactccagcctgggtgacagagtgagactccgtctcatgtactctagaactaaaatataattaaaaagaaaaaaaaaacaagaaagaaagaaacaaaaaaaagaattttaaatcacattttttctgtgtgtaatgtcattagcatggaaggtggcatcagctgtcctgattagctagacacccccacacacaccataattcactgtcattaccaggtttttttttttttttttttatagatgtgctacaaggcctacagaatttattttagtggcaggatttaatagtcttataaatgctgagtttggcattctgctctttatacggttgttaaaattctgaagaggatagcagtttaaaaatatttttattgttcttattaatagctaacatttattgagtgcttaccacatgtctgacaaggtgctgagtgtttcacatgcatcatttcacatgatctgcaccacaacctcatggagtgggtaataccattgccctcattttgcagactgaggcctggagaagtcctgcccaggatcatacagctggcaagtggagggggtgagatctgaaccaaggtttgtgtgacttcaaagcggttcttaatcactgtacatgttgcctcttctaaaggagaatccatcttctaaataatatttgtacatttgtatgtttgtggattctaaaaatcttggaaagcattcctcacataagaatctatcctgtccctgaggacctaacctgaagtggtttgggtcacttcattatatatatccattgggggttaaagaaaatttcttatccccttttaaaccttaagctatgatgatctctgtatatccacaaatctttctcatgatggtttgatgtgtgagaaataggaaataggtgataaactcatatgggtgatactgaacacttgctcccttaagccctgagaaaatacatacacagttatccaggaagccattattttatatagcccacttggtaccttaaaagagtggttaaactaaacatcaatgcatagctcttaactttaaaaatgatagtcattcatgacattattgagatgatttttcaaaaatctggcctagggcaaggactagtggaaaaagtttaagtggaagtgtgaaaaagagaccattaaatttttttttgaaatgccagtaatttctcttctttgagaaaacagctctcagcttagagttcatatacatttcatatccaataactctatactttggctttctgattccataggccagtgtagagcctgagatcaactttttgaaatatttgcctggtaattctaagggtcacttgccttggaatgcttagcacagaggtcttttctttatgccaatcactccaacatcagaaaagctgagttttgcaggatatcaagcacattttcacattttccagcacacattgtccagaagcacttgtctttggcattttccatcaggggcaagaatcagtgagacccactttataggacagtggcttttattaaccaaaccttctcagcattcttttttatgaggggagggtatgctaaaatttcccctatctccccctattcatgtacagactccttcatataaatgctgtttatttaatatactgtaggccccattctaatgttagacttttggaataagagctgagctatagtgagacgttttgcattcattggacatccagtgatagaaaaatagccacaaaaggagaacatgtttattatattataccttttctcgttccactaagaatttgaggcagttattttgcaatagattttcaaatgcatcttcagtcgactgcatgtttccaatgttttttgtctgatggattagaaaaccatggaggcagggatgtgcttgaattgctattcgtatggctaagacagaataaacagcctcctctaaattcctgactcatgccatgctctgcttggcacagaagacagtgagtgattaacagacaatacatggaacacagaattttcttggtttttaaattcaagtgtgttttattcagcttatgagaagagggaactgayagaatttatattatttgggccaaaatgttgctttgtgtgtttttgcctgaatcatccaattgttttctttagtggacttggccagtggaaggcagtgtgcataatrgatatcagaaacacctgggttcaaatctcatctctgccactttctggttgtgtgaccctgggtaaattattcaacctcttggagtgacgttttcctcatctgcaaaatgaggataatgatacttaccttgaagaattgttgtgggaatgacaggagagagtacatgtaaaatgccaggctcatattaggagttcagtaagaaaggcagtggttactgttagttgcttaacctctggatggcttgcttgcaggcagcctttgtgattttctctgcctgcccaattatagcagtgacttcttagggaaaggcctgtatctcttccattagatcgggtggggaattctgtccttggcagggacttttagggaaaagcctgtatctcttccattagatggggtgggggattctgtccttggcagggactttatgtattctgtgttccttcattacctacagagraactctgtgwatactatattaactggttttaaaaaggctttctccacctcaggtttcaaaccagagcccagactggaaatatcacttgatgcagccatcagaattaaaaactgagatatacagtaacaaaaatattaaatactgcatagagagaagacataaattaataccatgaaacacactttcaggtcagctcttttcaaggactgatttttgcgaccttcttatttgttttatcatgcatcctactctgcctgaagggtctccttttgaatctagatgtttgtgtttgctgctcatgttgaccccagggctcttcttcccaaattctataaggaggttactgataaagacaggctggctgagcggtcagcgatgagcaggaaggcctcgtaggtggtgcggaggtatgcccacctgttatgctgcctcctgagtgacaggctggccacacccaccccagtgcaaagacatcagccacagccagcaacattcaatctatgtttttcctcttgccatttttccctctgctcagggaaccctctgagagaactctgaacctaggcagtgtgggagagacatcctggaaaatacttgtttcatgtcattttttgtttgtttccaatttagaaaggttagaaatagtttctttaccagaaaaccttccctctgtccttagactgtgggagaggagggaagagagggtaatgggttcgggggagctgtcttgacccacctcctgtttaaaagcttgctgctcacacagtggcaaacgctttccctagtgggcgctctctgtgtcctcctgacctgggtccccgtgtccccatgctgagtcactctgggaacccctccctctggaatcacagaaagtaaacaccaaactggaaacacgtctgcttctctctcccactgcatatctcttcatgaaaatgtctcatgaatttgaagctatatttcaagcttttcctcaccttttccacaggtctctagactgcggggttttggggtaaaccttcaagaacttcttatccccttcctgctcccagccccctaccccctgaattttctttctctttcttttcacagtccaaggctcctgaccttcacaaccaaacaaagttgccagttcttcagctcacaacctctgccagtcctgcaagtcagcctgaattcactgtctgactgccttcttgaatcccaaggtcctgagagcggatcaccctgttctctgctaggcacctgctcgtccctcacccttrgttcatgcagagggtggaccccagcaactatctgataatcttgttcctttctggtctttaaaaaataatatctattaggtttttgttaaatttattatgtcatgttgtaagacataatacaaaaactaaaaaagacaccacccagaaatacccattatttacattctggtgtattttcttcatatatacatatatgcatacatacatgcacatacgtatgtatgtacatatgcataaacacacatacaaacacacatgtgcacatacatattcccccttcatgtttttttttaaatttttaattgtttttattttttatttttccaagacagagacttgctctgtttcccaggctggagtgcagtggtgtgatctcagctcactgcaacctctgcctctgtggttccagcaattctactgcctcagcctcctgagtagctgggattacaggcgtgtgccaccatgcctggctaattttttgtattttcagtagtggcagggtttcaccacgttggccaggctggtctcaaactcctgacctcatgatccacccgcctcagcttcccaaagtgttgggattataggcgtaagccaccgcacctggccacccccttcatgtttaaaagcaaaattagtctttcatattgagagagaataggaagtgggggcaaaaataactccaggctacagctcaggtaagccctgtattgcgccagcgacagtcatgagcttgtggaggacccgacttactagtttatgtcactggcctaatggccagggaaaatatccaagttcttgcccctcaaaccacatagatgaatacttcttacagagtatatgggaaacacactgaggaacacacacacaaattcataaatatacacaaaccagagatatatacataaaacatatcattcaaattactgtttgtgctctttctgtgaaaagctacttctacctcagtgtgctgcaggtaacacacagtagcaatcataagcctgtgttcatggatcttgtgattcagtggttgagattaaaaactaacccatgagaaacaatagcaaaccagaaggagatacagtctcacaaaatgctgagggatgggattccagtaatcactctaatgatgaagatgtgttccaggaatactttcctgaggtcagaaatgtacctctcaggacagataaataattttggagacacagtgatgcagtatagtttggtagatgaaggcaattttgagatcattatctgttactgaagctgatcacacacgtactggaaaacacacattggaggagaggtttgcagactgcctgggacccaggggaggagcaggggcagagggaaggggcctgctcactggaggctctaggtcctagaaagtgctatgtggtttgggagccatgctcttcttctagaagctcccagggacagaccttgcctattatacagaatatgcagcaggctgaggaatatgctatcatgagagtcctccagtggaagtcacttgagcaagaggatagagagtgaaggagggccacgatgtctacagacaaagctgtggatggaatctgagaaaagagtagatcaaggatgtggtatatgatgagtttagtttcagttctgtcgagtagaatgcaagaggtcatccaaatgcagttatgtcatagacagttggaaatacggtgctggatcccagggtgaaaggcaagcgctaggaacagagagtgttcaactcattgttaagagtacagctttatgctaagcaacatggcaaatacaaagtaaattcagggcaacgtatgccctgaatgttaaagaataatgtttgactaggggaaggggagaggagaggggcaatattagtgtaggtggctctgtggggatgaggggaagggcatggattaatgtggagagcagtgggcatttycagatatgaaaaccagcctgttttgtttccctgccgtgtttccaccctagagcagcacttagcacctagtaggtactcagaaaaaaaatgtggagaatgaatgggtaagtgaatatgaaattggcattagcagtacagtcacttcagagacatactcttgtgtttcgaattttgatcatagatatcagaagtgaagcaacaaaaactattgttgaagaatggggagttttaaagaaagaagattcaggagtagaagttcaagagcagttctcattgggagcatgaggtaacaaataagcattagatggcagaggaaaaggaggtgtttgacaatatgagaaagagaagaggtgctgagttgatacactgacggcagctacaaagaagragatccagaacttgtggatggactaacaatagactgttttggaggctagagaatgaaagaataaaaggacaatgacgcatcaaggtgaggataaacgtaattctataatcatcatgctgaaacaaaaaaaaaaccctcagcattttttgtgtgctactcaataaagtctaaattcctttgaatggtgttcagcatctgccatgatgtgactcagccaatcattccagttttatttcccaaaccttaattcacaaaccctgaacttgaaccaggcatactgactctccatgccccaaacttaccctatattctcctttctcccttacccctcactcttgctgtttgatccatttggaatgatcttcctccttgctcccaacatgaatcttgcctggataaattctacccattcagtaaaatctaacgtggaacattctctgatcttcccaaactggaagctttrgttttcttaattacatttggtcccagtttctagatctctctcttgcccacaatgccaaacacatcacattgtgcttgtttgttctggtgtagtgcgaaatacaagcgatgacctcagaacacacccagccatatagcactcctgatagcttcactaaatagaaccacactattggagttagttcctccatcagcttttgctttcatagcttttctgtatcctcccttgctgtcaacagtttagcctttgtggcaatacatgtgcctatagagaagtaactttctcatcttctaatatcctttgggttgagtaactagatggcaaagatcataaggattatatataaaattaagatttgaaaggctttcctgtgagcaacagatgtttagttttgctagtttcttcctagattttggctgtttgtcagacatctaagatccaaaaccaacaaatttagtaccttttttctagcatatttcattgctgcatctctattacctgcatataatgtatagagtgaaatgtaacaaacattaatttaaaaaagtcaacttcttattccttcattaaaatagaggcatacttaaggattaacataaacttgcattatatattaagtttccatgttggtacactattctgtggagaaacaaatggtgaactgtaccctaaaatactaaatgtggttgggagcagtggctcatgcctgtaatcccagcactttgggaggccgaagtgggtggatcacttgaggtcagaatttgagaccagcctggccaacatggtgaaactccgtctctactaaaaatacaaaaattagttgggcgtggtggtgtgcacctgtaatcccagcagctctgggggctgaggcagcagaattgcttgaacccgggaggtggaggttgcagtgagctgagattgtaccactgcacttccaacttgggtgacagagcaagactcggtctcaaaaaaaaatacaaaatgtaagagatgcctcatatgtcacatcacatgagcctctaacttaccaatgtatagccttcagaatatcaaagtgtatgtgtttatcaagacacaataaggagaacgaaaagatttgccacagggtgaaacatattacatacatgaccaacaaaggactaatatccagaatatatgaacttctaaaaataaataagaaaagccaaacaacccactgtacacacagrtaaaagcttgaaccagggacattataaaagagaaaatcaaaggcccaatacaaacaggaaaagatgttcaacttgattagtaagcagggaaacacgaattaaagccataagtagatatcaatacacatccaccagatctgtaaaaattttgaagtctaacaatacaaagtagtggtgaggatatagagcaatggaaaacttcatatatattggcaggagtgtaaatttggtatcggcactttgaaaaatagttgacatcttcaagtaaaggtgaaaatatacayacacatcctatcacctaacaattttacttttagttttataccctagagaaattcaagtacacatgcacaggggtatgtataccagaatatccatagcagcattgttcacaattgccccaaacattgcatgtacagaatggatacattgtggtatactcacacaatggaatactatataatgatgaaaatgaatgaactatacacatcagcatcgatgaatcccataaaaataagtgttgagcaacagaagtgagacacaaaaggatatatgtagaatgattctagtcatataaaaacagccacattgagatgaaattgtttagggatacctgcatagaaggtaaaattataaaaaaagtaaagacactattatgcatgcaaggagaatggtgacctccagggttgtgaccagggaggggcacaaacggggattctgaaaagccagcaatgttctatttcatgacctgcatggtttttacatctatgttcacttcataattatccattaaattgttcagttctgtttgtacattttcgcatatatattttgcattttgaaaaatttagaaagtttgatataaatcagatgtttrtacttaagaatacattttatctatagaaataagatggtaagtaacatttaatcagattgacccataactttcagttaggtaatataaatactgtacatttcaattaaaaaataatatagaataaatattttgggaccaaaattgatacaaagaaggaaaaacagaaaggaagatgaacttcaaggccaagctaaaatttcacttctgatgtaaaagtcttctttggttcccaggcaaaatttatctttcaaaaagtatgcttctggtttaaatgtaacatattgggtggtaaatgtgtatctcatctggcacatttgtctttgtaacttctctgaggcctagcacaacaactggcttaaaggaagtgcaagtacaactgtcccccttcataaatacatataatgtgtatatagccaccctatcatcacatactgtcacatattatcaattggggtgtgaactcagaagactgggcagaaatagaagttgttttgatatattctgaatctccgtggtatctggtcatcaatggacacaattaaattttgttcaataaaagaatgaattcagtgtaccaatatacttgaaataattttctgttctgcctaaatttcattcttccgtgttaacagaactttctgtttgggcatgtatcagtggtagttcctagtagtttgccctccaaataacagcaaatttcatggttgggacttcatattcccctgttggcagtattgtcttaaatttaaatgtcagagaacatattttagaagtctttctcttttaagatttttaaagaattttttaaattaatgcagtaagcattcccctttaagagactgtgtggaaaaaggcctaagaaccgtgaccgttctcattttgggggtggcaggatgaagtggggtggggaggtgaaataagttacagatttcaggttccatgatttgaagtacctctctttaacaaactacacccactccatataccttcaaatcctttttcaagaagaatttttctttttttcaaacaataatctgaaatgtctcaaaattgggcatattcaggctatcagcacagcagagaaaggtctaagcaggaaacgagggtgctgtgtgtgctttcttcattgccatatcctctgtgtctacaatagtgcctggcacatggtagaagctcagaaaatgactgatgaattaattagtaaatgagataaaaagacagcctacatgaaaatcccaagtaaaggaaaatataatgaatttttaatatcttctattgctcattaagccaatctgttttccatgtgtaaatgaggaacagcaaacagtaagtgaaactttaaaaattctattcttgcagaaaggacactagctagcaggagagagggtacagatgtagtaaaaaaaatagagcctgggttttcctccagcacctcataacattcaaagaggtatttaagtccttgcagttgagttgccacagggcagaaagcaatgtatataggagcattcacaaagcattctttagccaggatcagcagcggtcatgcagaaagcatctctcctgaaattctagttaatgtatacctctctctgcaattagcaatttcaaaaagaactagaattcttaaagaaaaaaaaatwagactatctgaacattctgaacatgtaagactcaactttaagttcctacaaatgggagagwctgaaaacaaactgccagcctgatatgagaacatgcgtgctcaayacaaccagggccatatctgcatgggacatggcgggagaaggatgagaaggctgattagtagtggggcaagtgtctggttgaaaataggagtggacatctgtcctggtctgatcyatacagttctgcatcttcttttagcagttttctccccaaaagaagagctctcaagcctgaggcaaggtgcccttaactggcatctactactactgacyactcctggaagaagccctgaggacattacgtcctcactgtttcaccatagaggatcttcgaacttgtttctcttgacaaagccgsctttttagcaatgtggaaggtctcacctcacacacccatgtattcacccactcccatcatccaactgccactttggttgtggcagacagtttggcagtagtcaccagaagtgatgaagtgacactaaactgccaggtaggtgaaacccaggcaagaattttcaacccaagctcaagatcacaaaaaagagttacattttcccacttgtctggtcaacaagatctttccaagaattctatgttatggccacagatgacattgttatgttttataccacagcacatacggtaaagggagctccagcgaaagcagagccacagcttcaaagccacctccagcctgccccacctactctacattgctttggctccagaggttcttgtctagcaaattttcgcttaaagatttcttgttttattttttgtttgtttttttgagacagggtctcactccaggttggagtacagtggtgcaatcacagctcactgaagtctcaatctcttgggctcaagcagtcctcccacctcagcctccctaggagctgagactaaggcatgtgccaccatgcctggctaatttttgtttatatattttgtagagatagggtttcaccatgctgcccaggctggtcttgagctcctagactcagctgatccacccaccttggcctctcaaagtagtaggattacaggtgcaaaccaccatgcccaactccttctgcttaaagtttttaagtttattttcatgcctaccagaagagcttgcctctaggtaccacacttccaatatcacttctagtcatcctggaactcaacttttgaagaacaaaatttcccattccctgtttcccctaccattagttttgacaatgtggattcagtcattttgttctatatgaaaataactttttctccttaattgatacagaaggaagaaagggtaagtgatacatcaaaaggtctgtacagaacactccagtaaaatccttgccctgaaagccaccacttctctacctgcaggctccaagctttgctctcccctcccctccctccaaccatgccatctcccttcttgtaccccttcccctggcagaactgcaagtgtactcacttgagccttgtttgccttggactgtctccagctaatccactttaacatcttggcttgctctcagatttgctttctccttccaccaaaattctaataataaagtggatttcaatttgagttgggctgtggtggggctgaactggttctggcagctcagtcctcccaggcagctctgaagcagggatctgccttgccacatcccagtgctcactgccaagctctcagagcccaaccagaatttgcttgagaggctggaagattctgtctagggcagaatcacactcccaccaaggctatgatgtgagtcacgagtacttggcatcaatgagtctgtgataggcattaatacttgccacatgccaaccctgaagcccctggactgggctacagaaccactttgtaatttactttgtgttgctgtggatttgctggggcagagtgggaggtgatgcaaggacattcagcatagtgggtggatgggagggtaatagtagggtttyctttctgttgcaaggatcaagctgaaccatcaaggttactacaaaagcactgcttttaatccaacttaccaggcaggagattgacctggttttgaatcttaggtctgctgttaagtggcttcatgactctaggcaagtcactttttttttttaaacagaaggaagagggctagatgatctctaaggttcctttccttcctaagattccatgatttcaaattccaaactcacattgaatcagatctagtctctggttacccttgcagctatcacctatagatctcatctactggcaaatcaccttttccagtgtccctatttctgtaacaagtacttgtataaacctgaaacaaatttttatgygggtccaagtgctctgagtaccacgagagcacttccgaggtttcctgcaagctgcgtgtgttcagcaaactactcactgtctgctatattttatgaaacttacttgcttttgcagacgattggcaattttaatgatgggtttcttgagggaggtttttaagctatggaatataaatcaaaatattragtaaaataatgctgatatgaaatattttgccctgtgaacctaggttgtatttttcagcaaagtatatttcataccctttggtggtatgcaacagctggaagccagtcatttatttgaagaaatttcacttagaggaaaacctgtgacttcgattcctcacactttatcaacttgttctgaaaagcccacacatttgtactgtgtcgaatgtctctgaggagaggatggagttgtgcttctgggaggtgagagggcagccagaggtggggagctgcaggcataccgagtaccacagaaacctctgcattttgttgctctctgctccttctcctcctcctccagccacctgcctaccacagataaaagtaacaaaggaactatactgggaagaaagttattttcaaacctagctctggacttgaattattaagaaagctaaaaaaaaaaaaagaaattacaatttgggcttagagtggagatggtatttttcctactttggggtgaatatcaagtccttgagaaaaatcagagtgtttctatcggatttatacagcaattctaatcctgtatgctgtcaggtgtgggatgtgactgagactcgagattacgcagctatattataaagcccaagtttagacttcagatatatctactccaggccctggtaacaggaagtgcaattatatatacttttcaggtatttatttaagggtttgaagtgttttttactaaatggcaggcagcataatctctccctaataagaaatatttcatgggcccctccagccccactgagacaaagggcagagtaatactagtgctgaggaatttttcccagagacctatcccatttttcctgcctttaagatagcacacttaatgggctggatctccagtgtgtggtgccactgtccagggaccacagctaaacctaacatgctgtcacagccacatgctggagacccggtcttggatggaccatcgtgatggttttcaagaatgtgtcaagtgaaaaatattaccatgtgaagtgctaagatttttatcaatcctaatgctgccaagtctccacatttccagatgtttggttttctcttcagtggcaaaacacagtggtctgtggccccttgaaactctagggggcatgttgctgcctgttttcttgcacatgagtgccccacagtcccctgggcagtgacctaccccaggtcttctgtgctctttcatatagaatctcagctagtccttcaaaatcccaggaagtagaaatcactgccttcattgcacagatgaggagatggaggtatgaagtgattaaaggaccactcaggtcatgcagctggtacctagttggggattgaatccatacctgatttgaaaacccatcccctttcttttacatcacatttcctccctgcaggagacactactggcagcccacccagatcccctttcytgccagggcacccatgtcccagctcttgtgcctgttggctgctcacagctcacaaccgacacaaacggctggcccccttgcctcaaggcagggcaaactccatgcaattcctactgcagagctctggaagggaccagccttcactccttccccactggaccctgcttcccttccctctttccccccgtaggagcacatcctcaaatcacaggcatgggaatctcagtcggagactccttctaggggatgggacctagggtgctctcctttgacctttgagttgtcctaactccatccctattctgtttttgttttgttttgcttttttcctatttgtgagcccatttaagtaaagactttcaatttttctctcagtcatctgtcctccataagcactaatccctacagggaaaataatgtcttacatctaattcaagtcctttcagttgcagcattagcccactttttctcagaagaaaaaccaagcagtcttttatctctgacgcaatttrcagaagactagaaatggccatcctttctccttctggttttctatgtaccagaatgtaagctggaagatggcaggacctmttctcatttactgctgtactcctagcatggagaacagcttctgctgtagagtaggtagggcctctgcacagttcatgaacgaartgggtgggaatatgccaacacaggggctaggcgtcccctggtgcagggagtggttcctctctctggctactgcccttgcatctagtggcctcccagtgtgcaggtgatgaaattgtcagttctgatgaaccaggtaaggctctacaggaggtctgttctcagaaggctcctgcagccaggctgccctgcctcttgttaactggcgtcatgctacggcttattataaagcagcagtgacactgcaggaatcctttgaatttccccttagttggacccttrccatctcctacccaagccttccttcccaattggtaaaacaaaatcttggtcatgacccactacattgatgtgataattcagggtttaaaaaccattgagttatatccgaaaatctcaggggttctccaggtatttccctgttcttctttggcatatcaccattatcagcccacatttcacctcagctcacattagcttgttactgaagttcctcttcaaaccacacaccagcctgaaatgtttcagcagtgttccttcccttataattttttcagagaagagtaccagcaagtcaatttcacttcaatctccctctctccagccaacccggacatgtctggaaatttatagtgattttcagatggagagtatcccaactaggataggtttgtaatgttccattcaataagcatttattttatgtttccagcatgcctgggctaaatggcaaatacaygcactggaactattacagtgcagatggctacttttgtaccattagctggaaaggattcagcagatatccatcaggttaaacaagaagatatttggctgtcacctcattactcagccctgcttggctagaattctataattgtagatttcttctaagtgtgactgcaaagccccrccatttagtaatgcacatatagtcaaaagactatttacagtggaatgaccttttcagaaaaccatgaacttactcctggacagaatagggaaggtgggctcagaccaccatggaacaaagtgagcacacctgtttgccccttggggaactaccacttttgcattagacaggtgtaaggtagaagctatacagatccatttaagtattgaacaaaagcaaccctggaaaagctactaatgccatttactgaggcacccatattgtgttgtcagtgtttaatgtaggattaagaatattagactgttttctcatcaagagaggatttacagcttaagaaaacagctcagcttctctgctatagagaaaagtggttgcatttctttccctggagatgttaaagaagagtcagacaaggaggtttccaagttacagaccctatgtgagaaatgaggaggggtgttgggcattggtcttctgctcccaatcttgtctttttagcaagaatttggatgaagctgcagaagatgcatttatccaatattgcagagcgatatggctaacacactggacaagataatttgtattcaatacatgctagaacactgagatggaactaaataagagaaaatctaatagacataaagtagtcctacactcaggttactaagtcacctgcctgaataagggcagtccataaaaaagggcatggagattttctgagccagcactggacacatatgctaaacatggcataccttaaggaggatccgcacacagcagctagtcctggaacaaggagccatgtttacattagttagaatacttctgcagtattatgtaccttttagatgtatttatatttagatgtatttgtatttagatgtatttataggacccattttatgtagaaattacacactagagtaaatccagatgaaggcaacctggatgtgaaaaatatataaatataaggaacagacacagaaactgaggacttctaatcagagatgatttggagaaaagatgtgacaagcatctttcaacacttaaaggcttaagggctgccactggtaaaacgtggtacaatttgagcattaaaattaatacgtgayggtaatagactataactaattaaataataaaataacccatgagccaatgctaacagcaaatatccaaaccttagattctaagggctagcagatggaaaagagagtaaagttctttttatagacaggtgagttgaagctacatcactttaggtctagtacagagaagaacctgctgacagttaataaacaataaaaccacagggcagaactagctcaagcattttcaaagaccctcacagtctgccaaataattgtgcagtcttattcatagtatctaaacctttgcttcccctctagtaagagtgggaattaacctttactgaatgtctaatggttatcaagcaaatattttatgtaatcttaccaatgacttagtgagataggtattattatctttgctttacagaaaaacgaaggtgcagtaacctatgcaatgtgacacagagtgtcagagctgggatttgaacctaggtgtatcgaactccttccaccacaccacagcatacgtaacacacatggagtggttggaggagatcctggagccgccacagctccccaagttggtgtgtcatggctctttaatggttatgctttcctcatctactcagccagacagggaaactattactgtcattcctctggattgtaagaggaagactggggcatttttctagaagcctactgttagatgagtctgaattgggtgagctgtctccaccccttcccctcccacagcacccttgtttgcccttctgttgaatatgagtcagtttacctgaatcagtccactttattattttcctttttttcagagactgttcatctgaccacttagaaaccagcgttccctggccatctagtatagtcaggggaaaatctgacactgctgataacgtctacaagttcaaacataccaatgagtgatttaacrgaagaagaaaagtgcagtcacggaggacacatggctgccctgttatcactgttttgtgttagaagagtaagaacatttaaattacagtgcatagtactagactgatcttccccttattttgaaagtgtgactatgtctaaggaattttctaggttttgtgtacacacataacatagaatctcctgacctgctcatgtctcctaaggccagagaaggtagttgggatttgatctttctttagcatatttaaaaatacaatgttcatatatctgtctgctttcagaccactggttttagctgcctcttaatcctggagtttcctgagaccagccattttgccccctctatttatttattccacaagtatctcctgagcctctatgtgctgcatgtcaggagtacggcaatgaaacagacagacacagctcttgccttcatcggggctcaatgacctggctattgagacagacatgaaacaaaaaactacataagtagagattcacactcaacaaatagtccacatctctctacagcatccagcacagagcttggcacatgatgggtgcttctacatgaatatgtgagcactgtttctgtgaaatatgcagaaaaactgaccagctgagttcatcctagtatcaggaattcaacgctttgactttcagagtgggggaaaacacgaaaaatcaggagatctgtgttctagttcctgccttcccactaactactagaattgtcttgggtgactcacttagtttctctgagcctgcttccttacttgtagaataaagtctaagtactaggacccctcattaatagtaaaatggctgccgtcaaaggtcttctagtccagccccacataccttgccagaaagacaaggaatagctggagctgaggtcttcctaaaacaaatggctctagcataggggtctgtgtcaaagtcagagctgctgggaagatggattagcagctggaagggatgaattccctggaccatgacactaataatctatgtctcaacatgggaaacactgcacttgacttaccacccactgactgtttaaagaggaacactttttatacactaggaacactaggttatatttctagacaacaggtcagaggagacaggaaattacagaaatggtttttcattgtatgttttcacaagtggaaaaaaacctaattttccatccactctgatagtcagtagaaaatggcttaaaaacttgagggcagttgtcagaattaccttgaatgaccttgagcactagtctaaagcatgattagggtgatttggcaccataatttcagcaggttcggggcacagtccccacactaaggtctcaatggttttttttctcccagcaagaaaaaataggaaaaatcctaatgaatgcagatcatctttaaaagaaatacctataacttagaaaactaagatgaagcaatgacacagcctgctgtctgagcctgaaggagcaggccaaaatactaggtctggataaactagggacaaatagtctttggaaacccagaacttcattaataagatcactaasaggcaacaaaagatcatctcatactctttggattctagagtaagcaaatgagagtaggctcagacatggaccctttcctccccctgctacaaattccggcggttgcattcctcacctagctggggcagatacacagagcctttgctacagtttcttttcttttgctttcccatcagagctactaacttttgcttacttgctccaaaatgttagaaagcaagtggccaggctttctcacacaacaactacacccttcgtataccacttcctggtcctcctgtctctcagcaactgagccccaataatctggccagaggaaagcatcatttccactagagtccctttggataacaggctgctaccaaacagcatctctgtggccatttcccaaacctttaatcttggtctaactttgagatgagctcttctcaaatcactgtaaatttgagccaatcacagccactaaggtctcaggacactattccaactcagcctcactgagatccatccccccagaaggcacagcagcccaagaagcccaggtggggcatctcagaaagagaagaaacctagactccctcactgctcagccttcccacttctgttaaactctcccagtgtgagaggtcagcctgaaccaccgcagtcttccatcccctcagaccagatctcgtgctgggacatgcctcctccagccctgttctttcctccttggctggcacaaagagacaactggctcctgaaggtaggatccatagtgagagaaattctctaggggtacctctccaggggtggttgagccatcaagaagtctcaggggaaggaaggttaggactctgtcctaccttgtcactgtccactgtgttctgagaggtcctagaagcaatggagatggtgtctggttggctgctcccatccccctggctgtcaatatcctccactccatccctgcaggaagaagagaaaaaaaacaggggtgggggtggggggaaccactgtgggtttagagcacacaaggatttccggttgggtgggcagagcagcgcctcagcactttctagcagggatttgtctaaaattatcctgctaaagagagtggccctatgtgattttcagtgatgtcacttcttgcacttagtaaacacataatcactatgttgataactaaatgcaaaatgacccccttccccaaaactcctccagcccatgctgcagagggggtgtatgtatgtatatatgtrtrtrtrtatatatatatatatatatatatatatatacacatacatacacatacacacacttgggaacgggtctgtaagaggcagtaggaagatatatatcctacttagagcctaggcttctatccaggtgattaggtcattttaataatcccaaattcagggtattcaagtttttgtacatgctgtaattaagatgagggttcatttacagctggcctataaagaaaacagaagtgacaagatttcttcttcttttttttttttttttttttttaagatggagtcttattctgtcacccaggctggaatgcactggcatgatcttggctcactgcaaccttcacctcaagtgatcctcctgcctcagcctcccaagtagctgggtttccacgtgcctgccatcatgcccagctaatttttgtatttttttgtggagacgtggtttcaccatgttggccaggatggtctcaaaactcctgacctcaggtgatctgcccgccttggcatcccaaagtactgagattacaggtgtgagccactgcacccggccaagatttcttttaaacttgagtttcttctgttcaagaaaacaggttgtgtggaatattgtctccaggggatattaactttgggaaattcctgatattagaccttcaactcctgggtgtggagaaggaatttattgccttcatctggctgggttttgaggatctcatgcatgtttataatgatttcttatcgatacagaaggccaaggcattttctcaaagattggtgaacagtcacaggttccacagcagctttggagccagctgtgcttctgtgtgtcagctaaggccatctcctgagtgcactcctggcatttagaccccttcctgggccccggaccacacagctgtccccatgttctttcagctctccagctgtagaactgtgcccccatcctgtaccaagcccacagccatggccaaaagggattgcatgtctggaaactgatgaaggctgcaaggtctgtgccaggaaaagctgggggagatgtggagttggagttgggtgaattagcacaggaaatgacagcttttccccagggggcttttataaaagataccctgatgctgcttgtggagaagtaatggcatcaggggacagggaaactgaaagcctgagaatcctaccacatgaacaaagtgccacaaataacgaattcacctcaaagggtctaaatgattgcactctggtgtatgtgtgaatgtatgtggatgtgtgtgtgtatgcaagtacccatgcatgtgcacatgtatacacacaatgtctattcatcataaaaagtattttctcccatccagaacatttctaagtcaactgctctctcaccatcatttgtgggcttgggaaatgccaatttattttaataacataagccacacattcataggaaggaaaatctgctgtaaaaagactttatgtgacgcatttcaaaaccaaaaataaaggacttttagatcatctgttgttttggattatctgggccagcgctccccaccatgtgtagacagttgagagctggctgtactttctgcttcccgctattctggcccatggtgggcccttctggtccactccaggtgaagccacttctggggggatgtggggaggccacctaggactgtgggtagtattccccaaccaatgaactcctctataaactgtccccatatccaggaatccaagataacggaattaaagactgcttggttattctctgcagagtatgccaaggtttctcaccyacccattgtaggacaagagaaaaggtgggagcagagaaaaggtgggggcatttccaagatatgcctttcccatgttctggaaatgctcaaactctcctactataggaaaaaggggctatgtcagggtaaataagcctagtcagcctcacctgagtatcctctttcactatgatcctagaccatcatttctttgtaattgtttcctttctaatttatttattaaagtagggattccctgaggcatggcctgtctccactgctagactttagtccaccccctccttacctggactctggacatagataactggcatcaaaatgaccccttcaccagagcagttataatttgtccatgcagcactgaggaggtgaacttatcctggtcatgcaggtcttggggcttccgccccatggaggtttctccaccatagtcacacccttcttttggctaccacctcactcaggaccaatgctgctgcggcttcataggccctgaaatggctccctaccctgcttgtcctggttggtgcctaagggtcaactaaatcctccagatttattccattcaggtacaggggaggagggaagaacctgttatcaccaatggccatctctgctagaaccccatttttttttcttcaaaatgtacgtgaagtttttgtatgctttctttggaactgtcccccaaaagagtcattgtaagtgtaggtgtcacatggagacttgggaaagaaatacttaagaagtcatccatgggtttagaggaaactgggattcagaagcatccagaaagatataagtcctcttctgcccaatgacgttgcttatcataggtgaatgaaggtgaggtctctgtgggggttgcagtaagacctgcaatgaaaccaccactccacacattacagtacacaaagccctttgactatccaaccagtccagagagttcctccactctaggactcatctaaagtcccctttctttgaattcttatagaatttatgatccctatacgtggttcttctggtctatttcatgtgtcagacatgactattagatggctcttaagggaatcgactcatcttacacttccttttatcttgtagaacctagcagagtgtttatcatataagaggtgctcaatgaagccctgctgaatttgacactagtgagatgcttaaagatcagatgactcatcctaggtagaactcacaggccttcctggagagtgccacctgctgggcacatcccccttcagaagcaaagattcatcccattcccgcacccggaagcctgtgaggcaggcagtgctggagggagaggtgctggttacctcttactattgttcctctgtttggctggtgttttggggagctgaagtggctcctttaaagctyctttcaggtgaatgatcctttcttgaatcacttctcgaatgttcttgatccactcctgcttggtttcaatgttggaggcctagagtgccacagggagaaagactgagaaccccaactcccatcaccttaccaaaaacagttctcaaccctcctgcagtcttcatctgttattttcaaggattccaaatgtctggggagtttatttctcatttcatacttatgactcttcaataccagaaacaggcttctccaactcccagaacagtgctccgacctcaagattcaatgcagaattacttgtacgggagtaactgtcaaagtatttcataactcataaggcactgaccaatcctgatatctgccctggaggtggaacagtatctggaagttccccctgggacagggattaacacctgggttgctagatcctggggaggtctggtgggcactgggaggggcagcatctacttcccaatcagtatggatatatgtcaggatgttcacctagcatggctccacagacttgtactgactagaaatcagtcctgggtttgtggcaagctctgttaactaaaggcactgctatcattttatgatgatcccatttgtcttggtrgaattttttttctggtaattctgcctcacaacaggtagcagctatgctggcagttcagagtgaatacatgtgaagcttttgtcggggttggaccattttttccttggtgatgggcactttcctgacaagcaaatgactgctgggaacttcatcatctgcattatcgctgctcagacaggctaacatcactgctgtgccccagagagctgcaatgactcctcaaggccgtcttctggtgaaaggctccctcttgacatttctctccatcagcatggtccccatgctaatgtgatttagtaggggttcaagaatgtaggttcccagggaataaggtccatatcttatacatagttatcccccaccacactaggcactataccttttacacggaagttatttaggaaaaaatgtcaaatgaatgtggagcaaatcaaggtgtcttttgtcaaagcgtcaattgttcttgccacttgaaggaagagatacggacagagcacagtttaagygggccttgctgagctggtcccacaagccactccctgctttcttccctcttggtcacacatgtgcatgcacttgaggagaccatgcgtctttgagattctgggtctactttcatgatagaatttgcttctcaatgcccacgtgatgctgccattcccaaaagaggcccatggctcagtagagtctctgggccttagctttkaggtgtcacttgcccacccccacttctattatccccaaccctagtttgtgcctagcagagagcagtacttactttcagcactgttttattgtctgaggatggggtgcgcccagaccacaaggcgaatttgcagggatcgccctccacgtgctcggtcacacccagctctgaggtctgtagacaggaaatgcctatgagaggcggggaaggggagggcagtggggaaacttagggctggggtgggaagggaaaggcaacaaagaggagaggaccgagggaggggcttctgtcaatcaaactttaacagattggatattctgttcatctacccaggatgaaaggacctacaggcacgtgcctgattagcaggtaccagggagggaaggtgaagagggaggtgctaaaagcaaacagaaagaagaactgtgaactctacaatgcagacgtgggaggtgagtggggtgctttccaaataggagacattttcatttgtccaggatggttttggtgtggaggccggggaggagatgagatgagtgtgtccagatcccttcctgcccatgggttctatgaaagcagggagtcttgtcttaccccacctgycccacctaccagtagcttgttcttgtaaacatatttcgtgtgtcctgaagaatctttgatctccttgctaaaaaccaaggagatctcaaagaggaacaagtgccgctcccgccccttccggatcagcgacttcgggtcccacacttgaaaggcatcctggagaatcaactccccctgcacatccaggttctcgtcgaaccctgaaaaacatccatttccaccctgtggagtttctctactgccacagtcagggggccatgttccacccccctcttggagaaaggsctctcttattgttagtcytcagtkactgaagggtttttttctctctgctaactccagagactgctgaacacttccatagacatctctgagaattgcaattagatctctcctgcccccttcctgcaccatgtcttttatatacataaccaatattagtggaatctcctgcaaaggtcctatgcaacctcacaccttcacacacccacagttggcctcctgcaagggcaaatcccatagctcctttgtcctccacaactttctactgttcctgacttgtagctatgagtggggttgaggacaaacactgcctgactgagtgtcttcagctcctctttatgtgtcattcattaccttaattcttcttattattattttttattttttttgcagtggcatgatcgtgggtcactgcagccttgaactcccaggttcaagtgatcctcccagcttagcttcccamrtagctgggtcataggtacatgccaccatgcccaggtaatttttgtattttctgtagagacaaggtctccctatgttgcccaggctggtcttgagctcaagtgatcctcccaccttggcctcccaaagtgtaggattataggcatgagccactgtgcctgacctaccttaattcttatattccatttctagaattcctccctttgattactttgcacaagccttcaacagtttatatttataccacttgaagtttttaagagatgctctcaaactttactgtgcataaggatcacctggagagcttgtgaaaacacagattactgcccaccctccaacctccccagatattctgatttagtaggtgtggggtgagtccatgaatgtgcacttctgacaagctcccaggtgctgttgctgctgctggtaaacagaccatgcatggagtagctggatccagagcataggtcagggacagactggaggagctgggtacttgcaggtacttccagggtggggtggaggggaaggtacaaacagagaggaaaggagtggagaaaaatgtcaacaggaatacattgagatggttcctgctcagcctagggaaaatagccagggctcctttgctctaagaattgaggcttctggtgctaaggatggtctgggaagtatggagaccgtatcaagtctcccaaggtggtgttggtggtattggcggagtaggatggagtccagaagagaaaaaacagcccacgtgtttacatatttgcaacagactatacacatttcctttagcacccattaaaaatgttaagtctttttttttgtttgtttttgttttttgagatggagtcttgctctatcgcccaggctggagtgcagtggtgcgatctcagctcacggcaacctctgcctcctgggttcaagcgattctcacacctcagcctcccgagtagctgggattacaggcatgcaccaccacccctggctaatttttgtatttttagtagagacggggtttcgccatgttggccaggctggtctggaactcctgacctcaggtgatccacccaccttggcctcccaaaaaaatgttaaatcttaactcatctaacaaattccaccccagtatggctgctctgcccactcattctgcagtgttaagaccactttattggaatcttactctacaggtttctggtcccaagaagatagcttcatctgactgaagtcttatcagagttgtttggctggacttactaaccttctagaggacaaaatgctggttgcacaagaatgtgaatgtatttaatgccaccgaactgtacattcaaaaatggttaaaatggtaaatttatgttatacatattatgtatattttaccataataacaaaaaaagagcataaggctgaagatggtatgttttgtgtgtatgtgtgtctgtgtgtgtttatgtgatcaggctttctattcattgtgatgaccaaggcaatgtaatgcagatgctatgcagactaacaagactgctgtaggttggaagctctagcacatcaacagtgagggtgatggcctgtcctggactgtctcatgggcagcaacatgtccacataacctccagtggcttaggcctggtccttcctagaagcagggtgctagccaaattggtccttgtggagcccctctcacatgacaagggcctatgtaactacttgtcatttcttctctcttccagccttgcaccttgtctaacttcatgccacttccctcccatgatacaagctcccccgtgtcaaggaagagaggaggcttccccagtgctgggaggacagctaccttccagcatgctgacatgcatggcatcattggctttctttgggacactgagcatcacctccaggccatccttgagctcccctttcccttcttcacagcaagttaaaagttcctggggaaaaaaaagtccggacataattagggccatctcccccagcttcctcccaccacctaacccagcaaggaaattatagaccagcttcgctctctgtaatggttccctctgagctataaagaaagtgaggtggggtaaaaggggttatctctaagaattcaagcactatttttctcccacactgagcattctcagcccaatctagcccaaactaactcaatccaacccaactcccaaatggcttgacctgtaaggcagcaactgaggcattctctgtcactggactgccctcttagagaagggactaccctggcaaagcacgtgaacagaggtgcagtattgtataatccaataaagagaataaagagaagaatgaggaggataaagggaagataaagagtgtgctatgcagtacccaaatatccctgcatgcttactgctgacaccacttttatttacaagcctctacagcctgaatgctgacttccatcccactgggaacaacttgaggttggagacttaataggcttatgacatcccagagtaataaaatatttttagatcatatggatcaggagttcctaatctggggccaatagatgggcttctaggctatttcattgtcagatgaggtaagtgcgattaagagagatgaagtgattttcctcaggttatataactcagtggaggctatgcaggggcctgaatccaggtctcctgaatccaagtctggcactttatccaccacatcaaccctgtctctcctatattctgtcccccattgaggcttccaggggcaataccctctttcttttacctcctggggagctggggagtgtgtcctttcttttgtatttcctcattggagactcagtcatcaccatccccataaaagatatatagtatctggttggtggaggaaagatcatttccaactatcttgagaatcataagaccacttggaatgatttttgcccaaaccagaagaatgttggcttttcatttttcctatcagggtcactgtatcttgctccctttgacactgagaagggaatggttaagcaacagatctgcaaaccatactctctcctygagggggcaggggatgcatgttgagtggaggtgcctttcccagaaataaagaagttcaccagatcaaatcttgtaaacacgttaatgacagacctcttgacaaataacctaatggtacttgctagcaagagaggacttatctaggaaatgcttttaataggataaatctggtctgtctagggcttcttatggtaaacaatcctagaatctgtggctttagaggcatagctctctggaaggtgtcacataagctatgcaactatctaagtaaaaagggaatatctttcatgaccaattggctctcttcagggcaagtgatacaatgtgacatacataatttacagaccttgtagatcaacctggccgcagcacatcctggctgcaagaaagggcttggagctgcactggtggtcctggccctttcctgtgtcacctctgtcttggaattacttgtatccttgaaatttttagtcaagctttatacttggtaagatatctrattagtgagggtttgatcgaaaaatccaatccttggatacattcccctaggaataagggagctttgagtgtacaaagaagaagtgcaccccctagagcacatgtttgagagggagaagtgatcagtgctcagctttgcccttggctccagtcagtataacgtcacccttgttcagaaagtggtatttacttctgccaacctaaagttctcagattctcccacccctttccttattttaaccttcccaatcttattttcatatatcatcaaagaaaatcctgaggcaaaacataagagaaaaaacaagaaatatgcttcaatttgtgacagaaaacatgaattagtttaatccccccctgcccaaaacaatttagcaagtctaccaatctaccagctgggccaataaattttccctgatccttgctatactttatgataaggagaaggctccacatttaatttaggatccttttgtaaagccacagcagatttacatgaagaatattgagcrctctgacgtaaagtttctactttcacgccatacctaaagtgatgaacccagaggatactgacaattaaatatacatgtatttgaaataaaactgactttatgaaaataaatcccatattatttatagtaaaagctcagcaaactgtttttctcttactcagcaggcactgtgccaccagaacatttaaaaaagaccaaaactatcttcttcttttttttgagacagagtctcgctctatcacccaggctggagtgcagtggtgcaatctcagctcactgcaacctccgcctcctgggttcaagcaattctcctgtctcagcctcccaagtagctgggactacaggtgcacgccaccacgactgggcaatttttatattttcagtagagacggagtttcaccatattggtcaggctggtctcaaactcctgacctcaagtgatccacctgccttggacacccaaagtgctgggattataggtgtgagccactgtgcccagcctattttcttaaaaaaataaaaataatttgatgacttcctcacaatcaaattcctgccactttatttttccacttcttagctacctctataggcaattcttcctaaaacactcaattcccgaacaaaggtccagagcccactccttcgactgcccacagcaaaacacaagcctattccatcctcaacttctctcccttgtctatgccacataattcatcctagggggcttacaccttacagggttaaagggagaggtaaaaagctatatttcttttagaactgcatcttagttgatttaagacactggcagtgtggatagttgagtcagcattggtttgtctttctttccttttgtttttcctttttaaattcacaaccccaccaattcctgaacaacctttgggtgggatacatacattcaaaaccataaaaatcaatttttttaagtctgttagcacaagaaaaataatttcattttttattttattcatttattttttttgagayggagtctcaccctgttgcccagggtgtagtgcagtggcatgatattggctcactgcagcctctgcctccgaggctcaagcaattctcatgcctcagcctcctgagtagctgggattacaggcacacaccaccatgcccagctaattttttgtagagacggggtttcgccatgttggccaggctggtcttgaactcttgacctcaagcaatccatctgccttggcctcccaaagtgctgggattacaggcatgagccaccatgcccgaccatgaaaaataattttaaaaggccaagcatcaagtgggataggaaagaagaagataattacacacaaaatctgggctaagggattctactgtaagcaaccacaaaattcaatgctaactttctaatagccacacgtaaagaatggcctatgcagctgtcatctaaagatagaacgtatacccatttctcaggagagaggattccctacacccctgtcctgagatctcacaagaatttattatgtcttcatataagaaatttcaaaaaacaaagaagggaaagcagttctgtcaggacagctggggtggctgcacactcttttctcacactagtcctcaggaaaggccgagggtgtgatgtccagttgtaacactttaagccatttctgcagggttggttggctggagcactggaagcagatgtctgtagcctcttcttggagatgaggaaggagaagaattgcagggatgaggctgaagggaaatgatgtggcacggccccactctgactcagaggacagaaaaccctaccagggcacagcctcctgcaccttcactgcactgctgccctcacgcctctcatagtgctaagccagggagattccatgggctgggaatggtggactcactccagtgtgactagaatggcagatttaaaattagactggttttcargttcagtgaaatgagattatgcaagtttttgcagacatctctaaacatgagctgaattacatcagattttctctgaaattacacaatgtayttataacatgtcccctactatccctttatctttgcattaaaggagcaaccagcaggatatttcaaatgagggaaaactctacccctaaactttaggtattaatatagatgggggttatttaactacttgtgtcaattccccaggctttctgtggaaatgacattattttcaatgtatcaatgcattcttatatgacaaggatgaacccaaattacttagtgttttgcatatttggttatttaacttttaaagataagattttgaaggaaaatccaaatctcttggttggctccagaagaacccctaacatgcgagaacctacagatataagaataccsttgtgttttaatatgtaccctttgactattttccctcaaaatcctcatcgtcttgacaaacacagacaatggtaggtgccaccctggcctcgactacccatgtaaactggcactgcccttaggactctgaccttttatttatttattaattattattcttatttttttgagactgtgtctcactctgtcacccaggctgsagttcagtgamacgatctcggatcactgcaacctccgcctcctgggttcaagtgattctcttgcctcagcctcccgagtaattgggattacaggtgcacaccaccatgcctggctaattttttgtatttttagtagagatggagttttgccatgttggccaggctggtctcaaactcctggccccaaatgatctgcccatctcagcctcccaaagtgctgggattataggcatgagccactgtgcctggcaagactctgcctcttgatttcatcaaaagcaggggctaccaggaggaatctgcttctgtaaggagggacaagaaagcctctaggagccagtcagtgcctgagaaggcaattgctaaaagctgtgcagtggtaggtagatgagaaaatagtcacaacttattcctgctcccttttctcccccttctgccttaaaataggcatctggatttccatgggataggacagcgatgccagtgtgggctgaagttctgccctaggtagaagaaaggtcttcaggtggaagcattcctatccttaggggccaaagctgggactcccttgccccaggcagtaggcagtggagggggatgtagaggggaggggaggtaccttcaggagcagttgatatttggtgatcctttggacaggcttaattagrtaggaagagatggagttggccagaccatgccgctgttgtatctcctgcagggatgagaacaatgtgcaattagacacagaggggtgtgtgcatgtgtgtgaactctgagaggagaaaggcaggggtcagaagagaggaagaaagagaaaaaggtagacaagtatgagaacatgttctttcatagggagaggggagtaaaaagagaaacaaaagagaccaagatgcatatagagaaaataggagagagagtaaaaagggagaaggattagggaaagaagcaagtgtgtgaaacaaatagaaattgagcaaaaatggagaaaaagaacagtagaaaagagagcaataaggtaaataacagagcggagggtaaggagagatgaagtaggagtaaaaggaaatcagttccaaaaaggggagatgagagtacagggaaggcagagaatgaggctctgacatctattctgatggctcctgaggagtgtttccctgccttcagtctccttaaaatagcacaaggatatatctcctttattaataccatccttctctttaaatttaacacatcccaacttagggtcatcactttatttcttataaatgttcattgtgataaatagcacctccttcattcttcaggtctcctaagctagaaaccatggagtcaattttagtcatttctcctctgttatccctggtgacaaatctttcctttccatttccagggacatcaccctcatcactcatgcccaggctagggccgtggcctccaactgctgtttgtgcttctagtctctccttttaatctactctctatcctacctccaaaatgatcttctactccccaaagtctaggggttmtaagggtcagagaaaggtatatttttctccctcccctcawaaagcttacagtctagatgagaatactcaacgcacatgaactagagatcaacaaaagacaatagaggaaatggtatagccaataaaaattgagagattactggggttgggagtggccgggtggttagtagagataaggcctcaacctcacctggggctaagaggtgaggtgggcagtgggggtgggttaagtaaaaggttggaggaatgacactcacttacatcaaacacaaaactgtatcggctgaaataatcattgtgtgtttagatgatgatgaggaccatgactgaatggtacagaggatgcacacccaccttctataagaagtgaaaaatacagttagatatgcaaggttgggtcattgatgggtttgagttagaaaagagttaggatatgatggtaagtttttcaatggtaaagcatcacagatcttaaacagaaaaaacaggcggggcatggtggctcacgcctgtaatcccagcactttgggaggccgaggcrggaggatcacttgtatccagtagttcaagaccagccggggcaacatggccagatcccatctctacaaaaaatacaaaaattagctgggtatggtggcacgtgcctgtagtcccagctacttgggaggctgaggtgggaggattacttgagcccagaaggtcaaggctgcagtgagctatgatcacaccactgcactcaacctggatgacagagagagaccctgtctcaaaacaaacaaataaacaaacaaacaacaaaaaagagaaaaaaacacatgatgaaagtaatgtttcagaaagagtaatatatatacctaacagcaacatgggggtaaatcttggagaaatagagacagaaagacaagttatgaggctattgcaaaagcccaggtgtatagatatgaagttaccacacgatccagcaattcaagttctaggtatatactcaagagaaataaaaaatatatatctatgcatgaaaaacccaaacatccatgaattgataaatggaaaaacaaaatgtagaatattcatacaatgaaatattatttggacataaaaagaaatgaagttctgatgcatgcaacaacacagatgaactctgaaaacattatgctaagtgaaagaaaccagtcacaaaagaccatgtattatgactcaattttatgaaatgtccaggcaaggcagatctatctgtagagacataaagtagatcattggttgcttgtgggttggggtttgtggtggagagctggggggtgatggctaaaggatacagggttgctttgtgaggtgataaaagtgccctaaaattgactgaagggatggttgcacatacctgtcagcgcacacacaaaaacactgaattcatactttaaatgggaaaaatgtatgatctctgaaatcatctctcaataaagctgttattttaaagtaggtccaggtatgcaatgtaggggcatgccctaagctagaattagtgagaataaagcattgggaagaataaaagaaatattttaaagatggactagataggacttgttatggggctatgaagaagggtggaggagagataataataatttaaaaaattattccaatgcctatcagaaatkatttctatcccagaaagtagcaattttgtcaccatttgcctctttcccagaggtgtgtacttgcaagacttgtttgaggatgatgggcaaaacagatgcagcttgactctcttcaggcaactgaascttgtgagtttatctgggagctttggcaagaaagcacaagcaacartgcacctttggcactctttcctctctgatgaaaagcccagcttaaggaaagctgcatgtggagcagagagggaggggcctacatcagtcaaaccaagcttagacatcacacccatgctgtgtgatgggtcaaacattctggatcggccgggcgcggtggctcacgcctgtagtcccagcactttgggaggccgaggcgggtagatcacgaggtcaggagatcgagaccatcctggctaacacggtgaaaccctgtctctactagaaatacaaaaaattagccaggcgtggtggtgggtgcctgtagtcccagctactcgggaggctgaggagggagaatggcgtgaacccaggaggcggagcttgcagtgagccgagatcgcgycactgcactccagtctgggcaacagagcgagactccgtctcaaaaaaaaaaaaaaaaaaaaaaaattctggatcgtgtgaatgtgtaagcctttctaggactttaattctctgtgttctctttacagtaatggatattaggtgactgcctttattaagggtttatctcatttatagaatgagggcctaaagcaaatggttcctaagtgtagaacttagggaaactcttctgatggaatgaaagtaagccacaaagattatgccttttggaaagttttgaaagcaatagaatgagggcctaaagcagatggttcctaagtgtagaagttagggaaactcttctgatggaatgaaaataagctgcaaagattatgccttttggaaagttttgaaagcaatccggagagtttactgtcttctgtccccgcttccagggcagactttaagaactcctactggactggttttgtggcttccatcagtctttccaactaatgtagaagctcactaggcactatgttggaaacggggtatagggtgggaaatttggggatatatctgacttatcaaagcctagaaattggctagaaatggggatgcgaggtatgtagtactaagggaaaatacattctggtgccaggcactgagatgtgacaaatatgaatcaggcataagatctcaaggagctcacaggtggagggagatgtgagtaacagaaaggtgcattgttcacctgccaaaaggcaaatcattacaaatgctataacaaagatacaaagtacaaaggaaaggattcatgcaggaagcagcatgtgacctttaatggataggaagaattttgaagagagagacagaagggtgtgtgtgtttgtgtgtttgtgttgtgtggagaggacacaatctatcctaggcagagagagcggtgtgagcaaagacaggaagcagaagagtttgagacatgctcagagcacaggacatgtatgtcagaaaagtgctaagtggaagacaggacacaatgcrtttaaaacttcaaaaagacccttctggatattgttcatgaataatcaacagaagcatcctaagggaaaaagattctcactcagaggtaatggtggcagagggcatccaatatgatacccaataatatcaggtgagaggagcacttttcttgggttcttctgtggttccaaatctaaccccaggtattctagtgtgggatacatagagccatttccatattaatgctccattaaaaaaatcatgtgcatttttcctcatctggcttccttccattcaagtgtcatttctttactgagcaacaagacatttgtaggatcatttctgttgaggcagtgccaggctagaaagatgctcagggaaggtttcttttgcacacttgagtacaaggaccatgtttaaatgtctttatattctccacggggcctagcccactatcttgcataaagtagacatccaaatatttatgaaaaaaatgaaaacaggtaggcakatagacagataacctttaaaaagggctgagtttctagtttctgtcacttctgatatgactgccaaaatagccatcactgctatagtctgcctctcactaaattttctttttccccaatttcatctttccctcttattcatcctttgaatcctgcagggacccctttgattttgcttactgtaaagccaataggtcacttttggctttatagatcccaccatttgccaacaggattgtgtcataattccaaaccaaaggatctgacaaggcacatcagcctcactcttctcctggcttctattatagcagaggtgttcagccctggctgcacatcactctcaccagaaactttaaaatatcccaatgctcaggccacagtcaggccaatcatagcagaacctcaggcatgggattcagatatcagttttttttttccaaaaaaggttgaatcaattgcattagagaagtgattctcaaacttgagtggagttcagttacccagaggcctccttaaaactcaggttgttgggctccccgcaagagattctgatttaatagatgtggactgaggtccaaggatcacactttcggaaacactacatttgtgagagctgtatatgaagcagaagtgaaatatattaatcaacaactgcatcatagtggccctcctctaaacatgtgctttatgacttcctaggtttggtgtggaggcatggagacaaatttgcctcgtacaaaatcactttggtcaagataggatgagataaaacaaaatacagacatatactgtttttgctttttttccatgcttaaggtttgcagtggccagtaaagaaaaattaggaaaaaaggatagctaaatatccatccattatgccaaagcagagaagcatttccacctgctcatcagctgctcaagaatggaaaacacagcttacatcaaagaaggtgcccgcatgctccaggataagctggttggaatcaggcttgtttttacagtaggtgacatacatctgaaatttgtcwgcctaaaaagaacaaagataataatagataagcattcattagttgttcccttctgtccaccatgctgaaggacccagcaagggctgtacagttaagaccctcagacrccagtgtctagattttctatggcaaatgttctatgctcatccagcccccatggtcccctaacggacattgggatgtcyttctcctgtcagcacgtggagaaagcttctgaaactgagctccttttaataatagtttgtgctggaaagaatcagaaaaagcaactcatatatcctgatatattctgaagttggacagaacttatttacagattttacccttttttggattatctacaattgtgctccccatcttgaaaaaggacagcatttgctctgaatacaaaaacaaataatgaagatgaagtattatctcagaggtagatctgcttgtactctaaatgtctccattggagaaaggttgaggggcatggcaagsgactatrccatccccaacttcccagagcaatcatggggaaaaagaaagcagagtgaccccctggggcagaggctaaacaatggttcctaactagattgttgcttcaagccaagaaccttayggctgggtgaaaattcaagactctgaagactctctgggttagcgttactgggaaaggtatgtgtattttggccaccaaatacttttcttatttggtgaaatgctacccatctcagtgcctttggaactttgtgttggcatcctcttctgagacagcagcccaaatatgtgtttattacagcaggtttcatttatgctagcattgttctaagagctttacatgtattaactcatttggtcctcatgagacctctatacagtgagttctgttatcatccccagtttgcagatgagagaactgtggcacagannnnnnnnnnnnnnnnnnnnnnnnnnnnnnnnnnnnnnnnnnnnnnnnnnnnnnnaaagtcactttaactagcagagatctgactttaggcttcctggtcttgaccactgcctttcaatacataacaaacaacttcttctacccttcatttctgcattacactcatatattaagattatgagacttaagaaagtcaccttgggataattcttggcaaaagatgaatattttatccaatcaaaaaattttctgaaaccagtttttggaactatgtactacctaggagatgatgataaatcattcttatgactgattgtaaaggaaatccacaaatttcatgaaagaagatgcaaaaaaaaaaccctttacttaatggtcaatcttgtcattctctatgtttgctgtgcaagggatcataaattatttatcagcattaatatgagctttgtattggctcatatatttaggggtagaaaatgtattagaacaaaataagatggtagctaagactttctgaagaaacaagagtgcttggaagcaaatattaagatttcatgaaaaaaagcttatctgagaatcaggtcttgagttgtgggactggctgtgatatttattacatgtcagtgaactagtcaacctcctatcttatctgaaattttcccatgtttaaaatctaaaacataaacatagtgttgtctatcacatagggctgttgagaacataaactctctgaatcatgaagacactttgaaaggcaattagccccttatgggtggaagttattatcaggtaattattaaatagtagaacgcttgaccctgggggaggatttccatgtttgcactcagtgtcctaagtggacttccctggagatgtttgcattcatatattgtacatgagcctgagttcagaataatgcggagtagagagccaatgaagactaacgtttcagtttatataattagaatctggtacattcagcccctttacttggcccatgataacagcatgaaggaggatgaacagtcactcatcktgtgggtcagattgggatggatacccaaaaaatctgtttttccctattaaagaagaaaatgtaaccaattgttaggtggaactcaaaggatacatgcttgaggagatggacaccccacccattctccatgatgtgcttatttcacactgcatgcctgtatcaaaatattttgtctcccccataaatatatacacctaccatgtatccacaaaattaaagataaaaaattttttttaaatggttaggtggcttcctaaagttctaattccctaatccatatcctgtaacaatagctaatggactgagctgacacatttcctctgccaggggtggtagtcttgttccactcttccaacctcacaattttagaaagttcttagacagcttaagatggagcttaatcttgatgtctaagaacttttcccaaggcttctctcagacctactcatggtccctctcagtagcccctggtcttgtgtgagactggcaatgactccagtccttaggtcaggcactgaagagtggtgccatgtgtatgggcagtgggagaaggatttcaggttggttacccaggtaacaaagcagtgtcccacatcctcaggcagttgctcgtacttctccagctctttgaggaagatgctgcaagaggagaaaaagactgaatcagacacytctgtgcagctgaccccccagaggattgcactgaggccagcacaaccataacttctcaattatttatacatggcttctctactgtctaagtgatagatggtgaggtgcagtttttaatgtcggaactaatttcattaaaatgtatgttaattgattaattagtgctacttaaaataatattctttctctcggagtgaacacttctagaagtgaaagtaaataataaaatattttgtttgtgttggactttttatcagcaagtaagaatctacttttttacacaagtaatctaagcacatcataaatattttaaataatatagatatttcaaagaaacaaaataaaatatcgctatcctagagataaagtagaaaaaaattcagcctacactggcctctttctaatttttggcctctgtcttccaccagtagccaatttgtactaaaaactatgtattaaacaatgttttataatacagacaccattaggaaagaaaacttaatgggtaaaaattcacaatatattccaaagctgaattgaattayaactgttatccaccagtgtggatatctgtgccatggctcctttccacgttaataaataataaagaaataattacactgacttcaaaataatgtattaaatcattggtttgggttcataggatataaattctaacaagccagcatgctttattaggatggtatttgctgtaaaaaacaaaatatttttcaaataaaaagtgattatgaggctttggggacacatagtgacagaagtggaaatgctacgatctttacaaggaacaatttgacagtaccgattaaatcatgaatgcgcttatcttttgactctgcaatttgaattctgtaaattttcctgtagctatttctacacatataaaatgatgtatatacatgagtattaactgtgacactgtttatacaagcaaaagatggtctgtaaagaacaaagcgtttaaactatggtacatccacagagctatatactatgcagctatgaaaagaagacacagctctctatgttttcatatggaagaactcygggagaagctaagtggaaaaaggtacagaagaatatgtagaacatgcaactttttgtctcagtaggaattacgtattcttatttccaacccaaaaaactaagaaaagacattaccacagggaagcaggtgaaggaacagaatagaggacagtggtgggtgacacttctcaatgtttacttttctatctaahtttgattttaaaactgtgacaatacattaccttcaaaaattgaattaaaggatacacgatataaagtggttctgcattactctactacttacctgtaccatagagggaaaaatgttatttgactaactttacctagcttctattgtccacgcattttggcagtataattaattacaagtggttatggatttcacatatgtgttgtatgtgttcctccttccgtgacatagaatgacattgtttggagcttaaaaatatgtatgtgcaattaaagatgtttggcaagtcctatttggaaagccaaaatgctaacaataattgatgggataatagatgacttctttgtccatctgcaatttaattttttctacgacaaatgagcattgctttagcgataagcaaaaagccatttaaaaaaaatctgggagactcctagctgtacccagtttgtccttacataggtgattttagagtattctgacctgaatcaaagagtaattataatgatatttgggcttcagaaatgcaaatatgtagtgctcaaagtcaataaagtgtcatatttgttgctaccttttaaagaactacaagtgacacatttaaactaatatgtactttatatgaccattaaagtgcaaattttaaaaagtgctatataatgttataattgaggatcaaacttagtttaagacccaaagggaaatatacttttctgttgagaaaagaatcaatctgcctcatcatcatatatatacacacacacaggtacacacacacacacacacacacacacacacatatacacacacacattttaatttaaaattaaaaacaattttttataataatagagacgaggtcttgccatgttgcccaggctggtctcaaactcctgtgctcaagcagtcctcttgccttggcctctcaaagtgctgggattacaggcatgagccaccgtgcccagcctgggcccttctcccttaagagtagccaaagaaatggtaaaacagcctggatcaggacattccacacaggataaaaaattgttttattgtgtcagaagtggcraggatacccatgatgactcagggagagccattccttgacttatgacccaaggataattggcctggtcactttaatttgaagtaaacaatgataattatgtctaaagaattgatcattgatagaaagacagtgctggcaattttatttaaaatctgatcaatttcaatagagcaayaccctgacttttgtgatagcagctaccaaaaacctatgggaagatgcacaatttgaaaatcctcaggaagcaaaaatactataaccagaattaaatgcacagcatataattttcatgaggaatgcctttctgtaaaatgaaggctgttttttttttttttttttgagacrgagtctcactctgtcactcaggctggagtgcagtggcgcagtctctgttcactgcaagctctgcctcccaggttcacgccattctcctgcctcagcctcccgagtagctgggactgcaagcgcccgccaccacgcctggctaatttttttgtctttttcttagtagagacacggtttcaccatgttagccaggatggtcttgatctcctgacctcgtgatccgcccacctcggcctcccaaagtgctggaaaatgaaggttttaacagcagttaccactagctcacccatctgcctacccccaggtctgactttcttcccctcccacaactgagcacaagttaaagaatcagcattcacacttggtcacagttgtgaaagggtcttccaaagcttcatcctcataacaataaataacaactttgctgaggtgggcagatcacctgaggtcaggagttcaagcttagccaacatgatgaaaccccgtctctattaaaaatacaaaaaattagccaggcgtggtggtgggcgcctgtaagcccagctactcaggaggctgaggcaggagaatcgcttgaacctgggaggcggagggttgcagtgagctgagatcgcgccattgcactctagcctgggcaacacgagtgaaactccatctcaaataatwataataataataataataataataataataataataaaactttgtgggggtgcttgtaaggatttaataaatccacaggtaaaaagaacccaacccagtgcctggcacacagtagacactaaataaacagtagttcttcatgatcagtgcttctcaatcttaataaactcatattctctttggtaaacatgtatctgaccctcttccccactcctggagacttatatttagggggaactccctaccaagcccttgctgaaaaatctgcagcaggttactttctcctaaaccatatcctgggaaaatcttgattggttattatgtaacatttagattccaaggtcaccttgtttgggaaatgttgggctaaggtggttttttttgctgaagaacttccaaaatcctataatatgttgagttacactataaacctctgaagtaaatacaatatgcagtgcttctcaaacttctttgtgcttgcagcrcttttggggcgagtatcagactttgtctcaaggaacactcttggaaaactctagttagcggtcccacacctggttgtacattgccttctggggttactatctgagcaaatgcattgtttagaaatgcttcctgggtaattcccacacatccagtccatagatgagcatttaaaggcaactgtcctagattccaggatgcttccagatggcaaatcctacatcggctctataggatttaatttagggrgagaaagctaagaacattttttttttwaaaaacctattcagcttgtgccaggcataccaattgataagtttgaataagatattcattaccatctcaatgtaaatgttgaaagtaagtggcaatattaaactctgttttacttcttaattggaagcttatgaagatgacagattatgtaagtctgatccatattattctacttacttcaaatagacatgatgaattcaaattaaagcaaaacagctcacaactctcttcacaaatgatgaaacatttcaccttagctgttctatagcagcaatttggccctcactactccaataattacatgtaataaattgtgaaggaatgagcaaagcaagtcatttgtgtgaatgtctggggttctttcagaaaggaataaaacttttaaagaaatgtcaagatcaaggcaatgccattactctattaaattattataatttaatatattatgcagttactttatgaggaaaatgcttccttttggctttgtacacaatcctgggaaatgaaactgctggcatttattaacagaaagctttctgagttttgtcattaaatatgatagaaacagcactatttcaaaggtactggactggttctgttattctctctgaagatgaatttggtctaaaatctcactgcttctggggaagtgtatccttcattaaggagcgcacaatcttgtcagcaaacagactttacatcaagggtgcagtctgcatctaaatggaaataactatttgatgaccttgtatgtcaatgtgcatttgcttgttggaacgccagaggtggtgataggggaaggggcctgttgtggcaacgggaaaaagaggaacaacgtggagcatacatttaaaaattaagtcggaaatggggtggggagaaaggtgtgaggttcatgtatttataggaagtccaggacattgccttcttttcaaagcaaggctgggtaactgccttcatgcaagtagagctagagattatttctaaagaatccattaatgaccaggcagattcagagcctagaacataagaggctctagaccataggggctaagatagccggttagcatactggagcaggtattaaactaatggagggtcatgtacactcagggaaaggtgctggatttttcatgtaacagttccagcacagttggatcacccaggctgagccatgagaagcacctggctttgtcccttcatttcacacttgacactttagctcaggttagggatgaagaggaaaggtctgcagggctggacgcccattcagcacatcacactctcagcctccaaccacaagcagcaaaatttaccttgctgcatggttacctgttgaatatgtttttgccaatatcttctaactttgtctaatttgtgtgatcagatgaataaagttatttgcatagatatataccaagtttaatgttaaaayaaaatacaaaagattaatcttatgcttaatgttactcatctccaataaggtggtgtttagcaaccaggcatggatgctaagaagttagtgtgtaaaacaaaaattaacattactttgacacatccaaacgaagtgtttagactttgtcttgttttgggtattccctaacgtctataatcagccccaatgttgatagcttactgaaaacacaaacaacagtaacaagaccacagctacatttgtatagggctcctctgatgggttctgcaagttacctcttcaagtgtgcgtttggggaccaaagaaaaatcacaacaggccttccccttcctctttccttaacatttgactattaagaaaatgacagctggattctttggctgtgtcactaattttggtttgggcagatcataaacctttgtaagtttcagtttctatagagcaagggagaactagattatctttaacgatttctytcgggcttttatatttgataattctatgattttccatacgtgagaaaccactaacaccaaaggcatttggagtgggggaagaagcttagaaagcatagaacatgcacattttaagcaagggtgtgtgtgttgggaaggggtaggaggggcaaagagggaggaaaaggtagcagcagcctgacagggcggcctttccccagtggcctgaactgcacatcccttctctcaccacctggtggagctagcgctctgccgtgcagccatggatcaacmccccccttgtgtttcaaggggttgtaaaatcaatttatgggtggcaaccagaattttaaaaaagaggaggaggaagaaatagagcctaacacaaaataccacagtgcatcacacataatgcaggtgtttttcaaaatttaacttccctgttatatatagcatatatgcatgcgtatatcagggcataatstacagtctttttctttggttcatgataaaaatggtttgaaaaacaccaccttgctcattctccctcaacaggatggtagctctgggaaggtctaggtctttatccatctctttccctcgatctccttctcctcatsccctcccctttccctagggcctctttccgcagatggatctacctacctacctacctgcctgactacctaccctacctacctatccaccctcccaccgtcattgcctccctctggctctcctgcttctctccttctctatctcttcctttctccttattatctgtccacttcatggttttctcacttatcctctatccacctagctctctctcctcctttccttttgtctctccctacatttctgaattgcactatctctgcccaccacctctcctttcttttcctcgtcttacagacatggatgtgagaagacccagcctacctgggagtgcgacaatgagacctctctctgcttcccawgacccaggatggagccccactcccaaaccccctattgcctctctcaacctccctgctagacttcaccacttttctcccttgcagggcctttgttcaaactttattccatcatcaaggaagccatccctgcctgtaaaaatcccaccccttatttaaattatatctcaaatgcccccttctccatgaggcctttcctactctccaactgaggctattttctttgtgctccacttgtgcccacctccacccttattgcagacagatatgtcattctcagaacccagagggcagaggctgggttcaatcacagggtaccagcttcatctccaatctagccacctttggcccaagggaggaactctgggaagttgactgaaatgtggctgtggttcagtcgctcattggggtgcccttccctaaattccccagcctcgattttacccctgctgctcacccctcactgctcctggctgaccctggcctggtcagtgctcccagttcaacctcacacatctctggtcctgctccttcggagcagggaacaccaggttgggagggcagtggctggtggccaaggccaaatctaatagcttccagccaagcctggagggagggagtgtgcagaaggggcatcyaaccttggtggttggtccctaatttgaaaatctagaccttgctgaaaactgatttatttcaggtaattgttgtrggggtgtggcacaagaatgacatagctctgggagaaatgggtagaaatattcatcaaattctaagatccacatggaagctgtttcactatgaattaaaccagccagatgtggcagccaccattggtggtctagggagtgagagaaggggagagagtgctgaagtgggagaccaagccctggaatctaaatcctcacttttaaggaaaggggaggggcgcacactgggcaagtaacgactcctctgggattgtctccttgtctgtacatggagagggttgtacttgatggttgagaggaccctctgagcgctgggagtagagattttatgaaaatgttattgctcagactcacatatgaccctatctccaaaaaaccaaaaaggaagaagttcagatttaacagaaggtgatgagcattttaaacaaaaagctgtccacagcaaagttgcaaatctaataatcagcaagctgaaaacaaattattttcttgaattacaagttgtatgctaggcaaaatgggaagactgcattaacaaaatcattactgtctagggatctactaatggaatatattctcctgtctgagtgctccaggaatgcttataaaatgcaatcaaaataggtctaagtcttgtgtagataagtaaatttcatgattatatagttatttctgtaggaaagagaagtagtgcaaaatggggagagtggagggcaaaacgaagtatcattccacttcagtctccggtttgtgttaaagccaatgtttgcaggtattaaattctacatattaaactgttctttaaagaagttttggtgctggggaatttccccattcaatacctataaagacaaaggtccttgagacagacagatcacagacacacacacacacacacacacacacacacacacacacacagagcaagagagagaactaatcctggttgcaatttttcaaagtgacaccatttagacagatcaatactatctagttaagatatgtattcaccacataacccttggtctaggtgctaattttctagtgacttagctaattaagttagcaaggtcgtgtcaatctcaatccctttctctctcaatctctcaatctcccaatattccttcctcctgctctccctcccataggctctctctggattacaggcagataacctgagctatgcactagaaatgagaggagcatgtttccgttagacaatgcttaattgcaactttggaataatacaaacaattggggttaaaaagcatcctttgattttttttcatattcagaagtgacaatttcggasaagtatttctgaagaataaataagtattaggacaactgcatggtccagccagtaagaagcttccaagaaactccttcatgtagaaattaagttattttgctcttccagatggttcttgtagtgatggggaaaaaatcatacctaatggttttctctgtcttgagacttttacaaacaaaagattaaattatgacttgaatggtattagccataagtctgcaaatagtaattttatcttcagtttgttcatccatgcattcacctaccaaacaaatatttactcaatgtttacttatgtgccaggtacctgattatgcagtgaaagatgttctcccctctaagctgtcccttagagtttacaattcctgcattttctaagttggctaactgccattctatctcttatttactagagattttagaggtgttatgttttcttcattaatcaaaatttgtaggacacaagcagaaagcatacattatgagtacagtaaagacagcccacagatcctgtaggaaattaatatgaagcttgattttcttagatatttccttaaattgcagataattaaaccattaatttatttttggtcaatagctttctaaatgcagtacagttatttgcctttagtgcggaacatattcatgactcagggttactgctaatattaagtatgctatgctgtaacacagtggctgtattgggccctatggtgggatacagaatggtttgcaccaatactgagtagcccttgaccactatgaggtttttttttttttttttttggttctattgcctactgtttttgcagtttgtcttctttagacagctgctggtatcccactactcactcaagttcttgattcttgtttgctgtttctaaatagctgtgggcttacaaactatataatcaagaggtaaagaggttgttagggaggatagaaagatgcttctatgaaaagacaagaacttaatttttgtggcatcttctctggttgttgagaggctagttgttattttctttttctttcttcataatattctaactcgataatatgtgctgggtagctgtgttcttgatagttggatttattcctcgatttacagcatgcgagattctctatggtttaatttgattttttaaaaggatttcttagaactatatattgtaactggtaggtagattttcagctatttagaaaactacaaaactgtttaccatggtttaccagtgatatcatgacagcagaataagaggcatgattatgttagctattttgttacaagtgatcaatttggaaatgtatattcattccccttataaactgattggcaaatgtagggctcccagaaagtgcgtgctgtgatctctaggcttccgtagttagtcaattggctaagaacatggggaaagtgagacttgttgagtaaatcccagagaccataagccagaaaagtaaggtaacacgacttaccgtttgccagtccgatgtcttctcagatatcctgagggagatgggatgatactgagctgggctcagatgatggaatttgggatcaatggtcaaatagttttattgggctcttatcagtgataagcatgaggacatgatatttctacatctggaaatttccagacaaaccaaatggatcgtgttaaaatttatgattaaaaaaacaaaagactgggaacttatatcacatattccagaaagtcaaacagttatttttcccccagagcgtattgcttcaataatctcacaaggtttgcatgccatgggagctacatatattatrttctctttaaactgatgccatctgatgacataccaggaattaataaccaggaggtgaagagagaggagtgactttccaccccttatctggacctattacagsccaggatcattttacacccaattcttgcttgcctcttggtcattcttagcacagggctattctagagctgagatatcgaatatggcagccacttgctacttgtggtctatttaaatctgaatctattaaaattaaataaaattgaaaattcagttcctcagtagcactagccacatttcaagtgttcattagccacacatatctagtgctactgtattggacactgcagatatagaacatttccatcattgcagaaggttccatgggacagtgctattctggagtcttgcctcagggtggctgctacacctgtacacatggcccttctatctccagcaaacctacacaactcagtaaatgcctctgctagcctggcacagcactgctctgcagcagggtcctgagagctctaagactttatgcccatgttcttcttygtgtcttgagattctatktgtattttggaaacacagttatttctattggttggttatgtaacttatcatgccaatttttttgctgatcctttgttaaccatggaacatgctgttttgtatggtgtgggaaaaattcttaaatcaagttggaaacaatgacttgtgaagttttagggctctacaattctacttattccaacaaaacagagtatcggttgatatccttccctccaaactgtcaagaaatgtgaaataaaatgargatggaggaaatatttaggttgatagaaaacttcaatggaattcaaaacctaaagatcacaaggtggaatggttagcctcagatgaattctaacgtcaggatttcccacaagatttaatgaggagaagctacttttatttcttcaaagcctgytattcattctggctgaataaatgaggatgttgaggagagatggggaggagcactgctgaatacttgactttactctccactaggactttcggacaattatggagaaaggggagtgagtaaaaaagaagtctgacagcaactgccttagaaaactgaccagataagattcaccaatcgcctttgatccacttcttgggaaccctgttgtctggtttttacggcctaagtgtgcacctctgagaccctccacaaacctacttgttatggaaatcgtagatctcttgratgttgccaaagatgatatgmtctttattgaggatcccaggggggatctcctccacaccactggtcatttcccacaggtaggtctgtaagacagtaacagtttcatcactggcaagtctggcaggccatataaaatacagacaaaatacacaggtgctcaaacttgtggggcaagactcaaactgtaaatgcrtgcagagtttaaaaagtgacgtgttaagtaaacataagagaaagaaataaaacctgaatatttcattatcctgaactttagcaagaacacaaactccacagtctcttgtcatttattaaatgtgtgtggacttttatgggggtcaggatgcagattttcagacccaatttaagttcactgactgtgtcatggttttattttgaattgaagtgccttacacacttcttgttcctgggtctagctccagtctgagaaaagtttaaactttcttttcaaaagtactttaaactctcatgtaattattgttgactttaggagaaagatttcctcttgttgactttttaattcattactctctgggagaagaccaatagcaccaaattccaattgaggacttgatgctggcaaggatgtcatttttccaatatagctgtgaacggattactggaagactcacctctaagcactcatgcaaatcccttacataagccttctctgtctggagtagttcagccataataaatctagaaggaaacaaatgggcttttacttggatatagatataatgtctctcctccttcaaacttcacttccccaccccagcatgtatgacattcttaaatgtcttatttttctacttcatcaacaggtcttttcctttcttcaaaattccttccctttcctacaagtatcttcctatgatacttgtgatatttcctgaccattggccctgtaaccctttagcaggtttgtgctcagctaggtccatattctctctcccttttccaccccagtcctactattaatacttgtgattctgtggtgatattcatgtgagtacaggcatgtaggactgttcatattctgtctcaccaactaaactagatagcttgaatctcagctttccacatttctcctacagctcccagaatgaagatttctgttcagtagagtttgtagatatataccaaaacagttcttagtatcataataaaccaggtttcaaagccaggaaaagaggtccaacacaccgagatcaggggttagcaatttttctataaagagccagataataaatctctgtgggcaattcggtctctgtcacaaccactcaactttgctgttgtcatgtgaaaggagccatagacaatgtgtaaaaaaaaataagtgtggctgttttccaataaaaacatttatggacactaaaatttgaattttatctaattttcacattataaaatattcttcttttgataattcttccaattatttaaaaatataaaagataatttttagtttatagaccatatgaaatagttggtaggtcaaatttggtctatgtttgctgacctctgacctagattatcctctcagctatttcartactatttccaatgggacttgtttacagcataaacggatgtgtagaaaactgaacgtgcaaccataagcacagtataaattagtaataagtgactgcttctcagtcccccataaagagaagtctgtgttatgcatctttaaagagagggttctcttcctccttgggcctctaaataatacaatgtgcttagacaattgttaaacttacgatacatggcctcrttgtggtatattctatatttttctgttctttgaattgaactctattggtagagtaaaaagtgcataagctttggagtcagacagataggaactgaattacaaccagaggtaggacttgcctctccaggtctcagactccttacttataaaatagctgatcacacagaattgctgcaagtattaaacaagatcacgtaagcaacatgcctagtgcatggtaggtgctcaggaaacattccatgattaaatgagctgtagattgcgatgaaatgaggacagaagggagatcagaaggaacataaactgacggcctttgagaacttgcctttgattttattgccttaagttttctagaattgttcttttgttctcatcygcttcctgcagttttacctgtctttcctcacaatttacctctgctatccccaccccattttattttccacccatcctttaatctcttctggctatttgttgtcacagaaggaaccaaggaggaagatctggccaggtatagtcccctcatccccctcccagatatgggctgaattatgacgcctctgaaattcatatgctgaagtcttaacctccaatacctcagattttggtcttatttggaaacagtatcactgcagtactggagtagagtggcccctggatctaacaactgatgtccttacaaaaggaggaatttttgatacaggcatatattctgggattatgccacgtgagcacggaaacagccatctacaagctatcaaggagagaggcctggaacagaccctcccctcactgccctcagaaggaatcaaccctgctgacaccttgagtttaggcttctagtcccgagagctgggagacaatacatttctgctctttaaacaacccaatttgtggtacttggttacagcagccccaacaaacaaatccactccccatatgaacaagctctgattcacacagcagctttagtttcttcatctccaaggaacctgtggtcctacttcatcttgataaaataaactatatagagcttcttaatcttaggacatactatttttttctagtaattcacaaacagagtgtcaaaatattctttataaagtcctccagaaatctctagatatgtgttactttgtaactccagcataaaggaagcagtgtcaagaaatggtttataagattggtacggttcattgtttaccctgtccaatgctctgtaattcttgattagagtgaaatgttggtagacaactccctaccaaacaaccaaagaagaaaaatgtgttttgcctacctggagtcaggacttttctgaaagtggagctgagatacttagagagcaaagcaggaatctaatgataagttggttccagctcrctaaatgaattctggcccctattcattcttattctgagaaaacagagttcaatttatgaaaacctcagctacttcagattcttgcaaaatgtttgaatctcagcatcctctaytctcttcttgcctattttcctctgcctcatctcctcatgggctattgctgacctaggagtaaacttaggtggcagctttacattctaacatctacaattcactcactggaccaatttccaagcacctctttcttccttttgaaatctgaatacctagagcaagtcaggggaggagggcccatctgatgctggaatgcctcctaaagcatgccttattttcttctggcccagtggtatatccctcaacttcaagtaaagaaattgatgttacagtccttatttgttttgtgattttaaataacgtcctgcccttccctcaaggtttcaatttctatatccaattatattccataagattttcttttcctttcttttttattttgagatggattcttgctctgttgcccaggctggagtgcagtggagcaattttggctcatggcaacctctgcctcctgggttcaagggattttcatacctcagcctcctgagtagctgggattacaggtgcacaccaccatgcccagctaagttttgtattttttttttagcaaagacaggtttttgccatgttggcaaggctggtcttgaactcctggcttcaaggtgatctgcccacctcagccccccaaagttacaggcatgagccactgtgccctgcctgactataagcttttcttgatcaataattatgttatcttcatttttctgctagtcccttgatccatactacagagtataaaatacttcttgttttcaaggagtctacaatctagctagggacatatgcttaagaattggctgaataagtaaaatgggaatcagtacagaagtaaaggagttcataaaaggatgggccaatgacagtgggggctgtagataaaggatttatagaggcataggatatgagctggattttaaagaatcaataggacttacacagagcaaaataaaaccaaacaggaaaaaaaggaagggaaacgaaagggaaaataacaaacagaaaggagagcattctcttttttttttttttttttttttgagacagagtcttgctctgtcagccaggctggagtgcagtggcgtgatctcggctcactgcaacctctgcctcctgggctcaagcaattctcctgcctcagcctcccaggtagctgggattacaggcgtgtgctaccatgcccggctaatttttgtatttttagtagagacggggtttcaccatgttggccaggccggtctcgaactcctgacctcaggtaatccaaccgcctcggcctcccaaagtgctgggattacagacgtgagccaccacacgcggccagcagagtattctcaattatatacaatttattcttagacctgagaggagtcagtgaaaatgatctgactgaagggtgtgatctgaactagaaagtattttgaagtaaaattgacttagatgaggacaaacgatagcagtaccttgagttttatcattattccaggggtagtagcaaaccatttacaatttgaagctggtgagagacataatggaaagaaatcaaagaatgctgaagagtcaaagctagattaaattctggcttcattgctcaccatctgtgtggtttggggaaaattacttgacttttctaagwcttattatatgtaaaatgggaataatcatagctgcctgaaagaagcgatagaaagatacaaagagaaaatgtgtgtaaaggcactttatgtaatgtttaggacayaaaaagtgtaggtgctggtggcaggaagagtattgatattagcaataataaaatgtactccagaaaggtaaacctggcatcactgtgcaggtgaattgggcagggaccagcagcaggaaagctatgggaagtttttgcaaataatccagacaaaactagaaggttagtgacactattgatgggaattagaaaatcagaagggagaggctgggcgtggtggctcatgcctataatcccagcactttgggaggctgaggcgggcagatcacttgaggtcaggagtccgagaccagcctggccaacatggtgaaaccccgtttctattaaaaatacaaaaattagctaggcatggtggcgcacacctgtaatcccagctactcgggaggctgaggcaggagaattgcttgaatccaggaggcggaggttgcagtgagctgagatcatgccactgcattccagcctgggtgacaccgtgaggctctgtcccaaaaaataaaaaacttaaaaaaaaaatcagaaggcagaataaaatttggaggagaagaaaaaatatttgatttgttccaagttgagttttgacattgtgaagtaaaatgtgatgatctatgaggaagggtttgtctaggaagttactgaaatgtaaagagaattcaggtgaaggacagactggagagacttcaaagccttcagagggaacccatattctcaatgcaaacattatgtctgtccatcccaatccctgtaggtggccatgagaacatattaagctatccaaagggacaagtagcggtgaaagcccagcatagtcacggggagccagctagctgggcggaagccaacacgtactctttcttccgggctgacttccgcttctcttcattgacttcgtggttggcgtcccgcagcttgacctcccgatccgaaaggcttgctgggataatatccagctccaggtccttattatcctgcacatggagggatcacaaaggtcaccttgtgatgctttgggaaagcaactcactggagttgagggaggtggtaaaagggggaaaaaaagatataatggagaaggataaaaacatgagggatcttacagactcatacccataagcactcttcttcatggtatcattattgttttttcaaataagagagaaataaaatgttcaggtcaaatgtttagggtaaatatccatagtaagaaaaaacaatgaacatatttgataattatgtgtctatttccccaaggcctttggtcctaattaaatctaaacacacccgtaaattagtctaagactgattcttaaccatttaaaatagatgtgaaacaaaaacacataaagatataaaaacatctttcatttgtcaaaagaaaataatcaaatcaaatatatttatttaaacaagaaatttcccttggaaacagaaagctaaataacagagcaatgactgaactttctcattgctcatccctgctaattttaaccaccatttggtatttatatatgatggaacttcctagataaaaactcacagattaaagcctgggggagacattaactctctcaactttaggtagtttggccacttcactctccaggctgctctgcttcagatcatgagcctatttgaagatttaagaattagacatcctaggattaaattgccaggctgtattaagctcttaattcacaggttactaacccctattataaagaagagattaaaagtccatcttccctggttcatggcaaattgtacctctgttcggttgaaatgtcaaataacccttgtacaaattgcaccccttattcttgaaagagtactattatatatactggggactctaatcatttgctgattaacataattgggtggaagatggtacttatgaagccaagataaagcttttggttctcaaagtcaacagttaactctatacagagaaaaactctgttctgtagccataggccccactactggccagtcgattttgtaatgtatagagtactaatcacaggggactgaaggttaatggatcagcaagatccacccagcactccccactagaaaagccacacaagkcaagcgctctaggagtcaatagctcagaagaactgctctggaaacatgcttttcttccatggcgatgagggcagtggtgctcagggagatgagaagggaggatgtcccagaggacaatacccctgcctacctctgtgttgactcctagsgctttctccagtgagtatcggtactttcccatcctcagggagaaatctctgtagtgcttgtccaccgtggtcacccatttccttatctccgtggcatgaatgtggcctttttccacaaagctatcrgccagctgaatcagaagcttcaccttctcctttgtttgctgccccaaaagatggccttaagttactggattacatttattctcctgccccttcaccccaaatcctctcttcctgtttagagcagccatagatacctcatagctgactacctgggtatgtatcccagctttgttactactaactgggagatctcgagcaagttattgaaaccctctgtgcctccatttcttcatctgcaaaaaggaaatcataatattacagtcatccctcagtgctggggtggggggaacttgttccagggccccccatggataccaaaatccagatatgcaagttccttatataacatggtgtggtttttgcttacaacttacccacatcctcaggaacacttcaaatcatctctaaattacttacaatacctaatacaatgtaaatactaagtaaatagttgttattccgtatggcttagggaatgatgacaagaacaaaaaaagtctgtatatgttcagtacaggcacaaccatccatttgaaaaaaaaaacattttcagttcacggttggttgaatccatggatgcgacacctgtagatacggagggctgatcctacttcagagggctggtgtattaaatgagttgacaaatgtagaatgcttagtacagtggaagacagtaagaactcagtaagccataaacattaaccattattattactgatgtaagaatctcttacattaatatgcttttaatttacatagtgtgttactgtatctgaaagccatttgagtttagatgcatccttaggaagtaggtggagggaagtgatgcaggtctctttgaaccacagatgaaaaaaatctgaggcttagagaggcttagggctggtccaacttcatactaccagtgagcaaacagagcctatttgtctctgccctttagttcctagtttccctctccactgtaccagctctaaacctcatataagttggcacatgccaggatctaaataaatacaatgagcagatttaagagttaactctgtccctgtcaccaccagaatcttgtctttagtttccattagagagcaggagaaagaggttaataaagccatcatctattataggactaggtaaagtagaactctgatgtttactggattaatttcatttttagcaagagtttgttcaatacctacttggtccgtagtactgtgtaaagagctatagtttagggcttgggggtcaaacaaaaggaaaaaaatcttcatttcacacagagtaggtaaataactcagggcattatgtaattgaatgtcaaaatgggagaatgtagagttaacactataggaattttaaaaggagaaaatgaaggcggacaggcatgggtaggggaggtctcacggagaagcagtacttaagctgggtaagtcatgggaatgagagagacacccaacaagcagactgctgcttattttttaatcctaagtttggattttcaaactctgaaattgctcagggaaaggaaagaacatttaaatactattctaagaagaaaaattatcttttggactggaggaaagtgggtccaaggtttaaaccatgctacaatctagatatcagggaaactgaggcaaaacatcactggagcaacagcagaaaaaacaacagagcccttctttctttattctactatcctcaccccatctgctccttccaggcctatctacagcccctcccawswgagatcaaccctcccaagaaatgctggagaaagagggcgtcagagaggagagttgagagtgctctgcctgcygcacacatggccagggaccagggaccagggatccagctctccagtagctcactcggcacatggagcctctcctatctcaggacagtaggctggtgcctggcactggaagataaagggcaagagctttggtgtgaaggaaaggaggtaggtgtgaggatagccgaaacatctcctcagccatgaaaaggcagagtaataacagggagaattggttaagatagaattagcagattctattcaaaatagaatctacttgattctatctaaactagaattattgaacccctttttaatcatcttattcatttatatatctccagtgtctaagcatcctgaggactttcatcttattgcatgtagggtgttttttatttttatttttcctgaaaacaattttctttggttttctatttacttaaaacagagaccatgtgtttatggaaaagtcttggaaatacatattctctgctcttggtaaagtgactccacctataagaaagggttttacagccagctggtggcagcagccatactagggcagctctaccagagaaaattatatcttaaaacatcaaaattgtgattcggagtcagcaaagcaaatagtttgtgaccaagagtattctaggtatgtgtggggactagaggagcaaagagacagtaaaatgagtttagatgcatccttaggaagtaggtagagggaagtgtagacacgcccttccccmtgcggctccacctacctttgtagcagccctgtctccactgctcttcattccctacactgcagccatgttgaatgttgcatgcctctcctgctgtgatgagtggttcctactcattcccactctcaattgaatgccctttttcctctcctctcctccccaaaaaacaagtgggcaatgccttcccagtgttcccacagtatcacatacatgcttctattttagcatacatcacattatttataagtctccttcattagaccatgaaccctaaaaggtaagtattatatcttattcatttgtatatctccagtgtctagaaaatagtaagcataccatcaatgttgactgaatgaatgaatgagcaaatcttgtgtttggaggtgagtaaagctagaccagcaagagttgaagatttttattgggaagaagtagatgataaatttggcccatgaattggataagtgcacttagacatcaaccatggccatggtccccactgggagtattctgaaatggtttcttatacataggtgattgtggtggcaccacatgacctgccaaatgcctggtcacagcttttgagatcagaggtaaaaacttgtcttatgagggcagcccatcaagatgcagccagtgacttctgaggtgtcctggcctaaaagctgtgtctaaataggggactagaaataagctgggtcaattggggttgtttccctgaggatttaaackgtacagacagggatctgggtgattgcttgcagagtagaagtgaaatcacagaaagcagagaggaagaagaaaaaggaagctgtggtatagaaatggtagaacattatacagattctggtcttccactctcagatgatgaccagatgacgtggctgcttgagacacccttggtcttgggtgacattccagttttcatctccagaggtgacactatgccacatttcttgttcttcccatggggctgagtcactgagctttttctgggtttctgggaggttcagacacatcgcttctatcttctttatttccacacrtggccatacatatcttttctcgttcaacctaagcccacttgaaactcaaatctttcctccaaagacagtaacttatagaaactaataaaatggggtcagactgcagcagttcttgaatgaaaagttcagaagtatggacatgatcttgtggccaaaagggaaactttgggtaccataattcatctgggcctggaaatctagacctgagagctcacttatcttgggcttcatgtgtcccctaatttatgtyttgcctctccattttgaattctagttatctgctggaaaagacagaggttcaaaagaggggttcagtaattctattttttttctatccctccctctctctttccctccccactctctcttttcctccttccctttctttctatctttggttatgatcttcctctaatcagtgagcctcactctgagtaaatttttttaaagcccttttgactttagcacattttacaagactttaagattttgtcttcttgatagtaatcttataatctcataattttctatatttgcctttcattattgatattccttataatgagataataataaggaatattgatattccttatcaatttttttttgtagacacaaatttactgagctccttgtgcaggtgaataggtttcttgaaatacatcttctgattcattcagcaggggattgtttgttattatacataaaagaaccaaaattttcaaaactttccatcacatatgaactatattcctcttcagagtctcagaaagaccaggcgcggtggctcatgtctgtaatcccagcactttgggaggcaaaggcaggtggatcacctaaggtcaggagttcaagaccagcctggccaacatggtgaaaccctgtctctactaaaaatacaaaaatcagccagacctggtggcaagcacctgtaatcgcagctacatgggatgctgaggcaggagaatcacttgaacccaggaggtgaaggttgcagtgagctgaggtcacatgactgcactccagcctgggcaacaagagtgaaactccatctcaaaaaaaaaaaaaaaagagtctcagaaatagcatcacgcctatcttttatctgaactgtttagattctacctctctcggtctaaagtaccatctgacaaccccagtgttccctttccttgctatctgaatctcaggaaatcatagtttagttcagctaaggctccagttgctttcattactacttaattttcttttgtcaagatgaattaagtccagtttatctcaaggcttctttcattttcagagatgaaattaccagcttaaaaaagtattttcttaacattattagtcattggcaaatgcaaatcaaaacccacaatgaataccactccacaccctctaggatggctatataaaaagacacagtaacaagtgttggtgaggatgtggagaaactggaaccctcacaaactgctggtgagagtacaaaatggtatacctactttgaaaaacagtttagcagttcctcaaaaagttaaacatagtagaamtccatataacccaaccattccactcccaggtatgcacataagggaactgaaacatctgttcacgccaaaacttgaatataaaggtttatagcagcattattcatgacagccaaaagccagaaacaacccaaatgtccatcaactgatgaatagtaaacaaaaagtggtatatcaatgaaatggcatgctatttagcaataataggacaaaaggattgatacatgcgaatagcatggatgaatcctgaaagcattaggctaggggaagtaagccagtcacagaagatctcatattgtatgattccatttatatgaaatgcccaaacaggcaaacccatagagactgaaagcagatgagtagttgccaggggttgaggagagtagggaatgcagagtgactgctaatgggcatgaggtttctttctagggtaatgaaaatgttctggaatgaaacagtggcaatgtttgcacaactttgtgaatatagtaaaaaccatggaatttgtaaaaaatgaaaaacaagataatctttaaaaagttttacttttagaagaaatggagttctttcaaatgtcatgatgactaagcttccccatctccgtgtgccttgaccccttatacattttgaaacccataataggaaaataccatttctatacttttaatggactgtctataggcctaccacaacatgaaaatgatgttttccttttttcctcattcaaactttttatttcatttttattcttgtatttgtgagcttttacatagaaagtatctttctatatccaatggttcttctacttggtctgttcctttggaccacagtattattaaattcaatgtactccactgccctattcaaccataagggccactgtatgtattctcttgtggctaaaggtcaatttggtttccatttcaaattcattttattggttataaagattataatcaaagacagctgattagaagaggtttacctctggaaagtgggattagggtggggcaggaggctgctgcctctaatcagaagctcctcaactgggtttgttatcctgtagatattctaatatgaataaccatgagatttggaacatgatagttacatcaggagggacagagaacatagacagccaaagtagaagattcatattaaatataaatgaggagggggtgaatctactcaaacttccttttttccttatggtcttgaatggttgtagcctcctttgaatgtgtaaaatgcagttaggtaacctagggaactcaaaatgaatagtgtggttcttgtctttaagtatcctgtcggcttatataggcaataacattgcatagattactggaggagagatggtctgtgccaggtgaagggttatacggacaagggccgtagtgcagggatgagctggatcatatcctggtatgtgggaaggatcatagaggaggaggctctagagtggaaaggaggggctcctcttaaaaagcacaaactagagggaagggaagggtattccaggcagagaaatgtatgaaaaaaggcacatagacaaaaaagaatatgatgtatctctcagaggctcagagaatacatccattcagctggagcataaagcctgcataaaataataattgaaaataaaactggggaggtagggtagcacagctgtagagttgtggagcattatcctaaaggcattggaaaatcattaaagttcttgatctgggtggttatgtgaccaaagtagcrttttaaagatgaatagcaataaaggacagggtggattggaaggaaggaaagaccaaaggcatgcaatcaaattaggaagctactacagctcagggtagtagctatgtgaatgaaaaagaggagaaatatatgaagacagttacaaaggtaggatgaataagattgactgaacaattcttcacatttccactttgattatggaaagattttgatcctatgamgttctgggtatctgctgtgatccaccctatgcagacaggaacaccaatggatctcawactattcagcctgttaatggctcattataagccctatttggagaagggcggataaagccaacttgttaattcacagccattttaatttggatttgaatagggttctgtgcatctgccaccttctttgtgctgtttgcttttactggtattgaaatgagtctcttatctgtgctcatagctttttgcattagacaaaaaggcccaaaattcacaaggatgcagggagaggctccccaatattgagagttcataggaaaagattcatagagtggatagccacttctgaaatatcagctcaggaatgaggctaagggcctaatttgtcacaccaaaccagaggaacattccttatagtgtcagagggatctccggataggatgtttcccaccttgaccccaayaagarcatctcttaacctgggaagagcatatgttttgtgtggaartgatgccaaaaaagcctcctgtgtggcaaggagccccgtgtgagagatgaggacgttacaaagaggaacttgagacagatcagattttcattcaaacccaagcatcctcagatcaaatcctggctgtgaaaacagatgaaaatcaggtttccttctattatagcatttcccacaatcttggtatgaattggtatgtacatccttgcacattttgctccccagagacccagcctagcctagctcatgagcgggtttgaggccagatggaaatagctcagaaaaggagaaattcacctgttttgtgtacccatatatagtcactagcccttctaataaggtggacttcccaaaccactcaaagtgcaagaatatgtggatatctgcagtgttcacatgcacatgtgacatttttacatgaatacacccttttccctgatttggtctgaaagaatacagcagattccagaacctgragcatgaagatgagtatctggaagcacagtatatagcaattgacttcctgcatacagctgctctacccagcagctgcaattctttgggtattcaggtttctaaagagacaatcctttaggacatttacatgcttccccccttgccactgtagccaggtatttttgcttacagaagctgtctttgcttccataatgtgaaattggccagaatggagagttctgggtggatctgggggaggctctgggatgtttcctaccttggcaggcaccctgaattccccatattctttcagcagttcctgagtctcctctgtggtctctccagtggaggtatgtgttgagaggtaaaattcacctgtttcttggatccagtcaagcgcctawgggaggaaacaactcatccagtccccaaaaaggcagctgtcagtaggaaaacatgccatactacaatgaaggttattgttgggacaacttaatggacccaggaaacactgacaatttgattggtatgtagctctggagtttttttttatgaatgagccctcccttgctttggaacatttaccagcaaagagagggtctcccccagtagactgaggactcttctaggccaggcctaatatcatccacgaattaggggcatagtgggtgacctagcatttcctcacatctcctggtaccaaactcaaaacatagagcttggtaaatgctgaactgctgacaggtgacaacctgctttctttcttctttattccccactcccatccccaatytgctgctgtggccctcttctggactaagccttggtgatgggcctctgtatgctccccagaactgagatagtgccagggaaagctttggacaacctgcttagcgctgcgctcgaacaccacatattgctggcattggtctaaccgccgcttcttcaaggtccagaaatgcagcacgcgattctccctctgcaggagctcactcaggatggctgtgggcagaggagatgcatgatggtcacaaggggctctgagcaaatccaaccaaccccttcagccccacggcccaggtgccaggtgaccatgactgtgatttcaagcatccccatgagactaatccagcatcagaagaaagggagcaaaagctggatacagaaaggatttcctagaaacgagcaaggtcgaggagtctagggggagagcccattgatgagagttccatcaactaaggtgggaagaatataacaccagtgacttacaaatgaccccgattctctttatagcaaaattagtccttggttctaagaaatcttaagaagcaactaattcaattggcccccagagtctaatgagcrtgggtggaccttgacaggaatctcagtcattcttaaggactcattagaagagaggcaggagatttatagtggaatgagggctggtatcactggcttgacaacccacatcatgagcaatgttcttggacctgcacaagaggttgtgcacacagcactttaacggcacagcctctaaacacttctaaatagtggtcatagggaagctgtgttggaattatgtcttcctgttgtctctgggcccatgttgttttggatgtgatcataagaaaagctaaaagtggtgttaaatgagtgtatatacaaggcatatagcaaagcaagtgggccatggttaggtattcagtccatgctatttccctctctaaattttctgttgtttcaggaatagctgggtacgtggatagatgtcttaagcgttttaaatagtatgttctatgctggaagcaatcaaatttattttattatgtcttcttcctgcttcctgttgcyatattagatattaacaaaatatacaataataaccatatgaatatcacatactcagtatgtggaagacactcatttttataataccccataatgcatgcaccattattatctccattatacagatgagaaaactgaggtttagagaaagcttttgagaaagcgtagggaaggtaactagctcagggttgttcagataggaaagggcagagttcagattcgggccaaatctgacttcagagcctgagttgttagtcaccttggtctcccatattactaagactataaagtacaactttctatgctttacgaagatggtacaacccaaagtgaagtgcttgcactgagaagtttttgttgattttatgtacttttcatactccttcattctcacctccccagccaagtttggctttctgaggacagaatctgtttttcatcttttaggctaagtgcttttttttctttmtctctctttctttctttctttttcttgttcttttttttttttttttgacagggtcttgctctgtcacccaagatggagtgcagtcatagctcattgcagcctcaacctcccaggctcaagtgatcctcccacttcagccacctgagtagctgagactataggcacacgccaccacacccagtcaatttgtaaacatttttttttttttgtagagatgggggtctcactatgttgcccaggctggtctcaaacttctgagctcaagtgatcctccttcctcggtctcccaaagtgctaggattacaggcgcgagccaccgtgctcagccttttttgggtccaatcattcacccttccctgtatctaagcctttatcatgtaactttttcattccttcccaaagaggcaagtacagttgctcactccccaactgatctctggcttagctacataacttgctttagcaaatgagttgttaacagataaaacacaagcagggccttgaaatgtacttgcagacttgactttgctccttgtacctctgctatcaccactataggaaattctcctgggtaactgctgccccttcgacccaggtcccagaataaatacacgtggagcaaacaagctcttacctggagtgaaggagccaagctagctagacttgcagactgaagcacaactgcactgctgagcccagttgagatgctgctcctcagccaatgcacagccacttcaacaacatatgtttacagttggatatcattgaatttcttggttgttatgcagccatataacaaccagcagcataaaaaagccaaaaatatatggcactggctttgagtctaggtagtaggtgaaaaggaaactgatatataagggattgtaggtccctgctcaggtggaagcttcaattgggcaaggaaggagtagaaacccatttcttttagtctttatgttccctagccagagttttgctcattgaagctccctccctctatggtgtgactgagggaatcaacccagatctggcagaaatcataaagagtttcaggattattttcccccctcttcctgaaagcttttacatgggcaacaacttggtcttgcctccaagaagatgtaggcatttcccactgtctctgggtgcctgttattcttcagcacgcagaggtgtaggtgggatatgtggtctctcagtaggcagctggcctcacccaagctcccatctacatttggaagccagaacatatgctttcaaatgtgctggaagaagtgacataataccagctccccacaggtcccctgaccacaaatagaatagcacatttggaagagaaactctgctccctcctctctgtagggaactttgattccattctttccagtggtctctgttctctccaactcttgagctatctgagcaaagagggaagctcttcttaagcagaccaygcaccctaccctgtccatggtgtctccaagcccataccccactcctcactccaagtcggcttgggttccrttcctagcctcggactccagagttatatttctctgccttggcaagatgacatttgttaaactcttcactcactcaaaggctaatttctgcatggtcagaataattccacagataatgatttaagtttcacatggtcagataataggcaatttttaaaagttatatatttattatcatagactttctagaattcggagatattaaagattatgtagaatagcacttatctaaattttatgaacacacaaattacctggttggtagaattgggcagttttgccaaaatgcaggttctttgttctttttttcttttttttcttttcttttttctttttttgagacagcgtctcactctattgcccaggctggagtacaatggtgcaaacatggctcactgcagcctccagctcttgggctcaaatgagccttccatctcggcctcctgaataactagagctataggcacgccaccataccaggctaattttttaattttttgtagagatggggtctcaatatgttgcccaggctggtcttgaactcctggcctcaagcaaccctcccatctcagcctcccaaagtgccaaaatgcagtttctgactcagtcggtttggrtgtggcctgagattctatatttcatacactctcctagggatgtcattgtggctggtctgggaactacaatttgaggagcaagagtctagatgmtcccctcattttaaataagaaactaaagttttaaaaggcttaatcaatcagtgacaaatccagggtcagcatttggttttaggattctcagtccacattctgttcctaggctataagacaccctagtcttgtgctgttcaatatattaaccaggaatcaaaatcagtaatttacatttaaattagttaatattaaatacaagttaaaatttagttccttagttgcactagctcagtagctgctgtattgcacagcgtagatacaggcaatttccattatttcagaaaattccactaggcagtgctgtccagactctaagataaatgaaaatacttggggaaattttatccttgtttttgccttccagatcttgatgcgtgtttaaaaattgaccatgaatcattactgcccacaccatcccacatcatacattttcatttctaaggagaagcagcaggaaatttgagattgtgtgaaaactgggtacatggtatatttcagggaggggctgtygctgaagtgactggtggctgggcaggtctctcactgacctttcacttgttgctcgggtccccgagtgtggctggcgacactgggcatgctgacgttgttcctgtggatgtacttgagaaacacctcagcattccgccgagccagggtgcaggcctgcgaaagacaaagctgtgaggcccctgtcccagcaggtgtatggaatccaagacaatggagaaggcataccctccttccttccatattttcttttgcttttttttttttcttttttgagacagagtctcactctgttgcctaggctgcagtgcagtggcatgatcatagctcaccgcagtctccacctcccaggctcaagcagtccttccatctcagcctcctgagtagctgggactacaggtgcccaccgccacacctaggtaactttgtgcattttttgtaaacatgaggtctcactatgttgcccaggctggtctcaaactactgggctcaagcaatctgcccaccttggcctcccaaagtgctaggattacaggcatgagccatggcacctggctcctccttatactttttaggaggctcaagaactctgaaggaatctagaaggagcagagctctggaagtcaccactggttcatggagactccaattccaatttatggagctcacccttctgagctttccttttttcaagtgaagaattactccttgtgtctctgcccattccatctcagataaaaatcagaaatgagccacctctcgtctccttctatgttgatcaggcattactaacattcactctcagcctacttttcctcagccaccagaatgcctcttacgtgaccactggtgtaagctcaggaaacataaacccacttgaaaatcagtgtgacttagacttgagcaagtaaatttggtaaacacatctattaaccctacattccaaatctaaatggaaattacaaacatttttcagacttatttgcccatgaagtccccctcatctaaatatcactaataagcattctattgttgaagaatgccagtctacataaaggactaacagctgttatattacctaccccctttacgactcatattagctgtgggtggcagagagagggctgatcacattctccttgctgtgctgatggacaagactggtgcccagaaagggcaggagccaggaagcaacacagatctaggatctaggatgactgacagtatttcttgttcctctcaagcctagtactttctgtatttctctacaaagcaggttttttttctggttgtaaagtaataaatactagcatactaatttttaatccatagttttcagaattaaattatctctagataaactgaaattttatttcatttttctttgaaatttttttcttctacacaccctgaaatgtaaaattttagaatcttatactttccctctgatcctacaaataatataattaaaaattattatataattaatagaaacaattataaaattttataattttctggttatataaaaaaattagcaacaaaggcatctggaatatctggtacacaaacgcctgctggtgtgtccatgaacacagaggctcctgaataaaacagcttgatggtggtctcagcttaaggagtttcaagtggatcaactaatgaatataaataaagagctcaatattctatttactgggcatatcattcccacagtgacagggagcttctcactatggtttcagggacatatggaaaacatcagaccagagggttttctatttctttcttcaatagaaacattttcttttaattttatgaagaaatatatttacacttctgtttgagatttttatatgctctacttaaattgttccattttaaaatttgctttgtaatagggaaaactttaaaaaatcatcataagctctgcacagaagaatttctatttagtcttactagtaagagctgattactagaggttctgacccatataggtgcggataccagatagataggaggagggcagggagaggccagcttaaaaaaaataaaaattaagctcaaggtggtagtcaagtagagaaaatccctaataaaagaaaggcagttaattacagaattgaataaaatcaatggcaacatgtcagggtataaaaattgtctcttctattcccagaaacctgagaggaagcagaacatgaaagcaagaaatctgagagcaaatgcagcctttagatgagcttgaacacagaagagaggcgatcagaggagaagatcaaaggctggggaaggaggctcacaaggacttcccacaccagctgacagtctgtgcagagcaggcctgtgcttcctccctcagaaggcagggctctagcagaatattaggaataaggcatttctctcttaatacagaagaatgaacagtgtcatgtgtgttggtaattggtaattgctagattgataaataaatagggcatccaaattcatttctttaattcttaccctaatttttgcatcttccatttataaaatattttaatcatgttttatatctaagcttatatgtttttgatattactatcaaaaaataatttaattagccaaacacaactgaatgaaagcatgtctttttctcagttaacaacatccacgggatactgggatatctgaagattgcagtagtagtaacagtgtatcctgatcgcctaactatacaaaaagtgcaagagagaaataaatgttggaaatgtaacctttcaccctttgaaattaaccagtcaacatcttcattacattcccttacccctttagggaagaggttagaaaaaaagaggggctgggaagcatgtttgaagctgcgtgtgtgtgtgtgtgtgtgtgtgtgtgtgtgtgtgwrwgagagagagagaaggagaagaaggaggaggaggagaaagagaaagagagagaaagagaaagagagagaaagagaaagaaagaaaagagaaagagaaagaggatgaaagaacaaggcggccaaggccaggagtctgagcccttgcatgacaatgtgctctgaccttaagaaaggcctccttttgttccaaatgtttgctgatgaggggaatgacatggtcgatctctgctgctggccccagyttatctcgtccaccacaccagtcctcatctctccggtattcttgctctaagctctccaggacactacacacctagtgaatcatggaagaaaagactcagtaaattaattattcaggaattattctctgaggaccttcagcctatagaagcctacacatatgacatttttcattagaagtttaatgcctctgagacatctaagagaaatccaggaggcagtgacagtcctgtgtctgaaacctgggagacatgatgactggagatacagattttggaatcatctttttatgggagttgatgacattacctaggaatagtaggtaaagtaagaaagtaagacagtctagtatctttggagtttcagtgtttttacacattatattgttataatctcacaataactataaattaggtagaacaggaaatgaggtttggagaagatacttgacttatccgaccatctgtacttgtcccatagtaaggagcctcaagcagagacaaaggaggaagttgcctatgttgtatggtttacaggccataaatgaatgtcatctttttcctcccctggggaaaaatgtctcaaaaatcccaccataggacatgacatctccagaacctctattacaaaatacacatttcctgtagaggggtaacaaatttgggttaacctgaaagacagttaagaagctttttagttctaaagatgctgagaggtcatgctaagtgaccttataaatgaactcagaagagagcaaaagcattttgaagggagtttggagggaaattcagcctgggtcccatagtggaaaaaccaaggcagcctagtatcagggcctggaggaggatgcagaaaattgaaactcatatacctatacagccatccttccaaatctgtgggttctacatccatgattcaaccaactatggattgaaaatacttagttaaaaagtatagcaataaaaaataatacaaataaaaacaatagcatataacaactatttactataatacttaggtattataagtaatccagagatgatttaaattacatgggagaatgtacatatctgtgaggggtcctggaacaaataccccatggatactggatttccttcagtagactttgggaatgattggatttccttcaatagactttgattacttgtttggatayggcagtagggaagaactgctatgactatctttggccttctctgagaaagtcttttgatgaaaaacgtcttttttttttttttttttttttttttgagacggaatctagctttttcacccaggctggagtgcagtggtgcaatcttggctcaatgcaacctctgcctcccaggttcaagggattctcctgcctcaggctcctgagtagctgggattacagtcgctcaccaccacatccagctaatttttgtatttttagtagagacagggtttcaccatgtttgtcaggctggttttgaacccctgacctcaagtgatccacctgccttggcctcccaaagtgctgggattataggcgtgagcctccgtgcccagccagatgaaagatgtctttggatagggcattcattgagttatgaactgaactgaaagatgtgctgaaagctgtcccaggaagaacgctctcatagccagacatgcttctcatgtcatgagaagatctgtcaccaaacttgaggtgacttctctagtcccatctctagcatcacatgagaagatctgtcaccaatcttgaggtgacttctctagtcccatctctagcatcacatgagaagatctgtcaccaatcttgaggtgacttcyctagtcccatctctagcatcacatgagaagatctgtcaccaatcttgaggtgacttccctagtcccatctctagcatcacatgagaagatctgtcaccaatcttgaggtgacttctctagtcccatctctagcatcacatgagaagatctgtcaccaaacttgaggtgacttctccagtcccatctctagcatcacatgagaagatctgtcaccaaacttgaggtgacttccctagtcccatctctagcatcacatgagaagatctgtcaccaaacttgaggtgacttccctagtcccatctctagcatcacatgagaagatctgtcaccaaacttgaggtgacttctccagtcccatctctagcatcacatgagaagatctgtcaccaaacttgaggtgacttctcyagtcccatctctagcatcacatgagaagatctgtcaccaaacttgaggtgacttctccagtcccatctctagcatcacrtgagaagatctgtcatcaaacttgaggtgacttctccagtcccatctctagcatcacatgagaagatctgtcatcaaacttgaggtgacttctccagtcccatctctagcatcacatgagaagatctgtcaccaaacttgaggtgacttctccagtcccatctctagcatcacatgagaagatctgtcatcaaacttgaggtgacttctctagtcccatctctagcatcacacctttctttctgcaaggcctgaaacgtgcaggcagctcatgttttgagataaaacagcttaaagacatgtaaaaactttaagaaaaagagtacttgagatctgtcccatgataggactgaacttagaagcaaacaatttgggattagaagaaatgagaaatactttaacaagacaggaaacagaaatccagaggggtaaagtaaccttcggcaaggtcacttcagggtaaaatttcttgactcttactccagtgtccttcaccatcttgatccatctcaaattaacatttgtgtataatattagacaggaattaagcctcatttgtttccatatggatattcagttgtccagcatcctttgctgaaaagactttccttcactcattgaatttttttgtcaaaaatcaactgactgtatatatgtggatctatttctataaccactattctgtctcattgtgtttattcttataccaratacgattctgtcttgatccctgctgctttagaataagtccttaaatcaggcagtgtgacttgtccaagtttgttcttccttttcaaaatcgttttggctcttctagtttctttgcatttgtattctttgcatttgcattttatttccatatagatcttagaatcaatgtattaatttctacaaaaaaaaagcttgctgggatttgattgagactgtgttgaatctagggatcaactggggaagctctctatcatcttagtctgcagctcctcacttctgtggccatcaaaggagtcattcctctgaagcaacagaaaggactgaaagaaggggtggagactctcaccctggctgcagggccctctgatgcgcatgtcatatttgctccaaggaagactttccgatggtccctgtaagtcatccaaggagaatgattctctgatttatttctaccagggaacaattcagagaaggaaacyactatacactgagtaaaattactcctgttttaaacctgtttcataaaaagaattccctaacagcacccaaatcattttaaaaatcctcttagccctgtgcatattgctgtacagatgaaagggtaacacactgcatcgttatggccctactgtccagctcctgccttttctcccacagcagcatcatcttatctggtgtgtttctagttccstaatgacagagagctgtgtttcctccattagactgggggcccaaggaatgaaagaaccatgtgtttttcaagtagtgcataatgcctaactgtggtagatttaattattgttcagcaactattcattctcctctcccaaccttcataggaggcattgctgcctcactaatgttggcttggccatgtgacttattttagccaatgagatgaaagagaatatgacacaagcaaagacttgaaatgcacttgtatggtagattttggactcttgcattcctgcctttaactataaatgtgcctgagatggcttcaggtcaaggaggacaagagacatgggaacagatctagacccagtctgcagctcgaagcctagttctaccaagttcagccaaaatcaactgaacctaagacacttaagaaaaaaataaatgtttattgttttatgtcactgagttttggattgttttgttacacagcactatggtggtaacagctgactaatatactgcccaaatctagcatttagtatacacccaatttctatttcaacacctccctatagatctggtgagtttcagaaatttatgagacaaaccccatagtccagtgctcaaatggaaaggatgataagaaagtcaactgtggtgtttccacaaactattcttcaaatgttagtactgaaaggacaggcttctcgctgacataagcactrcacatttacactgcaaggcagaaaatggccccctggcaatctcagccccasaagccccacagtcttttccctcacctgttcagaagttttgtaaaaggccacagaggcattgaccaattttagccggtcttccatcttcagcatgagctgctgccagtggagggccaccttctcagcacattcccggatggcatcggcatcgtagtggccggcctggagcagcacctcggctttctgctgtacctgcagggcactctggtgcgtcttctgcaaggaagtggcatgaaagagggactgggcacaaggagaggagagaaaggtccgtgggaacaacccaggcgtggtatgggagggggtggagtgaggcgtgagtgaaaagatgcagagaagttaaagagctttaaatgactgatccattttgtcatgaccattaatacattattatttttaaagcatatttaaaaraagaatatcatacatttttattagctaatctctcacgaccctaactcctgtccccacttctttctttttccttgcagcactctagattttaaggacatttcagtttctgtagcagagaaacagaagttatgtatcaatctgctcactaattggttcataaatttcctttacaaatagaataataaaattgtacattgagttttcgaaggaggttactactgcagtcccattttacagatcaagtatagacagcacatgaaaagaaacttcatgtaacacaaatctcagctaacaatgcaatcatttaaaacattaataatcagttgaaaaagattccagttgaaggaataaatttggcaggttaataaagctagagagtaacctcctacatcatcccttaattacttcactggggggcataacagtgcaggagataattcacttcaatacataatccccatgttatttacatatcccttgaggagatacatatatatgtagaaggtctattttctttccttttttttttttttttttttagacagggtcttgatctatcaccgaggctgaagtgcagtgcaatggtgcaatcatggcttgctgcagccttgaactgggctcaagcaatcctcttgcctcagtctccaaagtagatggatagctgggactacaggtgtgtgccatcacacttggctaatttttcactttttgtagaaatgggatcttgctgtctgcccaggctggtctcaaactcctggcctcaaatgatcctctgcctcagcctcccaaagtgctgggattacaggcaagaaccaccacatctgaccagaagttcttttttttttaatcctttttatttattaactttttatttacttttttactttttattttttattaacttttttattttccctgatggaacccagggtcctttcttagggttcaagaaagaagtcaaattatgctccccaccaacaatcattgtaaaggcctctagtaacactgtcaaaatgggttaagccaaacccaactgctttcactccctttgaaatagcttatcttccctggcatattttccttctgatggagaacctagtctgaactgaaacatttaaggagaagcacaggccacctggagaaggagcatatgttgcaattctggttccgttcccttcattgttctaggcaatgcagactctgccyacctttcattcccaatatcttctagaaatcctaactgctctgccatgccctctcgagactaagtggcctatatctcaacatcaattccaagaatatttgatcaagttgtatccagatagaaacccagaactgattaagaggtgtttatgcttagtgagcctctattctgtaaagatgaaatggtgtctaacacaaatgaatacatattgcatatgcagtcatgtggaatatagtcatttcaagcactgtgaatacatttacccatgcttcctcaaaagctcattgagatgcttaagtgtgttatgacacttggtcttacttggccaccatttgattgaggcaaascttttcattgaagataaagaggaggtatggccaagagctgtcttcattctgcccagcatgcctcataactgtgctatacctctaatctgatcgctcagccttcattttcttcgttgctgcttatgactgtgggaacttgactgctatgtgcccaattctttttttgtttttgagacagggtctcactctattacccaggctggagtgcagtggcgcaatctcagctcactgcgacttccacctcctgggttcaagcaattatcctgcctcagcctcccgagtagctgggattacaagtacccaccaccatgcctggctacttttttttttgtattttcagtagagatggggtttcaccatttggccaggctggtcttgaactcctgatctcaagaggtctgcccatcttggcctcccaaattgctgggattacacatgtgaaccaccatgtctggccctgattcttgattataaccccaatcctgattttttctttatagtgaatacatgctaacactgtgatatttcagtgtgtcagaaagctacaatagagacagctgatgataataaaactcatttcctttggttaattccgccttagaaaatgatttgctgatgctgtgtgtgcaatatgaagtttgtttttaaatctcaaatcccagacagttcttctagtactagtaatggttcctaagaaaatatcatgcatcttaacactgtttatacatccaagatggtttccgggaaattaaatggttgcaatcaatcaacactagcttaaaaatgtctagcaatcagttggattactgcataaaaagacacaggcaattaaaattttattattttgccatgattgttgtagaaatgactcattaacaattttttttttagtaaaagataacatctttgcatttcttacacgctcagaagtgggttgaattctatactgaaccataagtaatgaatgtctttgaagttttcattctgtctcttttcccattggtaattaacttattttatttttaatatagttcccacgtcccatttcctactctttttcctacaccactctaaagcaatcagttcaagtctctctgggaaggacaatgtcctrgttaaaaaggataattaagggtacttaaagcaagacaaaatttatattagattatcataaatgaagttttatttttaaatagccttctaaaaagcccctgttgataagcttcttctggttgcagtttattctttaamtactgttctaccagcattattgaacaactgctttcagcggggtaaaaatatctggtgcaatctgctccaatgctcattatccttgttaaaaggcagactctgacaatagtatctaagggttacatgtaaaccaaabggttaaaaataggatcctaatttataatgacctttgcacttgtttatcctcaaacctgagtgatttgcaccagaagtgacttctaaacttttagttttacatttcctcacatggtacatatttagaatgtataaaaaaaccaatgtaccagtggccttaaaggttgaaggtactgataggtaacaaagattctcatatgaagtgtgaatacttgttttctaataccaggcctccctgggggatgaacccttgcatttgcttccctatcaactcttgggtaagaggaaggctccctggaccattctactagaaggggtacagccttcgctgcctgaaggaacacccacacctgagaatcaccctgcctgaggtacagagcagaaaggcraagggaggacagtgcagccagatttgggtgttacctcgatggccagttggaactgctcgtgctcccgctgcagctgctctgcttccgacaaagagctggcattgaccaggctggcgttgagcattgactctccattgcggatccatcccagaacctagggaatcgggacaagcacacaggtgaatggccttccgcagtttccccagagctgttgcctcctctcatggggacttcagttggagagctcactatcttttatcttctgttggagagaggacagcaaatgtcaccataatcaaaatggtcatctccccaatcatacagagtacctgtgccataaggtacttattktatgtacctgctttattcccagctccatgtcacccctctgtcccaatttcctcacccacatagtgtaaacattacttaatgtggttgtactgtatgcatgtctaaacttccttctggaacataggatggtayaaataaataaattccatctgttggtatccttttctttttttataaggtccagttcaaataacaacaacttatggaaatcttttgcacctaatctctcctgctagaaacaatctcttcttcatctagtgcaagcatatcattttgtatgtaccaccgttatggtattcaccacagacttcctggtttctttatttcaacctatgtttcattccccactgagaacataaacttcctgaaatctggggcaatatattagctgtattttagtctcacatagtacctatcacagtactttgcatataatgggtgtggtgtartttttgaagtaatcgagaatacccaggtcacacctgagcagtgagtctaatttcctctaccttgcaaaataaccaagagtaggcaggtttgaacttcagtaggtaaacaaccccaaaaaaggagaaaagagaaagaaaacaagcaaaatagaagtaataacccatattctggatcatcaggaaaaggggagtaagctataatataattgacttaaattatttagaggccatgggtaggctgaatacaacttctatgtgatgttaacaatcactgggagaaagaaaactcaacgagggaatattaggatagaagaagaaacagctgacactgtctagacagttctaggtgaaatggggatgtggcaattatccagctaataaagtcagagcaaataatgcaactggaagagttaggctctgaaaacctacctggtgtctggtcaccagaacattgccaaacactttctttattagggagtctgagagttttcttggagaagaaataaaagctattctgaaaattcaagatcagtaaataccacccatctgtcacctcatgccaaaggagaagacaccactatctgtttcagatttgctttcatatttttctcccctctacttcctcacattgaacaattagaaaataccaagcccagtctcgtgctctagaactcataggcacctctcaaatttcatccttgggcaaaaaatgactcatgccttattgtgcatagataacatcaggtcataaatcccactgaagctaggctacttggattgagatgttaattcatggccaagctagcagattgtagatgagatgccaatctgtaaagcaattagttacaggaaataactgctcagagtgtttgcgtgaaatccctgttgtcactggtggactgtggctggttggctagaggtgctaatgattttgaaaaattgcctgtaactttgggcacttgcattcacagactgcatgcccaaatgcctcatctctttgggaaatggagctcacagtgtccctctgccatgattcactgcattttgtttggtctgaagattcatttgagggtgtcagagaaaccacttctccaagtgcatcacacatcaatgtctgtaggacaatttgactccctttgggtctcttcagttttgttagaaaatttttctctccagtttcagccaacaggaagcatgagttatagctatggtggtgggatccctacttacaagcttcccatttagaaacatcatgggtttcagtacctactttttaaattatataacatcatttccttattcatttttatttactaaatgctgtttaaaaaggyattccaggactttaaagtgggagatttgattttaggaagctaaaaatgcatggtagtttatatctatggcttagctccagggtggggctgaaccctaggaatgagtcagtcctggacatagaactggcatagtagagaaataacataaaatttggagtcagaaatctggcttttttacttacctggcaaaatcacttaacccctctgagtctcagttttctcatctgtaaaataaggataattgtaccttccctttctgcattgcagggttgatgcaacaatgtgtaaaatgtaaagtctgatgattatgatggtactggtggtgatttttagtttagagaaaagctggataatgatgtgattatttatacctctcttaatgagaagacagctttattccagaatctgtatgagcttactggcatattctgatgtgatgtagcttccttagctgttttgtcatcattatccttttactctgatcactgataacccttgttggtataattttctattactggtatttttaatcttccaggttcataaaactggctagttattcttctgtgagcatacaaatatgtgcaagttaagaaacatcataattaaaatgagaaaatgttggttctactaattttgagctgtgtgacattgcaaacatcatttaagctccctaaggctcagttttctcatctgtaaaatgtgaacactttccttgcataagggatggggtaaagagaaaataaaataattaatgtaaaagcatttttcaaactgtaaaatgaatattracattgatcaatcattctaggcaacaatttacctaataggttagatgatctttaaagataatttccagttctaacattccacactactttcaaaactcaaagagtgcccctacatctatagggtatccaagaaaatcagttagtagaaatgaaggactgaaagaatatcactacttggggacttaagagctaggccaaaagttcagctcagtctgagcttgagggggaactggacatgaagatctttattgcttcttcakgtcaggaaagctcagctaagcccaagtcaggagaatggatttgattaagtggatgtggatatccacaaatggtgatgccatttaagctgggcaggctgagccttgtaaccatgtaggctgggaagccrcctgtagatggctgtgttctcaaggtcatacctacagcaaagctttgaggttgtactcaaggcaactgactctaaggaccactattgtagatgatttatcacaaggcatagttgtttctgaaacgctagccacaggaaaaataatcagctcctcagatggtagcagggagcctgtcatatgtccagtgttccttacttctaaaaatccatggtctatgagactgcacatgttcatccttcatggttttatagaccgtggccatatgtcctcttaattatctccattttgaaacaaaaggatagtacttgtcctgttggctgcccctcttttggatctacttcaattcctctcttttatattcagccaacaaaactgaacacagtattctccacaggagaataaggacatgctaatattttctcctttgtcctaaatgtccatcttgattatatgcaaattttggccagcatttggtgcaaagaagcaaattaagccaatgtctttagtaatcaaataaatataacttctttcctcatagcttagagacacaacattttataaatccattttagcttattttctgctaaatgcactgctttgcaggaatacatatggaaattcatttagttttatgctcattaggtaggtctttcaaatctttctgaattgtctaatagatgtgaggtcatcttcaccatagtagtaattttcctggtagctatcagagcactctttcgggtttggagagtaatttggcattgagtggttcagggatctgctccatgggctgtaatcagtggagtggtttcccttcaaggtccaccatttctctaggggtgtttgggctatctatcttagatataaagtcctacataaaccctcagaaagaaaataagttgcatcaatcaatttcatttrttctgagtccattaacataatttttagtctaacgtctgtgccttcctttcttttcagtacttcagtttaatataattttggtaaaacttaaggttatgatgggccatgatcaaatctaaacctttaatctatgagctctaatgacatagttgtatcataatctattactgtcctctccctctctgcccccattaatggcatttcaattaaagtgtcctttttctttcttttttgagactatattcaaaagagactctcaagctactgtctaaatttagcatcactgatcaataccgacatctaaattaactccctttttccaagagtcaacagcttccaaatcagtatttcccgctccaccaatttccatcaaacacaaatgccttctctgaaactggatcaaagcgctccctaaggaaagagcctacactgacaaggaaaacaagtctgtctaatgaggcatggtggcttaaccaagcagcagtcccttggcacctcgagggccactgcccttttgcaaagggcttggtagatttcctgagaayctggtttgagcaattttgtacagtcttgaacgacagtcccacggtgtgtcatttttgtcatggtagaaataaggaatcttcccacccccacaaaagaattccttttttgtcttcccactcatgaaattataaatgggaatgtatatagatattagtccaccccggattatttatatatagacagtctacttccctatttaacaaaatacttatcatcagcccagtctcctcctatataggatgtgtagttggagaataaatatatttctattttaatatcrgcgaaggaaaagagaattagggagttgaatttaccactgatactggagaaaaataaattaaaacccaggaacaaaagcaaatttatatatttcatttcaaagtcaaataggaatgattttcccgttatgttttgttcagatggtcattcctgccaccttccactgatggaaataaccaagtaggtgcagcagaggactttgatgacctgctggagccctgctgacctcagacaggtgccaccctctccatcaagcttaggccatgcctgctcctatcctctcatacatggtactgctgaggtcaggaaaacctcagaccattcagctagaaggattcttatttttaaattttgaattgataaacataattgtacatatttatgggatacatgtgatattttgatgcagatatacaatgtgtagtgcacattgtaactgggataaccatcacctcatttatttgtgttggaaacattcaaattcctttcatttagctattttgaaatatacaataaattgttaactatagtcaccctactgtattataccacactagaacatattccttctaactgtaattttgtccccattaaccaacctctctttatcctcccctcccctctacccttctctatctcttatagccactactctacactccacttctatgagatcaacctttttagttcccacatgcatgtagtatttctgtgcctgrctcatttcacttcacataatgttggagggcttctatttctcctgggaccacatggcaagagtgggggccagcagaggcaaactgtaggaccttggatttaggaggcctaggctgaagtttcagctgaccagtcaagaggccttggggagcactaaccccatggtaccttagtttcctcatttgaaaagtaagcataacaccacttctccccatgggcatgttctcttaaaatgagattataaatgagaaaggatttctcatatgaaaagaaagtccagtcttaactactaagttgcagaatttgcatactcgttactgttctgggcctgctaggatttccaccaagtccttataaataacatgtctctctggagactcaggtgtaatcccagtgtcattaagcagaaacaatctggagggcagcactgtaacccggccttgcttggggctcaggaatttaatctgtgctgaatacagatctttagcatggcatgtgtgggctatggctcagcactgattgggagagatggggagtggagaagacagtgtttttttcattataataaataacaatataataactaagacagaggcatcagaggaaggaatacctttaatataaggaatcaagcatcaattaaacaaaataagatgtttttggctctcatactaaatcagtaggcttaattccaaaagtttcagcatgctgagctatggttttctgaagaaaaaaggtaaaagctccagcagctgctatagacaagaaaaaaaaatgtttaaaagaaagatggttttttgcttaggatgatttgggtagagtggggcagaaaggggcaaccacaggagtgatgtggtacctgccctgctgggaacccccccgggacctgtggagagtggtgrtgtgttctctcctcagggtgaccatggtctgctgacctcttaagcttcagtggcctaatctataaaatgagaataaagtttacttcagagaatggttgtgaggattgatgaagatgtgtgtaacaggcccatagcactcaacaaaatggaactattattatacttttacttcttcacccccacctttgtacaaataggtaattaaaacaattaccacttagtctgttcttaatatatgtattttttgtaatttttattttttggaaacagggtcttgcactgtcatccaggctggagtgcagtgatgtgatcatagctcactgcagcttcaaactcctggactcaagtgatccttcttccttagcctcccaattagctgggaccacaggcatgtgycaccacattcagctaatattgagaattttttgtgcggtctcaccatgttgcccaggttggtcttaaactgctggcctcaagtgactctcttgccttggcctcccaaagtgttgggactacaggcatgaaccaccatgcctggcctgtactatttttaaaatgtgacattggtcattgtgtgtatgttcccacaggttcctagagatctagcataaaatgcctagcataatgcttcatgcagataagttatttttcctttttaaaatcaactttaatatggcaagaaaactttcctataataatcatacacactttggaaatagtgatggtaattgctactagttactgaatattaactttgtgtcaggcacacagtgccccaaattaattaacctgactctacatcctaaatatatttattgataaaggatttgtatatttcccatggactgcttgacaggactgaggatagaaagaaagaacagattgagtgactgagacaactctggaatggattgtcttgtaagagagaaatcatgcatttgttgtttgagccattgtatcaytgggtctatttgttaccgcagccaagctttcagaaactaatacaagtagtccttaacttacctattttcgaagtgctggttacttaaaggggcacctgtggctctgtatgccttacctcataccaggagcaggtcccaggtcaggctcagctggctgagaaacccaggctgaaggaagaagggctgggcttacctgtttgacttcagcctggaggtgacgtaattggaggcactgctctagccgcttatgagtctgctctgcattgagctccaattcatgctgcttctcatggagaaattccaataactcttgcacctgggctgccagatcaatgtctttttcacagatcaactcaattcctgattttaaaaaaatggaaacaattaaaaaccagctagtactgtgaaggctacattcccttcaatatgcataagaaaactggaatttggaaacagccattattcataccctcccaaaccctaaatattcctctgtgaaactgggcaccacaatgygcccttgtttgggatgctaaaattacgccatctcttttgtattaactgatcctttgcctgaggagtcaacggatgatcagttccttattatcaacaggaattacagttatatagaggtccatccctagacatgacagcacccagcaattcctgctgggggatttgccaacacccagaatattcacaaacaagcctctaaatcatactggaaaatcaaaaaccaaaccaaaagactgtctcagtactttggccaatgacacacttttttttttagctggtcagatataatttatcattagatggtaagttcacttcaatgagagtagctgcacaatagtgatttttaaaaattccttttaaattccccgcaagtgtcgcacatggacagtggtgattttattagccaactacttaggccctctaaaaaaaggcactgttagaaatataagctagctctcatatattatttataaaactcaggcaaacacacctaataaatacaacccagcaataccacagggataatgagtgcttatccatttagaaaaagcttcacgttaaagttgtgcccactcaaggagagtttgctcaatgtttttctactgatttacaattagtaagctcagccagtcactgacaagtgttcccaatgtttatgtataaaccacccaacattaataaactgtyaaccatctgacctacaatgggagccttgagtcaatatatgccagccagaagctgtkgccccattccttgtttacctccttgtcttacttttcctatatacttttccaaattcatgagcacaggtgcaaacacacacttcctctcttcaccatgccagttctcctatttatacgttatcatcagcaggcccaaggtagccttcatcaaataaatttctgcctcagaaatgaacgaactcggagagagagcaaaggaactgccttagtaaccaaagtccttctctccactagtaacttgaatttgattccttacttggctctcaaagactacccgaaagtgtactagctttggaacagtcctgagytggaatcctgactttgggcaaattacctagactctcagaagcctcattttgctcatatgtaaaatatgaatttacatacctacctacctcataagctacctacctcctaaacttgtgggattaaatgagatgatgcatgtaaaatatctctcatatacacatattactgtatgtacatgatacacaataaatatagaccactgctccttagtcctgtggcttttctgactcctaactcttaccttaaactttcaactttctgccttctcacattcatgtcctcttggtttctaactgtctccgacttgttgcaagttgtgacmcatgttgtttcttgatttggattgtctacatatttcttattcggccttgttcagatccttagatctaggaaaatcctaactctgaactacttgcttattctgatccctgagtccacctggctctgcagcttcttagttctgtccargtcctttccctggctcctcatccaacaatctagacccaatgcaggtttggtcctgatgctgacacttttgtctgagatgctgaagaacaggatcctaaccaatgatggggttcagacttaaaagcccagcagataagtcaccaaaaggtagtatacttccatggggatcaaacccaaaggagcctgccaatctcaacatayggctacctaaaaaataaatcccatttgggagatttccccctcactctaactcacaccgtcagaaatccatcactgccaccaccaacacacctgcaacatatagttggggaagtataaggaaagtctgtacatactaagggaaattcatctctggaggcaaaaatagtgttttatataaggacaatatgggaaagtgggaacaccttttttttctggtgttacatggtaataatttcagtatcttttcatgtttattttttgtgtctgtttcataattccaagtcctagctcctgaaatatctgtgggagacagagaaaagaacggcttgttcttttggcagccaactccttccagttactrttttcaattaccaaggggatgaggtagagcacctccttgactgaaatcaaaagtaagaatacaaaaatttctacctctgcaatgcttggcatagtgggatgacccctgacccttatctttactttctggaaatgcaatttaagatccatctgcagaagcagacgctctttctcacttccagtcttgatgcggatttgytgtagctcatattcattctgtatgtgtctctggtgttcaggatgctgggcttgggcaaaatgtctttctttgtgagcctcatggctcacctctgccacaccacatgttacttatcaaagaggacagtcacctgcttaggacatcaaacagagcaggctcccagcatgtcctgagactcagtccctgcattttcatccatctcatttgatgttgttttatgtgagaaaaacacaggaaataaaatggatgaagacagtgcttattgcacctctgcatgcctcaggaacacatcatgttgtggatggaataaatgggaggaacatgaagatttattccagccacacctagaagaatagaaattaccccctctcccactgcccccaaacacactgacacgagtcctagttaaagcccatcaaatggtaaatatctgtcaatcggcagcaggcagagtttgcttgtgttgactttactgctctcaatctrttgatatatctgtttttcttaggggctcttagaaatgcaaaaagatatttttcctctttccatcaagtagcggaatgtatttgtgaggaaatcatttgtcaggctcttttttaaaaagttctattgaracttctttctgatgtgcccccacaatttcctgtgcccatactccaatcagaacacttccattgaggttggttccttattaacttatctatgttgttccaggaatgcaggcttcttgacgccagagccatgtcagtcgtatccatctctgcctcttcaggccctagcacaatgcttcactcatatcacccaataaatacctaatcaatgaacaaacgagcctcttcagagaactgaggtcatatgctgtggtggaaagtacctgagagcttgggggaagaacaggcttaggtttgctctgtatgctatgaatggtgagactctgggcttcttaccctctctgagcctggatttccttgtctgtaaaatgggaatcacaaagaggacttctcagggatattgtgagaactaagtgagatacaatgtatacagtgcttggcatctagtaggcttaaaatattcattttctcactttttcctttccctcagagaaattataatgaatacacttttgattgctgatggaactattgaatggcttgtataaaatgtaaatataaaatcttactgacaggtgtttatgtactcgcctactgtatatcattggaaacaatggtggctttaatgctgttagactgcttctctcaactctgcctcacatcagactcagcagagaatttttttttttcttttagactgagtttcgctgtgtcgcccaggctggagtgcagtggtgcgatctcagctcactgcaacctctgcctcctgggttcaagcgattctcctgcctcaacytcccaagtatcagctggagaattaaaaaaaaaaatcaccatgtcctaaccacaccccagaccaatatcaccagaatctctgcggctgggacccgaccattagtaagtcttaaagctccaggtgtgattccaacatgcaaccaagattatgaaccactggaaaagacagtacaggaaacagagatattccttctgctacactcagcagaatgctctgcactggtgtttctttagggctaaaagccacagctaacaataataagcgttagtttgctttcctttgttaccagatgagggtaccactttaatttcctcaaggagagaggtgactgtggtctagagtaagatttagatatttctggctatgctgcccatacttgtaacatgttttaaaaaactgtttgtgttctttaaatattggtatcagcctcagatacagaacatcttttctcttttcttttcttctcccctctccattcctctgtctgtgtcactccctctacctaacactcagttcagaaatcacaaagtcctttaatgaggtttttagatcagtgttctcaaccctggttgtaccttaaaatcacctgggaagttaaaaaaaatctgggtccactccagaccaattaactaagcctccctgagggatggagcccagacattggtatttttaagaagttcccaggtgattctcaatctaccgacaggttaagaaccattgttytacatcaaggtttcttcttcccttcgtctcagcccctcagatccacattcctattcaccccagagtagctttcattttgaaaaaaaaataaaaataaaaagcccacagattttttttctttcctttttgacactagtaaaattatttgtgctccattatttttacctacatctgttccacccacactgatgttcattctcgattaattcagcaaacactactattgagaacttgctaggcacaagacactggctctgctagatgctgggaatgtaaagagggaagaaagaatttgttccttcatgctgctggaaaaactacaggaatacaaataacttcaacagaatgcagcatgtgctagaataggagtacaaaatatactagttgccaagcytcactgaaccctttccatcctcccatgttatcccacttcatcctcacatgaccctatgtggtaaggattctgatgatcactacttttcagaggaaggcaaggcttagagagacaggcgaacatgtacaaggacactcaggtcctaagacrtgtggccgggatttcaacccaggatttcctcttttgtattctagcctttatgctcaaggagaagagtgatcctcacaaaacttgatttattttaagaatttatttatttttaaacgttggggttgggttcttctcaggcaaggtaaattttaagtatcatggccacaaactccagagatttctcatttacaaaccttgtataaagagagaacttaacgcgttgtgtaaatcacaaaaacaacatatccatagggtacgttgctcttgtcttattcctaaagtcaagtgtaacagtcgcacggtcagatttcatgggagagaagaagtatggcctggccgatgagggcagctaggctgaattacggaaagtgagaactggagggaaccttaggaatcaaggcgtgccacastagacagaagaagaaactaaagtctaaagagaaagaaaagggacttccaaaatcagactgctagttggtggtggaactggaccttgaattcagccagcatgtttctctcaacttctttcagcaaaacctaccatctcccaacttgaggctcaaatagatgattccattgtgaggaaagaacaatgagcaaattaagaaattgctcctgtttactctattcctgagcctgatgttaagttaagcaaaggcttttactttggttagagttgtaggcacaccagagggatttagtagagcctggctcaatattataaacttcacacttgaaaagaagcatataaaaattccctagttccatttgctactgtaaaatcaaagcataagcccttatttagcatggactaaataccaacaaaagttttaatattgctaattgtcctttttctaagacwacagtttattttacctttagtccaaatacagtccattaaacaaagactataaatccccaagccatttattgcctcagtcctgtgtctctgaagtcttacattcctcagccattgggggataaggcccacctgggctcaccccttaccccatccccaccctccagctctgctgtgaatctaccctccatttccctaagcccagaagtaagttagatgcctcccctgcagaaccaggcattcagccatagacagggagtgagcattcctaaaacccctggattcattctcttaaaagcctcatgggctatgccagactaaacagctagctgtggtaggagcaggagaacagccagcctcagtaagaggcactgaagaggccaaacctcttttgacaaagctcatttctagaacaggatattgtgggggtgggcagcccatctgcctggggtgttttcaccccactcagccctcatagtttaggtggacaccmagcacagcccacctcagtcataagcagtcctcagggactttcaactcccagttgtctttctgttactatggatacttggctcttgggacagacgttggcttgcccagggtcacatcagcaccccggtagtaagtgctgcaggtttccaggcagacaagcctccttttcctgctggacacatctaccatgagagatgaagggtgagcatccctgcatagcttctctgtccatctctctgctagatggtgtgtgtgcattctcttatggttcccagtcgtagctgcatagacagctacagtaagtaccatgagggcaggccatggggctaaatcccgagtccaggtaagattcccaatcacagagaaaggattacagtttcccctacttccctaataaggtacagtctgtgtcctagaacactgactcccagattttaatgtacacaccatttacctggagattttgttaacatctacattcagattcacaagtctgggataaggccagcaattttgcattcctaatctgctcccaagtgatgctggtgctgctgggcccagggcccacactgagtagcaacatgttgggtcagtggtgcacaaaatcacctggagggctaattgaaccacagattgctgggccacactctgctcacccttagactatttaagcaacactgccttattcatgaatccacctctcagatcagtctctgctttggaattctttgacccttagactattkaagcaacattgccacgtactcttgtgtacagggctttaagagtatgcactgtttcaatgcctatagcaactgcaaaggaaccgcagcaaacatgtatgttatgggattctgatgtaatgagttcaggtatgagcccttgaactcgcatttcaaacacatcctcaggtgatgctaatgctgctgacatggggatcacattttgaaagccactgtcctaggtcattccagagatgtcagatgttgtgatttaattatcacgaataaaagcagtggttcttggccctggccacacagttgaatcacccgaggagctttttgctgttgcccaagttccatttagaggtagttaaatcagaatatcagggcatggggcctgggcactgtcatttaaaaaaaaagtccccagacagactgcaaggtgagtagcccttcctgggactacacagagcactagctgcatacctgtgaatargcctgggtttcagctgcacacctgtgaaacaggcctgggtctcagaggcagtctgttcacagcacagatgaaaattcaaggacagactatgctgacaaaagtgaacagaatttactagactgtctctcctctggtcaggagtgaagtccctttgaatgctggtctttactctttcaggtcatcgaaagaaacacagtactttaaagttcagtatgactgctaaggtccccctgacaatctcaggatttccatatccttcaggataagcagggacatggcccaactgcgttttatagttgatggccttagctcctgtctacctcgtgttggagactgaggaacctgagccaacaaggaccccggtaggagggcagtggagtgggtcggaaggtagagatctgggctctagcactcccttgagatgtgaccagccatgtgacttcttttcttctcaaccagckgtcctcaagatcaccatggtgctctctccttctaacatcaaaggatgacttggggagtgggaagtataatagtaagggctcactcatttgttagataaattttgaataaatcttgagcaggaaaagaagttaaatctgagtaactcagccrtgtttttctgagaagttataaaattatatgatcttgtcataaatttttatcatcactgtttatactcacccaaagaccagtgattaacaattgaggagactgagaaacaggaaccggagacaaggagatagcttaggagtagaggatagggctggagaatgcgtgctggcagcagggatcgggagcagaagaggaaacaactacacatgtgtatacaatccatatgaatgtctgactgcttctggtttgtttttccaggctaccattttttaaaggaatctgtgctgattgccatcattgattctctcactctgtctgcagaccaggaaaccctggccctattcccaacttcagcacagcctaactgggcaaccttgggcactattccagctctcatggcttccgtttcttttcttttttttttcatctgactcttgcccaggctggagtgcagtcgcatggtctcagctcactgcagtctccatctcccaggttgaagcgattctcctgcctcagcctcctgagtagctgggattataggcatctgcccccacacctggataatttttgtatttttagtagagaaggggtttcaccatgttggccaggctgctctcgaactcctgacctcaaatgatccactcacctcagccttccaaaatgctgggattactggcatgaaccaccacacctggcctcgtttcctttcttttaaaaaaaatgtgggtaaaaatctctattctttgtatctgtaggaataaaatgaataaacgatgtggcactgctccttgcaggctagmtggtatgcttgttttcatcatctcctctgccaggagaatgagcgaggtcacccacctgatgcctggacctccgtgatgtactggtgcagatcctgtccctgctggataacctcaaaggtcatgttgttcatggctagcttccgttctgtgtggcgctgcagccgctgttctgccagggttaggtcctctgtgttgaagtcattcatctgccgaagcaagtcttcattccaggcgtctagctctgctgtcacctgtgagggaaccactgtcatcagcacaggctcaccaggtccacgagagattgwtaggttaagrctcacaattccaagccttattcatgaatccacccctcagttaagtctctgctttggaattcttcaacccttagactatttaagcaacattgccatgcactcttgtatacatggctccaagagtgctctctagtgtttcaatgcctatagcaacagcaaaggaacagcagcaaacattcatattatgaattatggcttataaagtttttgcatactccttgatgttcaatcctcacaataactcaatgaggcaggcatggtggagatctccaggtccatattctaggagaggaagttgaccctcacacagacagatggggttatttaccctgccagagagggataaagttcttctactaactgcaaagactttgtctaccatcccacagttgttgctgtwacaattttcntaactaaagaggtcctcagaaattaagtagtatttcaaaaacagaaactgagggctagaaaaacctggtgaatggcccaaagttacacaatcagttaaagagctggtgtccatcaaacccaagggtcctgctctggttcctgtgttctattgtgcaacattctgtccttctattacaaaggttgacacctaaaaatagtgactaaacaaagtataaatgtgtagcatacctccaggaattcragcagatttaatcaattgaaaggcattaatgattctaatgaatactaaagcatgtaatgaatgcaaacattgccttaatagcagcttgctaattgttcatttctctacaccttaactcacatgacttcactgggtctactctcagttttctgcaaatcgagactaaatcctacacttcctttacaatctctgcaatcatccacagactaggaagtcagaagtactgaactagataattccacttgtgtgaatcaaaattaaaagtttttaaaagtgattttcagatctgctatctcatgctaccccgatgacaccccttgaaggcgacascatgtgtactgtcatcctcttttctcaggagacgaaagtgtcactccaggtcacacatttccaggatggcccaggccatctaagcatatatcccagagccttagttgagtggttttcatgatgctgggtctcatgccagctcccacatggcataaccttccaagttatcaaaaactgctgctccaggagcatcagggacacagggagacagacgatggattgaagcaagtgggagcggtgctcttatattccatgctggggtacacacactgggatgggaaagccaagcagcccctcacaaggggctgctgtctgggtcacaggatttcattttttttgtctaacaacaagacctttcttcaagcaaaatagaaacagattaaattgtactttctctctttgaagcagaaatggggaaattgaaaatatcactctcactgccctaggttctcacttcacaccccacatcttttcaggtcaatttagagaactgctgagctcagcaggaaaacccagtattacttattgtggggcatccttgggggatctgggagccactgggttggcaggcaaagtaggtttttgttaaagccccatctttgaaaagtacttcattctctaactcragaaaggggttagactgatgaggctaaaatagattatttaaaaagataatttagcctgggtgcagtggcttgtgcctataatcccagtgatttgggaggccaaggcgggaggatcacttgaggccaggagttcaagaccagcctggtcaacgcagtgagaacctgtctctccaaagcaaataataatacattagctaggcatggtggcatgcacctgttgtccttgcaacttgggaggctgaggcaggagaatcacttgagcccaggagttcaaggttgtagtgcactattattatgctactgcactccagcttgggtgatagagaccctgtttcttaaaaaaaaaaaaaaaaaaaaaaaaaaaaaaaaaaaagcataatttaaagtatacataggcttttacagtttttatagaactaggcctttttcgttactgtatgttaaaaactgaagtataatttacatacaaaatacacatattttaagcattcagttctgagtcttgacaattttatacacccatgtagtcatcgccaaaaataaactatagagcctttccatcactctagagaacctgcttgtgcccccttccaatccatccctccccttcccaacccacaactaggcaccaatttctgatttctatcatcatagatgtagttttgcctattctagaatttaatatgaatgaaatcttacagaatttttttttaaacatctggcttttgttcaacatgttgtatcaagattcatccacgctgctgtgtgtatgtttagttcattccttgctacagctgagtagagtatcattgtacatataggccacagtgtgtttatccattctcctcctaatgaattattgggttgtttccagtgtttggctaatatgaataaggttgatgtgaaagttcttatagaagtctttctgtggacataggttttcattgctcttgcacaattacttaggggtggaattatatataggtcatagggtaggtgtatgtttaactttataagggaaccatcagatttcctcaaaatgattgtaatattttacatacccaggagcaacgtattcaagttccggttgctctacaccctcaccatcacttggcattatcagtctatttaattttaaccatgctagtgggtgtgaagtgctatttcatcatggttttaagttgtattttcttgatgactcacgatggtgagaacattttcaaatgcttattgaccatttgtatatctacttttgtaagatgtcttttcaagtcttctgccctttttaaaatactgmgttaattaacttttcattgtagatttgtaaaagttctaaatatattctagatgtaagttctttatcagataatatatgtaaaatagcccaaatcacaatttttactccattttctggcctacaaactaaggggaattagaataaaactaagacaacaagcatgaaaggaagagcctgccttttcttttgattttaggttctgtttgtttctgtgaaactgagtctgaggtatctatttgctgcaggaagatccaaggagtcccatagccaggaatctatggagtggaaggtgccgacggtcctggtgagggagaagagagtcacgtcagagggctttagttgagagagtgatctcagaggtctggaatcttgggaattcaaatctaagctaaatgtgaaatatgtccaggattctgtayctggtgtttctatattctttcatctcctctccttacyctcctccactctcatcatctgacaccattgaatkgaggaacccaggtctgttatgaagcctggagaatgggaatttccagggcctcctcctaaggctgccctccctgggtccgcaggctctctcctctttctgttggactccccctcccttctctcccccaggcactgatgcccacagctttcaattagtctgatttgtgtgtgtttaatgtatactggaatttaaattattctctttcctaagyattttctgtttcctcaaggaatgtttttttcattagrttcttcctccccaccttctttctggggcataaggctggaagacaatagaggctcattttttaaaaagaaaaatagttgttttcaaaccttaagttgaccttactgctaatgaacaaacctagcttcccaggcttaccctgtgctcttgttatgaaccagtcagatggtttacttgctgatgctgagagcaagttctgccctctccagccttcttcactagcctaatagccctgaaacgcccttgtccttcctcccaatctgcttaagccctgaccacccttcagagtaaaccctctggcatgaagagcttcacgacaacacctagacccgaatatttttctctggcttatctaataacatgggtcatgggttagtttgctaatacagagagacaagactgaaaagaaaagcctgtgccagtgagtgaatttagtgatttaactccatctggagagaatttgttcaggctagaaactagggcctgaagccagtgaatgaaagatggaacacaaggttcccagagggcattccgctttcagtcaacctattttgctttctccttccactcagttacttccacctcagttccccacttgctctagtggcctctgtctcccccactctcctgaattaactgcagttaggaaatgatgacttytttgacagatacattggcaatatttctattctaacaattgtctactctagagacatcaataagggaaatcagagaaagtgccaaaataaaatttaaaaaagggtaagaggcagtgggaaatggaaaatgggaagcctcacttcaaaaagaagcccaaggtgttcctgctagatgagatacaccaaatccagtattctgccatcaaaatttgcttcataggagttggtttagcagtcaccttgagctctgctttcagagagctctctccattggttcctcctgttttcttggtcttccccagtatttatgtgtagagaaagctatagtccctcttccccagatgttttgawctgtatctgcctgaatcaaaattcacctgcccctcccttttttttttccccacttcctatggtctacccacttcaactctttatcacctgcaacattggaaatctcactgtatagttctttcttcagatcagtgtttagatgttggcaacaatgatgaagatagtatgattgaagaagacattttactttgtattgtgcatttattatggggcaggcaatgtgttaagtgtttgatcaactttatttaatcctcatagcactataggaggaaatgaaagcacagagaagtcatatagtttytcccatggtctcagagctggtggtggtagagctgagcatttaatgaccaagtccaatgctcttaaccatggtgttacaacaatagggctgctccaagaattgattttgggggatatctttctttttactattctcacttcagaaaagtgccagttttacccttcttgttttcttcttcttctaaaacaaaaacaaaaacaaaacaaaaaacaaaacccataattcagttttcttcacttcacatgagccttttaaattaawcatatatttttttagcagaccaagaaattttgtgtttgtggccttagataaatgccaggcataatttatccttgcaagaaaacgcactgccttcctccagtatttcttttcctttttaaaaaaaagttttggccaggcacagtggctcacgcctgtaatcccagcactttgggaggctgaggcgggcggatcacgaggtcaggagatcgagcccatcctagctaacacggtgaaaccccgtctctactaaaaatacaaaaaaaatagctgggcgtggtggcgggtgcctctagtcccagctactcgggaggctgaggcaggagaatggcgtgaacctaggtggtgagccgagatcgtgccactgcactccagcctgggcaacagagcgagattccgtctcaaaataaaaaataaaaaaaaaatttatggaatgcttcacgtatttgtgcgtcagggcccatgctaatctctgtatcgtttcagtttagtgtatgtgctgatgaagtgagcacagtatagtacatttttaaagagtttagtaattttttttaaaccgactctgccagattgctcagtataaaggtaatattaacctatatagaattatctggttatccagatgcctttgtcatgaataggaaacacatctgcaatttggtattgagacttaaattgcagcagatagaaatatgatctgttcccaacacaggcagggtctctgtaaggcaagagcaaatgactttggctcccacagcaggttctctgcataaacattcagggatctcctaatatgactcagtaacaaatcagaagagaaacaatgagaaagaataagaagggatgtttaactgcttaaaacctggaagcaaatatatatatatataaaaaagaaaacatattatgaataataatamcaatgctgactactatgtattaagtgctgattaactgtcaggagctttgctaaacatattatgtgttaacttattaaatcctcacagtaacccaataggctgggaaatattatttcgtttccatttctcaaatgaggaaaccaaggcttcaagggcaatttgcctggctgggtgcagtgactcacgcctgtaatcccaacactttcgcaggtggatcacctgaggtcaggagtttgagaccagcctggcaagcatggtgaaaccccatctctactaaaaatacaaaaattagctgggcgtggtggcgcatacctgtaatcccagctactctggaggcttgaacccaggagaatcactggaacccaggaggcggagatagcagtgagccgagatcatgccactgcactccagcttgggtgacagagtgagaccctgtctcaaaaaaaaaaaaaaaaaaaagcaaagcaacttgcttaaggccacacaattagtaaagttagtaaaacaggtttcaaacccaggcagtctaactcaaaatactacacacttgatcacggcattactgtctctcagcaaaggtgattatatacattaatcaacactacatatgttgcatrtgttaagattcaatctcattccaattaccagtaggaagaaagggtccatggcatttcactgtgatgggatgccattgacatacctgggttatcaattgcaaaatggcatctttctgttttatgacatcattatttttgtgaagatgaggaaagtggaagacaaatattctccactgccctacaaatgctggctgatagggaaagacatattgcagctgaagaaaccacctcattgcatgggaagatctattttatctataatttttgatataggttaccacgatgaataaaatagctaaagtaccatggtcatttactcttcttgtccaatataatgttgagttcctctctgctaatcaattcttacaatgataagattagtgacttctaaagcagattattttaaagttatcatagcatttccctgtyttagtaatatgtataatctctctgaagagttaaaatatttgtttaaatagctaaagacctttgggaatattgtaagaaatttccagaaaagcaaagggacttggaaataatgaaatccagtcagtttttaatttttggcaaaataatgtgagaacatattgcaaaaatgctgtaattgatgagttccaatgttcaattacttaatttctataccaattgaataatttggataattggattatttttatggccaattttatgttcttttcttctctatcatcatgattaaaactgagatccttggccaggtgtggtggctcacgcctgtaatcccagtactttgggaggccgaggcrggcggatcacgaggtcaggagatcgaggccatcctggctaacacagtgaaacctcatctctactaaaaatacaaaaaaattagccgggtgtggtggtgggcacctgtagtmccagctactcaggaggctgaggcaggagaatggcgtgaacccaggaggtggagcttgcagtgagccaagattgtgtcattgcactccagcctggctgacagagcgagactccgtcaaaaaaaaaaaaaaaaaaaaaaaaaccctgaggtccttgatataatcacaactgtcaattaacagggttgggagggatcttggtcattcctttttatacttgtgtccatacctttgccttttatcattttgagatttgtggaactctattctccttttaaaagatctctcttttgttgaagagctcctataacgtatattgctcactcattctagaacctagttatgcttgagtgtcagaatgttttctccccctgtgtaagctgaacaccttctactgcatccttaccagaaaggaggagcatatagcatttgaaccttgataattttacttgagttcaggtccacagccccagacccaccccattacagagtgatctgaacatttccatcagggatttttgacagttctactgaaaacaggtgacctgccagaatactaaagctgtgtgaaaaatcctgatttttttaaaaaaggacgatagtagggaaaacctcccagtgatcctgaaattaatttgtcaaaaagtctagaagagactatgaaataaatattttgtgaggattaggtttacttcattgtattcattctacatgttctttccaaaggttctgggggtacttagaaaatgtgacagtgatcactaggaagagtgcacaaagatgacctcaaatagatcttagcttctttcttgatacagttgcaatgttggtggatttggcatgttacaaacgtggagaacagcaaggccttgcagtctcgaatggtttttatggaagaaaaagtggcgaaattggactcgatgatgggctcttagatgatccacagctaacagtgactgtgcagactaatggctctgtgtcccccagataagaacctgtagtgatgcaccagacagccctgtcttacctgcccaacttttcaaacagccacaacattgatagtaataataaattaaatttatatctattttcacaggcagaagaactgtgcaaaaaaaaaaaaaagaaaaagactaaatttgagtgacaaaatataaaagctgacattgaagtttttttttttaagtcagtgtactggaagcccatactttcaaatgacaaccaggagcttttaagcaagcaaagactagacaagacaggtgatgaagtcattaaaaaggtacctatctcctgggctgcaccagagccagtactctgaagaggacacatccaagcctrtatgtgagccaggctccattcagcagacagtgaccaagacagtcagtgamtagagrccatgtcctatccagaaagaggtgaataaaatagaggatatataccatagagggctgacactaaggagaaatcattataacatttttagagtcaccgggactgcagaaataactcatacaagctcaccatttttcagataaaggaaaagaggcctatgataaacattttcaattatttttaaggctcccaaataagagggagcagactagttctctctttttttttttttttttccagagagcagaacaaagacccaagtgtaaaaggtggagattttggttcaacacaatagtgagatgatgagctccctcctttcttctcccttccctgctaagcccctttctgggctctggagatattctggtagaggctggatggcatcatccarggatgccaaatcctagccaccaacttttgcctgccctcaggtgtaacctcattgggaaaccctctatgaacatcctgactgggctaagcatctgcctcttccagtgttctctgcaaactaggagcctctatcatagaattcttaaattgtatgatgattctctgtttctgtgtctccctgttatgtcctcaatgtccaacatagtttttgctacataaggaggtgctcaccaaatgtttactgagytgaatttctatataggtaaaaggctgaccgaatggtctctttctaatataaaatgctaagggcctctgtgtgcaactaattgaagagttgagaccaccagtaagttataatcagcttatcttctctaggcagaagtttcttccttgaatgccatttctccccagccttagcctggcccctatttgttttacatgaaccccatagatttagaattgatatatcattccctactcaaataaactttcaggtgcattaagcatacctcgcttgcaattacacagttagagatttaaaagaaaaaccataaaggtggcccatattttcagaaagtcccttgtctagaatatccttcttagtgtcatttctaaggctttccaacataagtatgcccatctcagaaaatgccccaaattatccaatgatggtagaaaaactatcttgatataaatatgcatatatgtgtatatatattatattgtgcacatatwttttatcaagccaatacaaagtatataaaatttcccaggattttcattagtagactggtgctggagtctcactctgaccacatggcagatggctttgtgtagtgcacgaaaaagagagctcctcggggaaggggggaaggtaggagtgtcacaactcagtggctgactgtggctcatttgttcattgctttcagcacattycaaattattgctttttttcatgtgtccagttaaatagatttatctactatctagttttaactaaactaaccttcacaaaaagacacgtggtttaacgagtttcctgcaaagaaactgcagtttgaagataataccaatcatgaaagcacaagagaactttgaattctctgtcagccacattatggggtaaggcaacaatgacaatctaatctgatctctcaagaaaccaggcaaaaaataattggaaattatcagaagactatttgaaatatggaacccacaatttctaatgaaaaaactaaacctctcccaaagagcatgttgaattttgaaattattaggcagtgaccgaacgtttttataacttaaaaatgaataaatatttatatgtagggggttgcaagttcaaaaaaattgagaaggcacacaatcaaaaatgtttggagaccactggcctattcttgcttctaaaaatatttttcatttctttctgattatcctaattgtataaaacttggaaatgcaagaaagcatcaaaaataagaaaaaaaatcacctgtattcttaccatcacaaaataaacatttgtatttggtgaaatgtctcttctatcataactagtttatataaaatgtctttcatagaaggaggctgaacctaaaggaaaaaaacgttatagaacatcatgttccactataggtcactttggtctccatggagtccaagaaggtataccaggaatccagctatgggcctggttttgaacatctgactaacaaatttaggatgtttcactttatgtgggcatgccctatgatctcattccaggttataatgtgagtaccattattattgagtacaaagagattggtgcagcagctcatgtgctatcctaatgattacattaactggctcatctgggccctcagtgatatggctaaggagtcatgtttagattcctcagatgcagggtagcagtcctcctccagtgttcagtaatcctgaggaatttggagcatgtctatcaaatgccttcctttaggaaggaaaccacactgtaggtcctgtaatcacagaccctgccctggcttmtgtcagcataaacacgcctctcgttacagaaaccaccctcagtttcacaccagaagcttctctaaaagtttgttcttcatccccacagtgagasrtagctggtatttgaataatctcaacaccctcaaaaataacttctgacaatctgacttgaagcagaacttttcyataggtttggcaggatttccagttctaagattagatgtagcattctccccargcttttgggcctcccccacaagacaagggaataagaccccttgtaaaatccggacgttatagcctacaccagaggatgcagsatcctatcatgatttttctctccctcattttatgaggccctcacactcttgctctcctgcataccaggttgtccagtacttagggtgggacgaggaatttttatacatacaaaggctaaagaatgcaaatccaataatttatttgtttattttttatttttttctgagacagggtctcactctgtcatctaggctggagtgcagtggtgtgatcacagctcactgcaacctccgcctcctgggctcaagtgatcctaccatcttagcctcctgagtagctgggaycatgggtgctcaccaccacactcggtttttgtttatatttttggtggagatggagtttcaccacgttgcccaggctggtcttgagctcctgagttcaagtgatctgccagcctcagcctcccaaagtgctgggattataggcgtgagccaccacccttggctccataatttaagtgtcaagttcctctctcrtaacctttaagccagatccaattttaatgcatgtgatttaaacccacattttttaaaggatattttctccatatgctttggattgttttttaggagtggaacttgatttgcctacaatcgatgctagtaaagacacacttgcgatgcccccagctgatgtgaggggtgtagtcgatgtcaaagtgaagctaactgacccattccagcgctgaaccagcaaccctgacttccaggtcacagcyatcttttcaaataaaacttaatccaaaccctcagattgtttcctcccccttaagcatgttttgaagcagacctggaatgacaggagagwaaataagaagtacaacagcaaaaccaccacacctgctaacataatttctccatggatatattctctcccagtgggcaaaatggagctgaggaatgattgcaggaatgccttgggctactttaatcaacttagcctgtatttatttttgtacatctcaatccatattactaaagaataatgacccataccctctcttttatctctttattaccttgttaccctgcctttacaatgttcactacatacactcttcactacatgtcaatatttttattttcccactggcatttttattgtttttcaaaaygtgtgttgatactacttgccacctgaaatcctgacagtacattcaaaataaataataaatataaataaattctcctaaggttatgaaatcagttggaaggatagttaaggtctagatttaaaggcttaacttctcctttgttccaggacctgtccagaaagcaccttttagaacatgaagtctttaagcaagaaattacaagttctcccaaggaggcaggagtacagatgtgcttgtaagagagtaggggatagaaagatgagtacctttatgattgcttttcttttacatttcagattctcaatatgaacatttttggacctaggattaaagcaaagggtagctgttcccaagatagtctcttgtactgagttggattaggatgggatattggagctttcgatatattaaaaaaaaaattccttctaaagctgttccattgaagtttccgcagatattattgggaagctcaccaaacccagaagccctaactccagagagatggttggaatggaaaacaaagttaagaaatggtgggtggaaagttggcttttccccctaccataccagccaggagcaaacagaagacatgcctttaatttaaccctttgctatccctgaaaaggaaaaagtgccttatgttggatattccttataccacagaaaccctattggcctggctttagttatggtttcaaagcagaaaatattaaaagggggaaattatgtgaaggaagacattactaattggtatgagaaaggggacataaatttaccagaatatgtgattccaaccttccaaaaataaactgaggagtttatgagatgaactaacaaatggtcttagcacaggcttactttcttaataggtagaaatcaaactgcggatacaggttccccttcctgtggcgcttggcttcttaactgctgtgtgattgaatctaacgcatgatttatattatcagctctaaggaggccacctaattttaacatctatccattcataaagctgtgaaattcaatgactctactccaatcagcaaactaccagctccatggatggtatttcaggaaaatgccaagtaagagtctaacggatagcaataaaaaacttcttggctaggcacagtggctcatgcctgtaatcccagcactttggaaggctgaggcaggcggatcacctgaggtcaggagttcgagaccagcctgaccaacgtggtgaaaccctatctctactaaaaatacaaaattagccaggtgtggtggcgcatgcctgtaatcccagctattcgggaggctgaggcagaagaatcgcttgaacccgagaggtggagcttgcagtgagcccagatcgcgccaatgcacttcagcctgggcaacagagcgagactccttctcaacagaacaaaacaaaacaaaacaaaacgaacaaaaacaaacaaaaaaaacttctcaagaaagtaatctacagacagaaagtaaaatagaggggctctgctcggcagtaggggatgagagggactggaaggaatatgccatggtggactgggaatttcttgggttctaaaaatgcatgctggatgctctaatttccttaggctactgccctgcccctggggcagtgcccttggccaggaagcacttcttggcccctctccacctcccctcctggccccctgctacctcgatggtgtactgctcaaagatgcgcagttgcaggaagatgtccagcttgatcttccgctcgtggaacagctcctccatctgcacctgggcatcatcaagctgctgcaggaccgactcgatgtggctgatggagctgctgtggggtgttttgttgttggwcacagccgagtccctgtggcagagtggggagaaaaaagggagggagaggcctttccatgttaaaagtgacagaggaggagggggatcttcctcatctgagcaaggtggatgtgaatcagttgagtcattcaatcaacagacatttatcaaactcctgctgtgagcctgatgctctctgcttaatgagtgaaccaaagctacatgcatccttttttgggttcacaagtctatttccaagactagttgttctcctactcctcaagcaggattgtgaaagaaataagatgaaataatgcatgagaaaggactctacaaggcataaaatattagagaaatggaatggttccacacatatatgtagtctaatatgtatagttccaacacacacacacataaatctatcacaatacgtacagacaaacatamtaaaggcatattttaaaaaaaatcttcctagttttacttcacagactctttgttaaaacagatgatgtcatggttgccaaaattgtaagtatgctctttataaagctatgctaaagttatgggctggtgttattatactaaacaggctcaggctatacttaggaaagcataggatctggrgcctgcaaacctgaattaggtctctgctctgatacatttaggctggtggccctgggaaatcacctctctgagcctcagctgccttatctgtcaagtggacttaataatttctgccctgctcacttcacagtttgctgttaaataagagtgcacatgaactaagaccagtaacatgtatggataattattaatcctgaaaggacacaagtgaagtgtcaagtgctgatcaggagagtaaaggctagatcctaagaagctgggacaaccaacaaaggctgcaaacagttttgatttgggggtttgaagaaatggagaaacacagtcaagtaataggagggggtgcagcctcctctgagcaggcagagtctatacaaacgtagtagggagaggtgatgccttatagagggaagccgagagataaacagattgatttgcttagcaaaatgaggtggtgataactataatgggaaaatgatggtggctaagaagtttagattccatagggccttgagtaagctagagccctaaaacttgaaataaactggcacattcattatcttgtgacatcttagcttctcatacaatttaaggagtcaaaggacaaggggaaaatcatttacttccaatcatctcatcagcaggctttctgaaagccatgttcttttagcctgtgtttgtctcagaagcaatggtatttgagttcattctgtttctgaggatggcgtaaggctaatttgtcaagcacccttccgtctaccggtcacagggctccctattcctgcctcctcaccctggcctgtttgttgtgatacaggcacartttctactcccacaactgcacggacatscccaggcatgaaaataacatgagatgtactcagtgctatctgttatgtatttgttgagggctttgctgctgggaggatgtgattattctcttggacttctcctctcagtctttctccatcacaaattttccagaaggaaaggaaagattttggaccattttatgcagcactatgtcagtgtcacactcactaggaatcacagagatgatgcaaaagctcccttaggtgctctagtaacaagtgtcagaaagatcaggaagacatagggaagatgtttctggtgtgtgtgaggcatcctgtcaatgtccactaagcaccatttacttctttttctctttgacatgccttgatgtcagggaggggagcctaggctagagtcaggttactggcataatgaatggtcgccagtggctcttggtcatatgcctacggtactctctgaaacccatggaatttaatcttgcagagcaggcatcacccacattgttgcctttgccatcatcaagtagccttatgcccttaggcattgtgcaggtttacagttgttaagaacaagtggcatctccgtaggcctagccccacagaaagtgaagccagccaagcctgtgaaaagtwtttgaatagataacacaaagccatcacaaaattctagagctgccagagctcctagagtgaaccccttaattacacagacgaagcagctgaggcccagagaggttaaatgactgtccactattaggaattctcttcggaagcaaatgacagtggagtttcctagggaggcacacaaagctgtcatgtattatatattcatgaagataattaggggaagaaggaaaagaggctgtcttgttagcatgcaataggaggatttggagcatctcatgtgcatatttggaatagaaattattaatttccaacagaaaaacatgccagggccttctaaaggtaatttctcattgtttatttaattggacaactggtatgggtgaaaaaaaccctctccaattgacgtaattccctcaggccctagggatagcctgggacttgctgatgagattatttctgtccagagctggcagaggtcccagcactcagtgattttgggataggaaaaagtccctgtgggcaagcatcattagcacaatcaaatcctatttatacagcacctaggcatggggttggttgctgagggcttgcttaaggcctcatgacactttatctaaggagccagtgtccttgacaggggcagagaactagatattgatgccaatagaaaggaggcaatggcctgggtaattctaracaaatgaaaaattttagacaggatttgtctccttagttatgtttgtttaggttgatgcagaaggagttttattttctgggcagcaaggaatggtaaaaggtcataattgggtaacagggaactggtaggacaccaccacactttttttatgtcttcatgggtccaaagtcaaacatcagcaaaatgatctgattttgctgactggggcactggaggtcagagttcagcctaagaccagatgtyaaataacactatgttccataatgtctatttctctgcatgagcaaatatgccctaattcttaattattttttacttttgttttttttgtcttttgttaatttttgttgtatttatgttacttactgatggctgaataacatcctgaatgataaataattctttgaaacattaaagcttttccatttactattttattctagattcaagttgagtatggtgcaggcatttttacatcttacagataaagaaaccgaagctcacacaagaccacaaagcaagattttgctgagtcaagactgggacaggacttatctcacrtctagcccgaggcatttcccactggaaagctctgcccatgctgacctggcctcgctgggctccccgagggagggaggcgctgacctgagctgctggataaggtcttcgccttccttgatgacattgagtgtggcatctagagtggcggtctgctgctgctggaactgyttgatcagttcctggactgcatccacagaatctgcacagacatcctccaacatctccttctgaaggtcttccatccatgtccacaactgtagagagagagcagagattccactcagggaagatgggagaggccagggcwggggtgagggcaaggaagctagactggaatcacccaacttactctcaaccagtcagtgccattctcatcagcacaactatgggtcagtttgtgtttttacatttatattcatcaccagtctttgctaagtttactccattggtgttgacagtccctaaagacaggaatcacccctggcttaacttccctgtggtcagggaaacctacaggtatgatcttagagcaaggagatcagtcatctttgagacaccactaggaagaacaggagactagaatgaacgaatattatttcatctttcagaaaggaggaaagggagtaatgtactctgtgcacattgattcctagaaatgtatcataatattgcaaatacacaaagaatgtggtggtcaataagaactaaatgcacattaactgagcataacctgtacatattccatactattttgttctttttaaaattgctaaattggttagaaagctgaatgytaaagatgtggcttatcttaatttcaataaatataygagacattttcccataatattcaagatgataaaatgcaactaggtattactggccagacaactttaaaagagcaaagtatagtgttttgaacaaaataagcactggaaatgatgaggagtyaaaactgaattactgaaaaatcatttattgatagcttttcctcatcatactgaatacaggtctccagtggcctgccagagagctcacttttgactactttgagaattttcataaatgagagaggggaagatgagtctggtgtttgctttgaaaccaggagtgttcacctgactagcaggaaagataagctcagggctctaccaggaaaaaagccagtagagagagaaaattgatagatggagtcagaagatgcagattttggcttctgttcctcccgttactcatggtgcctttgcacaaatcactatacccttccatctccatgacatcatgtgtaaagtaggttggggaaagcacaaaataaattggttagtttccatctgattctaacatcttraagtcttccctgttaaaaacataggtaaatgtctacctcaagaatattatttcatcgagttggttctcagtatggtaaattacaatatggccttttcaataagggaagattaaaaaaatatagagagacaaaaatagtcttcaagattttggacaagttattctttgttccttagatagagaagccctagatgcggcagaagagrttaacaggaagattaataagctttggaggccatgaataagaaagtgtaaagaatgtcctttttgtacaggtgagtaacctcctgagccttagtttccttatctacaaaataggaataataagatttgccctgctcacttcaaagactgtgaggactgaactattttcttattattaatgctttagataaatttatggcagtattaataagcctacagcattatgctgattgctatagggaatgcaaattattattcagcatccctcacatttatcagcttgcaagtctggttgtaattagttcagtttatttccttttcaaataaaacaccaaacaagttttccagaccatataagctgggatacatgttgctgtgtgaatatgctaatttcaaatcagcataaaaccaggamgtacaggatattgataatgatagcttaatgtcacttcatattttctggctgtcgttttttctagagagaaaacacattttctaagtgtatttaagtctttagggaagagatgatggattctctgaaaaaatattgtacagagaggcagagtttcaggggccaggyacagtggttsacacctgcaatcccaacactttgggaggccaaggtgggcagatcacctgaggtcaggaattcgagaccagtctggccaacatggcgaaaccccatctctactaaaaatacaaaaattagccaggcatggtggcaggtgcctgtaaccccagctattcaggaagctgaggcagtggaattgcttgaacccaggaggcagaggttgcagtgagccgagattgtgccactgcactccagcctggggaacagagcaagactctgtctccggaaggggaatatcacactctggggactgtggtggggtggggggargggggagggatagcattgggagatatacctaatgctagataacgagttagtgggtgcagcgcaccagcatggcacatgtatacatatgtaactaacctgcacaatgtgcacatgtaccctaaaacttaaagtataataaaaaaaaaataaaaaaaaatacaaaaattagctgggcatgatgccgtacacctgtaattccagctacttgggaggctgaggcaggagaatcacttgaacccaggaggcggaggttgcagtgagccgagattgcaccactgcactccagcctgggtgatagagggagactgtctcaaaaaaaaaaaaagaaagaaagaaaagaaaatatacaataaattgttaaaaaaaaaaacaaaaaaaactctgtctccaaaaaaaaaaagtttcaaatcctagttctaccacatattagctatataatcttgggtaagttacttattctctctgcaccttggctttctttatcagtaaaatggggataataacagtgctttcctcacagagagttgtgataaagattacaaataagttgatatatgkgtgtatacacaaatatattatctatcttacttatcaacagtgtctgacatatagtcaatacttatcagtgctacatattattacatttaaaatatagttttagcttagacaacatggtaagacccagcatctataaaaaaatttttttaaaaaacacaaaaattagctgggcatgttggcacatgcctgtagccccagctacttaggaggctgaggcgggaggattgcttgttcccagcaggtcaagactgcagtgagctgtgattgtgccactgcactccacctgggtgacagagcaagactctgtctcaaaaaaaaaagaaaaaggaaaaaaaagatatttttgttgcaagccatctccagttcccactagagggcaaagggaaagtttgaagtagtccttcattttggagtttgtataagatcaacattgaatttggtccttcaagatactagactgggctgggcctctctattccgtttttgccactttgtctcaggataaccgaggaaagcctagaaactaaaaagtcttgatagttctaaaagaaaaatagatgtaaagagagagaggtgaaattgtggacatggtgcacacagtcactgcctggtggcagcaaacttaaattgcaagctcataattttgaataagcacctctgagatttagcaccataaggtagatagaaataaaagttggtgctactaaaccatgagtagagtcaatatcccatttattaggctgtaatttttctatctctctcaatgtcccaaaggtttcctctatgtatgtccctccgatttagcgctgaagaacatgctttgaaaagagtccaaattagagagacacttctgctactacttcactgattattaagcagtcagtgacatccagccagaacgatcttttctgtcaagctactacaagccaatgtctgctggaactaattaggtaaaatcatggagtgagtgaggtagcttggcagcagcaaccacgcgtgttttttcccccactgtcttccacgttggtttctctcccttgggtgatcttctttactttctgcttatctaaggtttaacattatagcactgtaccttcttcaccaacccaccccctccccagaaaagaaaaatcccatgtttcagccatttccagaccctctcttcttgatcaaaatatatgtatactatgacccttcttttagagtcccgctcacttcttggcaatggttgcttgctccatgctgatatatacatgtagatggttttgtgcattctttcttacagaaacacatgtagttgtggccaaaaatatctacatccaaaagaatgggtccaatttgagaatttctagaaccttgataggggaacagttaaaggagcctttccatgccctacataagattagctctaatagtgaaccagtgagttcagctagggccagcccacagaccctctcctgcttgcataatggggcagcctgagaaagcggcaactgaaaaagacaggaaggaaggagacaagagaggaagagcctaggaggtttgtaagaaaaataacaaggcttacggatgagtggttaaggaaagaggtcatttaatttcatcactttctcctgctgattggctgtttcatttgcacagcttgggcagccactgtgctgacaacaattgattaacaataatgatatcaacaatccttaaggatgttgaaaggcacaccatatccacmtggtgaacctcctcttccctcattttgaaaagataattttycctggacatcaaccaccagsttgtttcttaaataaacagtacaacagtacagcaagtaaaatagaggataaggctatttttgttcttaaagccatcatctctcttgaagaccaatttagttttggttccagagttggcggatagaggagcatgtgtatatgggagtgtctgtggtatgtttgtacctatttgagtaggaaatggtgtggcagaatgattccacaaggtgaaacaaatataagtgggtatttaattaagctgtctaataaagagcagaggctggttactttggccatgttccttatttaacttgacttatatttatactacaaaaatatctaaaaacrggtattttgaaagcccagtgactacagcatttccatggaaacacagcaaggaaagagaattctgtgatgacaatttctgcagggcaggtgctacaaatgccatgttcctggacaaaaagaatgaggactcgggtcaatgcttctcccaaacttgctctagctctccagaccagaaaacaaagctggctgccctcttggccccaggcaaaaagaatgtatttaagttcagcatgatttgtactagtagtggaggctctggatgtataagaaagtcccaagtacatgtttgttgcctttcttttttaagtagcttttctctataagtagggatgaatagttttgcttttgaaaaataacatttattggattgttcctgattatgaatttaaaatatcattgaagaaatcttgcaaaacaaaaaaaagccaaaaaattaaatctcccatatcaatcttaaattcttggcatatttacttctggtaaatattacttctggtccttattctatatgtgttattgaaattgtgttgtactggatatacagtttttatatattataccacaagctcttcctcatgtcattaataatcttcggcaatgtgatttagaatgactgtgtaatattttactatataaatgcattatgatttgtttaacgaaatcacccaatgtgaaacatttagatggtctctaattattcaagattatgactaacactgtgatgaaacagttagacatttttaaccctctcggctcctacaataaataaagaattcaagaggccaataggattaagcagacttgaatttgtagaagaaatgagcctggaggttatctttttatatcttcctcctgtttcctctctgatactcattagagtaaatcttttgatgtggaaagttggcaaaagtaaaattatgaactttagcctggggagtcctaggaagtctaggttaaatcatttataaaggtggatattcacttcccacttagaaatctcctacaaaaggggctttcattccctgaaaattatagactatgaggacattcttttacaaattggcaccaaggcaaaaactctgcaaattattataggaaggaagaaatggaggaaggaaagaaagaaggaggaagatagccataatgaggcagaaatgatttataacagtatttatcagcagtaccgaaggccactttagcaaaagttgagcagattttccttctattcactctattcacggtaagaaggaaaagcaaccacagcaactcaaaattccctaacagactactaatcctgtcttgaataaaaagccagaactttgcctatagagtcaagaggaaggagtcaagagttaatgaactcaggatcaaataggacccatacttagtgatgtttaagaggtgatgagtcttgagaggtattaaacagagtatggaaaaaccaaaccacaggagttcttccatgagaccattcaaggatgctcatttctgtcttctaataatccatttttgcctgctatatataggtcctaaaggaaagctcccctcagcaagttagattccccacccagcctctcttatttacaatatctggagagctcaagtcaaagaactgcagtagattaaaatgtgattgaagggactcttccctcatttttcttcttctttttcttttacttttcttaggagagactagcttcccattgtcaagtaaacccatttattcaatacttattgagcacctctrtgtatcagacacagtagtatctctagctacacatctaatgccacgtgtgtactacacatattagcactcccaatttagtgaaggagagaatcacagctcagtgtgaggtatatacagtgctctgctcttgtctgggtgaaagttggaagcacccatgaagaagttcaagaaaaaaaaaatgatgtctaagttgagtctttaagttcctaatttattaaagaaactttaaagaaacttcctactttaaagaaacactaagaaaaatttgggaggaagtttcctactaggaaaaaaaatgagtgttgtaatagtcatcctcataattattacaaagcaacagagattaagagtaattctcccaaaggcacaaagcataaraaaatagatctggaaatcagacctacctggcatccaagatcttgctgtacttagtgtgtgggaacatttgcatgtgtgtgtacacatatatgtgcatgtgtacacatatacatgtacatatacatatatgtgcatgtatacatacacacacaccttattttctaccctgcctagcaaatcacttaaaggggacctcatacagactggtttggatgggaaggtgaccaagagggaacatgcagatacaaagtcccactgcatgtcccctggaacagctcctctgtgacagccactcaaaatgttgcttttctgtccatcctgaaaaaaaaaataaaatctgtatgatcagagagttgtagatgtcttgaatagaatgagcctcataaccataaacccctttgtatacaggcagggctgctctaaatttctctcgtattttgggactgaggagaaagagactatgcaatttcctgatagcctcctgtttgaatgaattctctgatggaaaaaaaaaattcattcaagtctctgtttactagcctttatataaaagtctttgtggcaaaggagaaaaaagcatggcctttagagtcagaaagacctggggtcaatttccgtacttactacaacctagctataaaaccatgggcaaattattaatttttctgaactttggttttcccatttgtaaaactggaattttaaaaaaygagaattatcatggctatgaactagatagccagatagcctagcacatggtttgtgctaaataaatttcagttctttctctttcttcacctgccccctgtatcacaccactccttctagtagtatttcacatgaatgtgactttatagctgagttccagtgaggaaacaagtctcaggttcaaacacgaccaagcttagcaagatttgagagatatccrggaaaacaatagtcaataacttcctgactattcctgtctcccacacacccaatcctggcaacactgtgtatttctcagccaagatctgtcctacccattaagcccctgatttgsggtttagaaatgcaaaaaagaaaaataaaagtaaggagaaggaagaacagaggagaggagatagaaaaggaaaaaaacaagagtgtaggtaataggaagacaggtaaaatatctgctgtactactgagaaagtctgtaaccttagaaaagttattttctgaggcttagtctcctcatttaaaaatgtgtttaataaaatctatatcataagattatcatgaaggttacatgagatggtatatgtgtctggcaagtaataggtgtccatttaaaaaactcatgtaatatattttgagtgcttacaataaaccaaatcttaggcttggtaaatcacctatactacttcagcttaattattattattatttattatcactaccaatagcaaataaagaagaagagaagaagaatgaaatcttggattcacattagaaccataaggggccttagggccaagtccaactgcataattttatagataaggaaacccaaggccagggacatagtgacttgcacaagctcatatggttctttagcagcagaatctggtctagaatcccagcctactagctctgtgtatagcaggtgggagatgtagctagaggaattcctggaagccatggtcactcttttgggagtggtagttccatggaaactgaccccggtccaccacttctccatgcagccagcaccaccgcagccctcatgaggaacatgactcctgttcattcatactccattccatcacctacaggctcataattaaaagggaatacacatggctttggtttctgagactttcattaagaattgggtgagccactatcaagcagagaaccaggcaggaaaccctggattaatgctaatccccttgttttatagacactcatcagagagtggctgcaggtcccgcagagaggaagcaaatccagcttcagggagcttgccagcccttcatctgcctggggaatctcagtttagagaacactatcttttcatgtttttctctgacaggcgctgcaatggtttgcattcattccctcagtgtcagaaaaggctgtgaagcagtaacaaccaagattcttaatgcattcccaayattaaaattcaacttaattaagtagggctattttttttttcctgagcagcaatcaaactttaattaatactctattaaagggaattcctggggggggacacaagcatgcatacacctaatgagttcatctgccaaggctgttattagagatgatgctaaatgtgcctccttactggccacttattcaatttcagcatgtcccatgttaatcagaaatgaaaagcaatcataggtttgcaaccatcctcctctctatggggcccctctgctcttgccgcagcttaacataatctatccttccttctcctttctccacttggtgaattattcaggctgggcttcaagcccagccagcttccttggtggagggcatctcagtcccccttctttcaatgcctgtcactccacagtcaggcaaagtgaggaccaactttaatatcaccctgccacagacctcattaagaagattaaatcccctgttaaaaaataaaataaaaacacagaaaaaacacatctgtaaactctacatgttccttgctggtagtcctacaagttctgtgggactctcatttctgacaggaaacagcaaccaagagaaattgggtgtgtagtgggaagagagtctgtgatcctcttacatttcttcttgcagtgactattgctatatcagggattcccacatttctccagctgcagattgcatgctctagcagatgccccgaaaaccacctgtctccatgaccccytttcctcactagatattataggaggaaattttgccccattcggagagacctaaatgcaggctatcaggaatgaattgttaatattaccaaagttaggaagttagtaacccccagactacccaggaccctggtcagaccttcagggccattttactaggaagccgacctgaccctggcaggacagaatgccctctctccactagctccccttacctctttggtgtgtgtgtggaaggaaacagacatgtccagragaagcttccgctgctccaccctgcgcacgaagtcttggatgcgcacctccaggtgtcgagctgccttgtagatctcctcggggtcacattcccccgtctgagccaactgctctgctgcttctaggagcttgtccgcattggtgtacgtattctgccagcaacaacagtgaggcaaagtcaagttgcagtcgcgccttccagcagcccaccctggggctccccggagctgaagcggaggggcgtgggcgctgagctgacagctccctgatctggcactgaggcgcggtgcgcggagctggcacgccgcctctcagcaagcgagcagcctgcaggcgggcaccagctaggtgcctcatccacccctgggatttctcagaggtgcagtgtccctggaaagaagtggggagagcgtagagaacctccataccccagctgctccctatcccctaccttcaagaaaacccatcactgccctcacatctcaggctgtaactgccaggatcagaaatagcacacccacaaagacggtctgtatttccatgtgagaacaccagaaaaacactaagtgggagactcactttgcttttctcctcaagttccctgtaacyactggtgtttatctttttggaacagagctatttctttggaggggaagggatcagcaactctagggagctgacagaaggcagcggccacagccagagggaggagatgcaggctactccctgcgggcccagggaatgtttgcaggaaggttggggaagagtctggtgattttgtttatcataagctactgcatgcacacacatgcacacacagtcgtccaactccctatctgtacacaccatggtattctccagagcattttaaaaggcaaccgacttgtaattattattcatcaggatgggagccactgcctttagaatagttactacattatttgccgcagatacagcttttcctcagcaggcttctcattttgaaagtctcctgatatgtcctgacttagagctggtgactcaggtgtacatatatttctaagtatccctagagttggcacaaaactctagagtggcgaacaagcagagcagtcagtatcaaacacaaagtgagtggagaattgaaatggattcatgagcaatgactctctggtgctttgttttgcttatggagacagggtctccgtgtctgtaaggagtgttttgggctcacttgaagacctgggtgctatggactgaactgtgccccccactcaaattcacatgttgaactcctaatccccagtatctcagaatgtgaccttccttggaaacaggataattgtagacgtaattagttacattaagtttaaatcatactatagtaggatagatccctaatccaatatgactggtgtccttatttaaaaaaaaatgccatgtgaagagacagacatgcacacagggacaatgctaygtgaagatgaacgaagaaactgggagatgtatctacaaggctaagaatgctaaagactgccagaaaactamtaaaagttgagaaaaaggcacagggtagatttctccctcatattcctcagaaagaactagctctgctgacactttgatctcaaatgtctagcttccagaactgtgagaaaacaaattgttgttatctaagtcacagtctcrtggtgctttgttacaacagccccaggaaactgagackctagggttgaaactttcagaggctgtggagccagcctcttgattgtactggcataggacctggggaagatgggcaggcaaacacttgtcttggcttctaggaatttggagagaggcctcaggggatccataaggaatcctgcttgaaaagcaacttcccaaggtaaacatcgttccaatgctggtgagaccgggttgaaaaagagaaaaagtcatttacattgtcccaatgctcccaacacagggttgaaaaagaggaaaaatcacttggccccaactgggaaattcatggaaaaacagcagcttcatatgaggaaagtagttttgccactgggttaaagcagggtatgtcaattctggaaagcagatgaaggaagtcatccactcatgagagacatgcagggagacaaggggaatgacaggcaarggtagacctctacggctgtaggtcaggttaaagaaagctcttatgggattgcccacaatttctagtctatatgcccacagctgatgggagagaggkattttaggaatccctcaaattgtccacctttaatcctaaagagtctcaggattccccccgcaagaaccctagagattgtarctttatattctgtagacaataaataaaaatttgtggcaaagtcaaagtgagcttgcttgcaaattaggtttgggaccaataagagataaataaaaagccaaactgaactgtctaccacacgtaaggtgatcaatttgtcccaggattttcctggttttagcatagaaattcctgtgtcccagaaatcccctcggtcctgggaaaattgggatggctgattgctataatacatacccaatattgtaagcaccccaaaagtacagataaatatataatgtattttgtctcaaagaagaattaaaatcattcttgagagaaataacatgacaatacataagatggggcaggcagyaaactaatagataattaggggttaaaatttcttgatacgatatagatgctgaagaaaaggagtaaaaacagaataatagtagctaattattattaaatatttcgcacatgacaaggattgttctaaaggattttatgcatgctatctcctttaatcctcgcaataaccctatgaagttgatgcagccatcatacccattttacagatgaagaaactgaggtacaaagaatttcgggccaaagtcacatggccagtaagtggcagaaccaggattaaaaccctgttggcaggcttcagagcccaagcaacaacccattaaattaccctgcctctataagaatataggcaggagtctgaggatgggtaggatttagtagagagggagaagggcttctcatagccaagcctgtcttctttctgcacccagggtactctatatttagcccaccccacagccatcatcacactttatagtaacaatgtatctccatggtatctccctactggtctgtgagctccttaaaggcagtttccatgtcttactcatccttggttcccccatgccaagtgctgtggctggtatgcaataggcatttactaaatgtttgttgaacaaacaagacacaaatgagtaggcctgtttgaataagttgagtcaacctgaytaaaattggagagtggcaaaaaatcaggttggataagtcagtgaagagctataagatacattttatagagagaatggaacaataaagacaggtgggaaggcaatggggtcagtgttaaagctgggccctcagctttgtctctgcccagctctcttccccattactagtagaaaagagtttctaaaattcagacccaatcacaactgtcttctacttaaaactgttcagtggcttcccactgcctttggggtaaaatgtcttgacacggtgtgcaatgcccttcttcacctgacactttttcccttcagcttcaacccacatcacttccctacaaacagcctatgaagtaaattacttgcatcccccaaaactcactgcactgaatcttgcctctgtgcctttgcacatattcttcttcagcctgagatgcccttcccttcactcttctatttgaccaactcttattcattctttaagacccagcaagggcattgcttcttctaggaagtccaccctcatatcctcttctctcccaaggctagcttatgtgccctcctctggactcctagattgatctataccaaccctctccatggtacctgctactttctagtgcaaatttttgtctttctcatctgcttaggggcagataatgtctttcatctctttcccttagtgtctggcacctagtaagtctccatagatatttagtaaatgaatgaatgatttaaagacgatatcaacctccaccaatgttaatattcaaccctcactcctcatcaactacctggtacaagaccttacatgctagaattcatgttcaatgttcaattttatttggtatatcctacctcctggcacagccttgaaatagaaatgtgtacagaaaatatcaactaaagtattaccaaagcaatactttgactcttgtcaatacccccaaattggggcaaggatcacaacaggtttctgctcactttctgaccaaatcaacaacagcttttgactcaaagccagagtctgaccttgctctgaacatatttcctaggcattctttggtttcccagtctcctagtctctgccttggacttgaccccttattgacatttcccaacagatatgccaaaaatgggttatgagtgctggtgtatagatccctcagctgttggagctttcaggtaggacctgtggtagacagagcccctcattcagagatatgggccacactgatggctacagttcctgttcttccctctccaacaccccatgactgtgtcaaccaggtatgatgccctaaataattcagcccttaagtctaacttcaaacactctgctgaagccttggcccattacttttaaattttctccccagggaagaaacagaacattctaggataatttgtctctgaattccagcaatacaggtatgttttcagattccctgggctgaggcggagaagcaggaagcaggctttttaaaggcaaggggtgggagagacagtgaataaaaacactctagaatcaagaggctacttccttggtaatatgaagtgagaatcttggctttatacctgggaatgaggaggatgaggcctgaaagtcacccttactattcaaaagaggcaatgtagattgaagaatgagactaccagaggagtaggagaaaatgcccctcacagtggttatttttttcaggccagcatggctgaaaccaatacgtaatgagatgaaaggaaaaaaaatatgtaagcattaaagacaaaggagacacaaaagcataggcattggggagggcagcaatcaagataacacccaaaaccttacatttgaatagtactttacagctgacaaatctctttcaccttccttctttaccctctctggggcagacctgcaaagaatccatgtgtgaggaaactacctgaggctagagaaagaaccatctgaaagaattagagataacagtgcctagcactcatacagttagaaatagcacctgctcccaccagtcagcctggaaaacctcatggttcatgggatgttggatggagtacccagaagggtcagaagggtaaataagtagacttagaatgagaactgctctggtcctgcctagtacattttaagagaacgacctgaacagatcaatttttttccatgtaactttattgtgtctcagaataaagcttaagaatatttataggaatatagaaatatccacaactgacaaggtaaaactcacgatgtctggtatctagtaaaaaattaccaggcgtgcacataatcaggaaaatctcacctatgagaaggagaaaaatcaatcaatgaaaactgacccagagctgaaatagatgttaagattagcagacaagtattttaaaatggttattataattgtattccatatgttcagatagttaagaaataaaaaaatttttaaaaaatcccttgtacttttaaagatgaaaaacattagactgtattaacagtaggttaggctttgcagaagataaaatgactgaacttgaaaactgcaatagtaagtatttaaactaaaatactgagagaaaaaattaattttaaaaataaagcatctgtgagctatgggataacttcagacaggccaatatccatgtaattgagattccctaggagaagaggagggtattggaaaagatacctaaagatataatgaccaagaagttttcaaatataacaaaaactataaatccaagaaacccaacaaaccctcaacacaagaaacacaaagaaaactacaccaaggaacataaaaataaaataaagtggcaaaaaagggaaagaaaagaaaatctttaaagtagacagaggaaaaaaagacaagctatatacagaggaacaaagataaggatgatagcagacttgttattggaaacagtgcaagcagacagtggagcaacatctttaaagtactaaaagaaacaaaacaaaacaaataaaaaaaaacaaaacctgggaattctgtgcccagcacaagtattttcaaaaacaaaagtgaaataaagactttttcagatatacaaagatgaaagaatycttcactagcagatttgcaagacaagaaatgttaaaagaagtccttcaggaagaaagaaaatggtatcagatggaaatacagatccatacacaggaatcaagagcactggaaatactacaagggtaaataaggtttttttcctcttattatttgaatctatttaaaaataattgattgtttaaaaactaatgataacaatgtagtgtgggatttatggtacatatataagtaaggtatatgacaacagcacaaagaccaggaagggagggatggaagtatactattgtaaggttcctatactttatgtaaagtggtataataccacttgaaggtaaactgtgataagttaaaatactataaaccctaaggcaaccattaaaataataaagagttatagttgatcagccaacaaaggaagtcaaatgggatcataaaaatattaaattaatccaaaaaagcaaaaaaagggaggaaaagcaacagatgaaacaaatagaaaagaaaaaaacaaggtgatagatttaaatctaaacatatcagcaatcacattaaatataaatygtctaaataacacaatcaaaaggcagagattgtcagattagataaaaaagcaagtcccaattatatgctgtctacagggaatgcactataagtacaaagacacaagtagggtaagagtaaaaggacagaaaaagatacagcatgataacactagccagaaaaaaagctgggtggctatattaatatcagacrtagtagattgcagagtgaataacattaccaggaaaaaatgaataatattatcatttgataatgatcaaggggtcaattcatcaagaggatrtaataaccctaaacagttatgcttctatcaacaaaagttcaaactatgtaaagactgattaaacccacaaggagaaatagagaaatccataattatagtcagagattctatgccccctctcagtaattaatagaacaagtagacaggaaatttgtaaggatatagatttgaacactctcaaccaacgtggtctgacatttgtaggacactccacccccaccccaacagctgaacgcatattcttttcaagtgctcacagaatatttaccaagataaaccatattctcagccatagaatgagtctcaacaaagttaaagagatgcaagtcatacaacatattttctctgactataatgtaattaaattagaaatcagtaacagaaatattaccagaatactcacaaattattggaaactaaataacacatatctaaataacccataggtcaaagaaggtggcatcagttaaccaggtgtccatagtatgctatgcattgtgttaggttctttatcgacattatctgtaagcattgggatcaatcataagataggtattattaatttcattttacaaatgagaaaactgaggctcagagacgtaaaataacttgtttaaacaatgttttataactagaaaatggcaagccgagtctctctaactataacttccagtacttttcactgaaacatgtacttctccaaaactcactataaaatctccagctcttctgcttctttattactttgaattacattcattcttgggcctttggtttttaaattatgacattgtaattgtgcaygtgcaacagcctttttttttcttttgcaatacactccttttgtgtgcatgttgtcttctaaggagaattgtattcactttaaaggaaagagtccatcttactcatcttttctatctcaactattcctcgatgtacctagtgggcatagtgctctcctttcaatagtcactcaacccaaaaactctgcagttcagcagcttgtcagcagtaaggtgtcacatttcccagttccatttagcactcagaatgtgtttgccatgtaaatgaaggttaggatcccaggataaaataaagcaattcagttgagcacataataggtttaaaatatagtactgacatagcacattgtctatgattaaggagggtgatatagaaaaatgcttttcagttttcatcctagaactccaggaatatatttctcctccatctgttggctcttgtagtggggaaggggatgaattctgggaatggcaaagtggtctttggtggaaagaagtaagaagaaacagaggaaattacttctgggtaccagtgatggtttgacccaccacattacaactgctgaaagaacaatatcttcttaggtgccctgaataagggaacaagtaagttccctccattagaacaactttatgtccaaataagaagtgtctaaggagtaccctaaagagatgcaccttaaagttgaagactatgtatataaatcttcagttactaattgggactgatactaaaaataactattgcaggtgycaatacctcccaacacaagtagtttcggtactgagactatctctgaggacttaaacaccaactttatcacatttacataygtaataatcaccctgtccattctcacacatctctacttgctggagactatttttctttatatctaaaatgctttagcaccttttcctataaaaggcwtatttttagaactccacattttttttaaagtaaagttttattttcctacagtccaaccgtgtgtgtttaggaaggtacatgggcctagaaattctgagaaaattatagtagttgttctttgctggggtgctctctttcactgatcccttttctttctttctcaataactctcttcatttacatattattgctttaaaggaccttcaaaatattccctcctgactataaactagaagctaaatatctggtcactctgaggcaggaaagcaaaagaaataattaactgttaacattttatccatgcaataacaacaacaataaaataccttgtttgtggattaaaaggcaaagtcaatcctagaggttgccaatactagttacaaggtataatttgacagataacaccaggtccagactgtaagaaaaatacagtccagattccagaaaacatggccaccctctggggcctgagacatatagcagggaaagattctgtccctgacctctccccacctagcccaccaaggaatggggagctgtggaaggcagagtcagggctgtaagctgggcctaggggagccaggactagcacttagaatgggacacaaagaagatggtgcagagagcaaggggactagaggccagaggttggcccagagctgcttcctgagacaaaccagagggaacaatagacagcaaagatagctgagcaattaggagaccaaaatgaggcgtgcgctatgcagacacggagctctgaagactggaggaaggcttcctccttttcccactgagcaggccccggatatagccagcgggtattcatattgctgctcggaagcaacccatctctcctggaatttgataacataatctccactcctctggtcaccctctcccttccctcatttccctctctctattggaaatggcaaaacaatgaaggggaacatgtagccacaacataaaaatgtggacaaaaatattttaaaagtgaagaagatagacttaaatatacagatgtggatacatagactgcccagtgaccccatctcggcagaaattyattcttgcatggaattcctgaagccaaagaaacaagcagttggtgagacagcatccccatggaacagaataaggctgcctgctgcaaggtttggcaattcaagaggtatggggggaaatgtacccacagcaatgttctctctcaaaagatgtaactttgcagtgttgctgtttttcctgttttctgtattctatgtttggctggcagtgggagggagtgggtgtcagagagagaagactgggctttggagagacaagacagttggcttgaaaatactgctgaaaactgtggggcttgtggatttatttttctctcctgttccattcctaacggaggaaaagaggaaaaggctgttcctgacgtggaaaggtgggtcagatggtgaggtgaccaaatcagagggtttggccacacttctgcttctatccctgttagcatagtgctctttcaagtcctttcaccctgttttggtcacatatatctctgttgcctgaggttatgcctatatacatctgtaggaagcccacagcctctgatataagagcaaaggtacctgaccctcttaaagacgatgctcctgctccctttccaccttcccagactctggactctttttaccttagaccattcatgctgctataacaaatgctttacaatgggtggcttatacataacagaagtttatttcttacagttctagaggctgagaagtccaagatcaaggtacccacagattcagtatctggtgagggcttcaattcctggttcacagatgatcttctcactgtgtctttatatggtagaaggaactagctagctttctagaacctctttaaaagggcactgatcacctcccaaagttcctgcctcataatacaaycacattgggaattaggtttcaatatatacatttggaggaaacacagacattcagaccatactgctacttgccctgggttttaccttagttaacctccctgggcttggtccacagattatgtggaacagagtttctcaacagtaacaccattcacattttgcactggataattctttgcttgtggggctcttgtgggttgaattctgtccctgcaaaaagatatgctgtagctctaaccccagtaccttagaatgtgaccttatttggaaataacgttgttgcagatataattagttaagatgagatcataccgaaataaggtaggcccatagtgtggtatgactggtgttcattcatatagaaagatgtccaaatgaagatacagacatacagggagagcaacatgaaagctgaggttggagtggtgcagccacatgccaggaaacagcaaagccactagcaagtcactggaagctaagagagaggcctggaacagattctccctcacagccctcagaaggaacaaccctgctaacactgcaatctcagacttctagcctccagaactgtgagacgataaatttctgctgttttaatctgtgcggattgtggtactttgttacagtagccacgggaaacaaacacgggctgtcctgtgcactgtagaatgcttagcagcatccctggaatctacccacaggatgccaatagcaacctcttccccagatgtaataatcaaaaatgtccccagctactgtcagatgtccaggtrgggtagaagtcggggggagacaaaaattgccttccagttgrraaccaccattttagaccataagaccatagaggaagctgtattgagaaagatcatacaaccttcccagtttacagtatttttctgataatccttcagatggcagaaaccttaaggaatcctctaatccgtggttctcacaggacagggggagggggttagggggttgagggccaaggggtatgagggataaagaaaggagcttggagggacaatgcagggcccaggctctgctccaggttatgtaaattaggatgggctgggggagggagttgcgggaatgtctggcagccacatgttttaaaagctcccaggtgactctaattgtagccactcatctaccattgaaaccactaatctaccattgaaaccgctcatccaagggaagggctcaaagcctgggctgaaattccaacatgagagaaatctagtcttttgccttgaaattgctcagaacttaggacagtgatctatttaacactttgtttggcagtttaaaaatagtaactgtgggttatagaaatgaaaaccagaaatgaccaaaatgctcaacaatacagaatagttcactacactgtgataacacgtgatagagtattacccactcactacaattatgtttttgaagaatatttaatgaaaaataaataataaataaaaaaaaataataaaaaagttcttaatgtaatgttaaatgaagaagtcagaataaaccaaagtatggttctaattttattaccaaaaaaacttactactgataatgataatgattatgctattatatcatattatagataagaaaactgaggattaaaaatgtaaaagaagctcacataaatagttgatgttgatctggaattcacatttgtttgatcctgggcaaaacaatcttagtattctgctgtgctaaatggaaatttatcaataaatattaataatgattatgtctcagtgatagagataaattttcttttccactatttccttgcttcctaattattccatggtgaatatgtattagtttcataattagaaaaaatggaaaaaatcacttaaatataaaaattatatgcagggcattgtttagaaattactccaatgaagaaaatgtggtacatatgtacaatagagtagtattcagccataaaaaagaatgagatccagtcatttgcaaaaacgtggatggaactggaggtcattatgttaagtgaaataagccaggcacagaaagacaaacatctcatgttctcacttatttgtgggatctaaaaatcaaatcaatagaactcagggacatagagagtagatggaaggtttttagaagctgggaagggtagtagggagttgggggtaaggtaggaatggttaagagctacaaaaaatagaaagaatgaaaaagacctactatttgatagcacaataggatgactatagtcagtaataactttattgtatatcttaaaacaacttaaagaatttaattagattgtaacttagaggctaaatgcttgaggggatggacaccccattctccatgttgtgtttayttcacattgcatgcctgtatcaaaacatctcatgtacatcataaatatatacaccaatatgtacccacaaaaaatttaaacatagtaaaaaattttttaaagaaattattccaaaaagtaagcagaaacatttgttttgcaaatgtttccttatttttgtaagaagaaaggtgtgtaagactattggtaggaaggtaaattagtatagccatcatggaaaacagtatggagtttcctgaaaaaaataaaaatacaattaccatacaacccagcaattctgttactggatatatatccaaaggaaatgaaatcactatgttgaagatatgtcttcactctcatgtttactgcagcactattcacagtagtcgagatatgaactcaaccttcaagatatgaactcaaccttcgtgcccatcagtgaataaatggatgaagaggayaaagggtcttcaaaaagttcataggaaatgtrtagtacttaaaaggaaactatgcatggatttcaacttttttacaccaaaataaactcatactaacttgtcataacatacctgaacaggaagtagtttgaggtactaagaaggataagacatcagtttcaaacagccccaatcagagcaacatgaattctgctaaaattgaagcaaggacaaacatcaaatttatggtgaagcttgggtggaagaatggtgaaattatttatgctttataaaaagtttatggggacaatgccctaaaggaattggcagtttataaatagctaactcattttaagaaggagtgaaataattttgaagatgaagcccgcagcagcagaccatccacatcaatrtgtgaaaaaaattaatctcgttcatgcctatgattaacagcagaaataatagccaacaccatagacatctcagtttgatcagcttacacaattctgactgaaaaattaaagtagagcaaattttccactcaatgggtgccaaaatgattgcacccagatcaggtgcagacaagagtagagtttttaatggagattttaaacaagtgtgatcaagatcctgaagtatttctttgaagaattgtaaaagaaatgaaacatagctttaccagtatgatcctgaagacaaacacaatcaaagcaatggctaccaagaggtggaagtgggagcctgtcaaagcaaaagcagactggtcaagagcaaagaccatagcaacggtttcttgggatgctcaaggcatttcacttgttggctttcyggatggccaaagaatgataatatttgtttactatgagagtgttttgaaaaaattacccaaagctttagcatgaaaatgcccaagaagcttcaccagacagtccttctcccctaaaactatgctcctgctcatttctctcagctaaatasggttattttttttttgagaattttgatgggaaatcattagatatccacgttacagtcctgatttgggtccttctggtatcttttttgtatcctgatcataaaaaaaatcttaaagggcatccatttttcttgagttaagaacatacattgacctggttaaattcccaggacctttggttctttagggatggactaaatggctggtagcatcacttacaaaggtgtcttgaacttgatggaacttatgttgacaaataacgtttatatatttttttatttttaattccattttccataaacttttcaaagtgctgtcatatatagacaatggaatactattcagcaataaaatacaataaaatggartactattcagcaataaaaaaggagatcctgtcatttttgacaacatgaatggacctagaatatgttatgctaagcgggatatgccaggcacagcaagataaatactgcatgatctcacttatatgtggaakctaaaaaagttgatctcacagaagcagagagtaaggtggttaccaggggctgggataattgggggtggtgaggtggggggtcttgaggcgggggagttggggagatgttggccaaaagatacaaaatttcaattagatagaagaacatgttcaagagatctattgtacaacatagcatctatagttaacaatatatgtattcttaaaaaatcctaagggagtaaatataaagttcyctcaccacaaaaatgataactatgtgaggtgatgcatctcttaattagctatacattattcttcaatgtatatatatttcaaaacaacatgttgtacatagtaaatacatacatacatgtttctgttgattaaaaaataagaaatttaaaagaaaaagagaaagatgtgcaagataactgattaccttgggagtctgaaattggaaagtgggagtggaggaataattagctctttacacatctttgcaatgttccacttgttattacaataaacaagactttctccaaaatttgaaaaacaccaaagaaattttaaaagggaaagataaggattcaatatagttttgtcaattgacaggtaaaaatgtgagtgcatttagaaatacaaataaatttcattacaaatatatttatcttaaagatgaatgcattttctagtyatgtagagcctgaagacacgaatgcttggagaaatacaataaaatagattggtgtaaggcaaaggacaaaagagtgtcctctccctctccctctccctctccccacggtctccctctctttccacggtctccctctcatgcggagccgaagctggactgtactgctgccatctcggctcactgcaacctccctgcctgattctcctgcctcagcctgccgagtgcctgcsattgcaggcaygcgccaccacgcctgactggttttggtggagatggggtttcgctgtgttggccggccggtctccagcccctaaccgcgagtgatccgccagcctcggcctcccgaggtgccgggattgcagacggagtctcgttcactcagtrctcaatggtgcccaggctggagtgcagtggcgtgatctcggctcactacaacctacacctcccagccgcctgccttggcctcccaaagtgccgagattgcagcctctgcccggccgccaccccgtctgggaagtgaggagtgtctctgcctggccgcccatcgtctgggatgtgaggagcccctctgcctggctgcccagtctggaaagtgaggagcgtctccgcccggccgccatcccatctaggaagtgaggagtgcctcttcccagccaccatcacatctaggaagtgaggagcgtctctgcccggccgcccatcgtctgagatgtgcggagcgcctctgccccgccgccccatctgggatgtgaggannnnnnnnnnnnnnnnnnnnnnnnnnnnnnnnnnnnnnnnnnnnnnnnnnnnnnnnnnnnnnnnnnnnnnnnnnnnnnnnnnnnnnnnnnnnnnnnnnnnnnnnnnnnnnnnnnnnnnnnnnnnnnnnnnnnnnnnnnnnnnnnnnnnnnnnnnnnnnnnnnnnnnnnnnnnnnnnnnnnnnnnnnnnnnnnnnnnnnnnnnnnnnnnnnnnnnnnnnnnnnnnnnnnnnnnnnnnnnnnnnnnnnnnnnnnnnnnnnnnnnnnnnnnnnnnnnnnnnnnnnnnnnnnnnnnnnnnnnnnnnnnnnnnnnnnnnnnnnnnnnnnnnnnnnnnnnnnnnnnnnnnnnnnnnnnnnnnnnnnnnnnnnnnnnnnnnnnnnnnnnnnnnnnnnnnnnnnnnnnnnnnnnnnnnnnnnnnnnnnnnnnnnnnnnnnnnnnnnnnnnnnnnnnnnnnnnnnnnnnnnnnnnnnnnnnnnnnnnnnnnnnnnnnnnnnnnnnnnnnnnnnnnnnnnnnnnnnnnnnnnnnnnnnnnnnnnnnnnnnnnnnnnnnnnnnnnnnnnnnnnnnnnnnnnnnnnnnnnnnnnnnnnnnnnnnnnnnnnnnnnnnnnnnnnnnnnnnnnnnnnnnnnnnnnnnnnnnnnnnnnnnnnnnnnnnnnnnnnnnnnnnnnnnnnnnnnnnnnnnnnnnnnnnnnnnnnnnnnnnnnnnnnnnnnnnnnnnnnnnnnnnnnnnnnnnnnnnnnnnnnnnnnnnnnnnnnnnnnnnnnnnnnnnnnnnnnnnnnnnnnnnnnnnnnnnnnnnnnnnnnnnnnnnnnnnngaagtgaggagcccctctgcccagccagccactccgtccgggagggaggtgggggggtcagccccccgcccggccagccaccccgtccgggagggaggtgggggggtcagacccccgcccggccagccaccccgtccgggaggtgaggggcgcctctgcccggcggcccttactgggaagtgaagagcccctctgcccggccaccaccccgtctgggaggtgtgcccaacagctcattgagaacgggccaggatgacaatggcggttttgtggaatagaaaggggggaaaggtggggaaaagattgagaaatcggatggttgccgtgtctgtgtagaaagaagtagacatgggagacttttcattttgttctgcactaagaaaaattcttctgccttgggatcctgttgatctgtgaccttacccccaaccctgtgctctctgaaacatgtgctgtgtccactcagggttaaatggattaagggtggtgcaagatgtgctttgttaaacagatgcttgaaagcagcatgctcgttaagagtcatcaccaatccctaatctcgagtaatcagggacacaaacactgcggaaggccgcagggtcctctgcctaggaaaaccagagacctttgttcacttgtttatctgctgaccttccctccactattgtcccatgaccctgscaaatccccctctgtgagaaacacccaagaattatcaataaaaaaataaattaaaaaaaaaaagaaatacaataaaatatrcaatcacaaaacatataaaatgtctctgtagccccatcagacattacacctttcwcagtttggactttatgacattgcttatcatagcttagaagaaacatgatgttggtatgacacacatatgcaaaaaaaactcactaaaaatgatcacctatgaagtcctagaaattattctccctaggcacaatgccagcattagttattcataaccctgaattgttttcctcagccatcagaagtaagaaacatgtcaaatttgaaagtacttaaaagtgaagcaggtgctctgatcacacccctagagcctatgtctgaagtggcactgtaagttttggttgaaagccttccctatcaccatcatataaatgtcaaaagccttagtgtcatggcatagaactaacagcagcacagaatgacaggcagggagtctggaccttgggttcctccatgtgtgaaactgacaagctaatatagatttaaatgcttaggccttttaaatgagaattagcaacacaaacatggagtaatgcaaagtgaaagggataacaggtaacactcagatctagaagaatcatcctctcttgtctagtctcattggttcactctaggattgggctatcagcatggctttagaaagccaagtccacttktatctcaccttcctcaggtacactgttaaaatcatcatcatcatccagcagaaatgtaggtgtcaggcacacggctgctctagagactgtatagtagctgattaggccccgtggaatgcagactagccctagaaccatactgtagtgttgggagagacacaacagtgagtagaaatagamaaacttagcttctgcagtggctctcagggtgtctctgctcatgactgggatttgtggacattgccataggtaccccccttcatttttaaaggggtgaattatgttcagaatgctcagtatataaggcatggaaaaacataaactgtatttcagagttcatcatcaataaaaacaaaaattgacaagtttctccttgaggtgcctagggttaagtcttggttctctacacaattaagttatayagaccccaaggacatgaaagaaatgaagggtgacagtagcacaaattagcaatataatgctgaggtcatacttggtaaaggagtgaccagggcaggagggataaggctggagaaattttcaggaagtgactttttgagccaacttaaaagcctagaatgtgaagccaaagagtagtctactaggaaagggaatggcaggggcaatagtacagatttggaaagctcactgtgggagcacagcagaagtgtctaacagctctccaggcagaacagctgtcctcagagaagcacggtttgagagtcagagaccccagctgcagtcctcactgtgggataagccctaatgagtggctgtctggtgtggaaagctggtgggagggagtcagaggagagaaagacaagaggaaggagacctatgctaatgacaaggccatctgcacacacttctcaaacagggctggattgggagatttgctttaggacaaaagagacaccacatagccactaaggactgttcaccatgcactgtcggccaaaacccagggccatctgggacctctggctccccactttcaaagcaggaacatgttcttcccacttcctttccttaggagattaactgaaaagacatagccattgcaacatttcctcagagcagagaagctgcaggagatcaaagtctccccacataaagctcttcagggaaagggcagaatccaaatagctgaagattggaccatgagacagggaagggtcatgaggttcaggctcccatcccatcattcarctaattttctgaaactcttgactgttcctgacwttcacaggccaagagctatcttccatgaccacagactataccataatcctcacagtcacaaaagcmtaggcaagaaccataagtaattccatatgaatccaccctccatatgagaaaaagaaaattaagcagtggtgttaatgtggatggtgacataatgaaacaagaacaagctggcttggaggcaggatctacctaggcataaataagttcacagaacccccaaaacgtagatataagaagcactgtagcactcccttgctgtcttgaagtggggcaacactgcttgctgttgagaggtcactgggcagggctgcccatttttctctgattagaagggcagggaaaagaaactgatggagaactctaaatgcaaagcatcatgctgtttccacttacaactgcttttgccccaaagtcctactgacctaaacttatataaataaacatcagaacagggagagattttgctcattaaatcattagctttagctttagaatgtggaaagtttcctggctaatcctgctacacatgggaatctggccytcaaacagtgaaagaagcccagggcatcaagagttcagttaaactcagagactggtcagcacattccctctcttgggaaactcctgggatggggcaatatcatcaatctcttctatatctttcttcttttctgggtgtgttccagacatgatctcatccactgtcaccatatcccctgaaaaataatgatggcaatttacatttgctctgtgctctagacttaaagtacttttaagtacattatcttactgcatgcctacttcaactgaaatggaatagatatcattcccattttgtagacatagaaactgaggcttggcaaggttaggggagctgtacatataggtggggtagctctggcctcccatccaaatattataatccctgtatacttctcactggatcttgttgcttcccacaaggaagaaatgcaggaagaatctgcaactcccattttgttgatggggagattgtggcactaatttttcaagtgatctttgtgtgaggcatagagtgaagaaagggaaaatctaggaaattatccttagtccaggtcatctggcaccctgaagtcatgataaaatgtagtttcttggagtaaatcccaaactttatactataatttttttaaaatttattttatataatagttgtacatatttttagagtaatgtgatattttgatacctgtatgtaatayacaatgatcaaatcagagtaactgggatatccaaaccttgaacctttctaactttataaacttgcaaagtttcatcagagtgacagctacagcggatgaatcagactcaagatctacatccaaataatcctattctcttagctgtatttttttaagcaaatgaaactgaccttgggaattcccaagacactaaagagtccataggtcaaagcctcctaaagaaaaagaaaaatgaaacatgtccatcatatggatttggagttcccattttagcctcttccatggcttccttcccttggtgatattttaaaattctaggcaggtgatgagccaaagtccaccggagctatttcaawccatatttggcattgccgaggctcagatatattgtgcaaaatagcccatggtgtgaaacaccatggagatatgtaattatagctgaagttgccagtatttgttttgttggctcctagattgcagcaggacagctgcaccaatctctatttaaatccaaagggcagtaccttgggctagctgggcatatgccttgtgcatcccaagacaaataaaggcaccaatcctgatgaggcttggatgtcccctggtatctgcagsaggccataagatctcagctccctctgtctcaaacctggctacatttccaggtggaataactcagatgtaatgatctgttcctgtcacaacttgaragtgggcttttctcctgttaaaaatttattctgaacaaaattggtttatgaaaatgcctccagttgctcattggcagagaaaaaagacagatctgcctggtgggttgctcttgttggtgatgtgtgtttattttttggtttgcttaatatactgcctgaagcccttttcctcagggctctttgatgctggttcctttcctcattgcctgcaccagctgcctcagctacccacatgttctcaaatctcttacccatcagcccccacaacctgatttgcccccattaccctgaatgccacggccaggaagtacttgcctcatggaggtctcaggggggctggaaagcattgcccacctcaaatcacacctggaccagcaggaagggatgaaggaggaagaggaagaggagaaggaggaagaaagaggctacaaatgttrctgttctgaagctctccccaccaccgctgctgccaccatcactactccccacccccactgctgccaccatcactactccccacccccactgctgccaccatcactactccccaccccagccggttttatggactcagaaggtcctcatagccctgtaatatatgcacacctacaatgaggaactggaaaggcttgggagggttcttgtaaattgccattctctgaagctttctcttgggaagaaattccgaatgcttggcttagacccagccctctgtcttcaatgctaatgttgcttctctttacacacttataactgtacctggttttaatagcctgtaagttactagaatctggaaaagaatataaagttttaatattaaaaatgccactagcaaagaaaaataacattgtagatatgcatctattaccatggctatatcattaaatgagaaaaactggttactaaatgtacctatatacacataaacagaggaataactgggagaataaacagaaagtattagcaactgttagttagacaaccaagtgggtggattatttctgtttctttttgcttgtctgtatgytttacattgaaaaatatgtaactttgtaattaaacataaaaagataaataaagtagaaacttcctttagaaaaaaatcagaaggaaggttgactaaccccagtttttttaattcctcttgtgtgtgtgctagaagtgcaggctctgaggtcagcctacctgggttcacatcttgccacctccacttgaatgatcctctctaagcctgattcctcatctggaaaatattaacagtaaatctatagagctgtttcaaagattaagtgaggtattccttgtaaaagcgtgccttcaataaatgatagttattatcagttattcttgtatgtttgtctttatagcataggtttaaaaccttacaaatactttttcaaatcttttcgtgaaggcaaaatagtcttgtgaaatttgcatacattcctcctatatgcaaattcatcacatgctccctcttctttcagcgtagacaaatgctggcttccccagcagcaagcacattcctgaggcccaccctgctcacggtgtcacagaaacaaaagaaagggagaagagaaaggaagttgattctgcttctcttaatctgggcaagttgacttgtgttgagattaattattggaagacatggtaataaatggtttgctttcagaatcaatactgggcagacaagaaagctttcctctggaatagctttccttgcttcctttctaaaccatgccaatgctctctgagagacattaactttattcttcctattggtgtgttactctcactgtgcaaggtaaaatatgttgtcacatttgtgaaacttgagtgattccactctttctgaggagggccactakgcagagaattctttagaagggagagtctgttctcacttgkctcatagtgtctctctacttctttctcccttttctggggccccatggcaggctcagctccagcccagtgacatacaccaaatggaatcgcacatctccctgacagacttgtcctccatatcagattccaccggcagccaacccagccttcccctggtactcagtttccataaccacaattttgtcctgttcctaagagccagccattaccttaccaggtaccccaagaatcctgcctctgaattgcagcccagcagctacagcccggaaacctgttaagagcctcccaggtgcaaactgtccagcctccaccttgggtcgctgaacaccactggctcctggatgcccagctgctgggtgttccctgcccctaggcaggatataccattactctattggcttkccttgtttgactggtcaaataaggcacccatctcttccataacacttaacgcttgatgatgtttgtcagtacctgcagctgatctgtcctcttggcacctggccatctcaaagcacaggcctactctttcccacatagctaagtagaccacaccatgctgaatcttgagagatgacagcatgggacttaacagckttgcctggaagggagtgaagcttaaatatattctattaccagccaccagcaccaacatgatcaccawttgctgccacagagaccgccatttatggagcatctcctgagaatcaaattcttgattaggtactttccatatattatttctaatctccacatcactcttcagggtaggtgtcactctcattttagagagaagaactctggggctcagagaacttaagtgattttcacaaggtccagggccaaaagtggaaaaaacagattgaccccaaatgctatgcttttcttcamtatatcatatgtcccagcagaggggaaatcagaactaaaggggacatctcatatggagataggggactactaggggggtagatttttgaaagctaggacatttcattagtgatagcttaatttcagcaaaaggtaaaaggaaagggatgaaataactatctggtctgggccaagtatagtccaccattttgtgctagaacatagaaatgaagactcaggccagataccggccaaatcaattgttaaataggccaagcttcagcaaagagcagagccagctgtcaccaatcattcttacatgtgcttcagatacaccagaggacaggcagagaagggcaaaagtcagtcatatgcagcctgaggctgcatagacaccttttgggttaaaaagatgtcaaggaggaccatgaaggtgacccttcatgatagtctgatgaaaatcttagaggcaaggagggaaaaagtatcacttaggggtcctacagccacagtgctaatgtgcagctagctgtctgagggatgacccasatccacacatggaaagagggctaggaactggctctgggatggaaatgaggcctgatccccaccaggcctgatcccagagacatccgaggttcttttgaatcaagagactccacagcagggtggttgacagcctggactctggagctagactactagggcttgaatatgagctccaccattcactakgtcyatcaacttgagctactcatttagtctctgtgcctcaaattccctatctataaatgagaattagaaatatatattaataactcatgggatgttgtgagaaataaataagttaacataagaaaaataattcaaacagtgtccagcacacagaaagtactcagtaggtgttattattgttgttgttattaaggccatttccttctcaaaaaggggaaggaaaaaaatggcaaccagtgaacatactatattgaatcaaaagcagtctgtgactagaagagttgtcttggactcaaaatcagtatgctgaatacaaagtcaacatacagtataccacttctgtctaatttttgttttgttgttgcctttcggatctctttggaaaaggccaatcttatctgtaataacagcgagtttttaaaaagaaaaaaaaagacttccttccatttcagctaacggagtgagaaggttaaagcctcctctgatagtcaggctcagtgtgatgataatgatcccagctggataaatcatggaaaattagtggggctgggaaaatggacacagaaaggactgccatttcttcttgtcaagagtggtttcctatagcttcatctgaatttttttttagctttctttaattaaagaaaatacaaaagagtccaaagaactcactcaaaatttgactcaaaagatgcttcctctaaagtgccagaccctgggctggggctaatcagggtgacccccagcacagggcagtcttgctaattctatcaggagagtactcagttatgttccaggttatgtggttctggagcctgtgttcttataaatattcatctgatctacctctcttatcattcttagagttgagagggacctcagagatcatctggcctgatatccgcccaacaaaggcattcgttccatagcactcattcgtttatctttcaagtatccattgcatgtcagggtcaccactgtgctaggcattggtttaaaaagactgagacaaaattactgccctgaggaaggtcacagtccagccagatagtgaggakagcaaaaaactgattatggcactgtgctaactaccataatagagatatgaccagagtaactaggtgactagaaaaggggcatccaatccaaaccaaggaggctactgagggcttcctagaggaggtatacttgagacaagtgtttgaaggtgataggagctggtcagttaaaggagtgagaaggattaaggagacagcattgagacttgagagcatggcatgctcaggaaaactccaggacaacaggartacaagatgggatagagggaacacaggaggggtaaaaggtaaagccaaacaaagtaatgggcaggtcataaagggtttatattatcaagagtttgaactttatcctgatggggagccatctataggttccataaccattggagatcatgatgatgagattgcatttgagggaagccactgttgtggcagcgtgaggatagatttaagacaatgactggagtcagggaaaacagaaggatattgcagtattccaagcaagagataatgaggctctgatctaaggcagtggcaatggggatggaaggaaagaaacacacgaaagaggcagaatcaataagactttgcaatrttgcaatagactcaatgatgaggaagagcaagagaagaatcaagaatgactcccaagtttctggctcaagcaagtgggtggttggtggccttcactggtataacgaatgcaggaataagagcacaccggaaggggtgggaggtgatataataaactttggacacacggagtttaggaaccctctgaaaattgcaatagaggtgtccacagagccaatgggtttataaatatcgaacccaggggtgaaaccagagatragacatggatttggaagccatgagagtaggcgtggctgttgagactgagagagagtctaaattgttcagggagtttgtgtaaagtgagaagagaagatctgaggaacaaatcctggggaaaagggaaaagagtttaatcaggaccagccagaaagtcataaggaaaccaacagagcacgatgtcaaggaargcttggaaaaagagggctttaaaaggcagaagtgggtgacaggattaaatgcttcagaacagtcaattaagacctgttaagtggccaggtgcggtggcgcacacctgtaaatcctagcattttgggaggccaaggtgggcaatcacctgaggtcaggagttcaagaccagcctggctaacatggcaaaactctgcctctactaaaartacaaaaattagctgagtgtggtggcgggcacctgtaatcccagctactcaggaggttgaggcaggagaatcacttgaacccgggaggcagaggttgcagtgagccgaaatcgcgccattgcactccagcctgggtgacaagagagaaactctgtctcaaaaaaaaaaaaaaagaaaaagaaaaagaaaaaaaaaagagmacaatctgttcagtgtcttttggatttagcaataaataatacagttagcaaataaaamccagagactcctgttggagtccctggtaagattaacctcagtgggccagagagaacaaaagccaatggcaggggtcgaggggaatggaggaggtaaggaagtagaggcagcaaatataaactcctctatcaagaacttggactacaaagggaaggagaaacagaggggaaagtagagttcagagaagctgttcttggtggcttgtatttgtattaatttgtttttaagatgggagaggctgggcgcggtggctcacgcctgtaatcccagcactttgggaggccaaggcaggtggatcatttgaggtcrggagttcgagaccagcctggycaacatggtgaaaccccatctctactgaaaatataaaattagcagggtgtagtggctcatgcttttgatcccagctacttggagggctgaggcaggagaatcgcttgaatctggggggcagagattgcagtgagccaaggttgtaccaccacactccagcctgggtgacagagcgagactctgtctcaaaaaaaaaaaaaaaaaaaaaaaagatgggagagagttgagggtgtttaatcctaaggaaaaaaggttgcctgtatcrgaaaacctccagtgggacgaagcacactacatcacaaggcacttcactctgttttggacagctcataaaaatgcaacccayggttagaagttacacctgaattaagctaaaattggcttcactataccttttattcttatttcatctatrggaagccttcaactatcaaactcatcacccctgccttccataaaacattctttacttaaaacaaaacatatccagttacttcaacttcacaatcatggtagccttccaacaattgtggtgtattttgtcaatatctttttaaaaatatattttccagaattaggcgcaattttccacatgtgatctaaacagtgacagtataattattatttctctggtttagatattatattttaatttatattatcactcaaaagcctttaacattcctctctgctctaagaataaagtctatatccttgcatctacaggtcaaagttcttgggagtttatacacaaactacactttttgaacttttctacaatgattcacattctaccacatagaaccctttgctctaacctacttaactgatttcatttacagtatcacagatttttccaggagattccagggagcttgaggactcccactatgaccatagttttccttgaccagaattgaaataatctcagaacagcattttccatatcttccatttgatggagcagactatggtcctctccactaacatgatggctcatttctgtgttcctcttatcttcattttgtttctgcataaggttctaccctcaggtttgtagatttcatatagatgtgaagcatcctgatacactgtcactcttcccattagaacaagtcctttcaacaaagaatcctcttctattgccattttctagttatgagctcaatatcctgaggtctcaggactacctattatatttatcttcttgtgttaaaagtttaagtgcactacttgttacacatgccttttgttggtttatttataaagaagcctaaaaatattgtttgcaacctgtattcttggtattttttgaaacctaaggttatctaagcacattttatttataacactctttttctatgtcacctatgtaaagcctgatatatctgattttggcttcactgggttaattttctccctcaactttaaaattcatttaaatctttctatatagatcatcaaggtttctgccaatgtatatccttcccagtccttacaagatgcactccatcccttgccagaagcccgtcatcctggctctgtwgaacacagtccagaaaactttttaaataccatctacataggcatgcatgtttctcaaagcttcccttctttgctgtagttactgccatcacatggaacgagagataaaaacaccacctgtgctttcaaatctttcagtttgttactcagaacttatgtcattaggaataaaaccccaatttcttctgaatgtgccatttgttccccaaaggaagcascaaatgtgggtgacagttcatggggttaataaaaggttcatggtaggctctctataatatcttggatattggctcctgccctctcccaattttctacatcatatccacataaagtgaccttcaaaacccctgactggaagttatccacaagatataacatcttttttcatcctcagtgtgatcaccagatggtctcccatcagctcataccagtaacttctccctagtgctccagggagggaaagttctgaatccaccccaacgggaaacgtgtcatgcaagatccaaagggcaagactatcctttatttctctgctgcttcacattcctccacttgcccacttcatgacattaatttttctgcattttcctggctttcttcctcactattttttttttcatttgcctaagaatctttcatccttgttaagaagctagagtgtgaaaaagcatctatttaagctctcccaccttttcyttctgcttgcatttgcagctgctataattggtcatcatctctggcaagaagagaaagaaggaacttactgtgaaggtcactgcatcactgcatattaactgaattgccagatgatgtagctttcactagaaatgccccttgaaaatcctaaaggagcaaacattatgcctcttttcttgtcacagaatttcttagagggttagaacatgtttgatgcattttttaaaattagattttgagttcctcaagacagaaactgtggaactctaacttttcacagtgcccaacacagaaacttgatgggaaatgaaaattgatgagggctattgtccaactctgagggcacagactttccatctctgtggattatcctattttattttgcccttattactatggtaggtttgctgattgtactcagagtatcttcggtgggcaaggtcactgataaatccactaaaatgccttccttctattcttacctattttgaatgatttttttttatagttccagttttactaagtcaacaaagtatcaagatagcacaatgcagttgcctacagagttcagaacatttgtcatcattgattctttctcttaccacttgtttggattatccattcattctgttaattcttctttcataatagctcttattttttattgttatactttcagttctggggtacgtgtgcacaacgtgcaggtttgttacataggtatacatgtgccatgttggtttgctgcacccaccaacccgtcatttatattaggtatttctcctaatgctatccctccctcagccccctaccccacaacaggccccagtgtgtgatrttcccctccctgtgtccatgtgttctcattgttcaattcccacttatgagtgagaacatgcggtgtttggttttctcttcttgtgttactttgctgagaatgatggtttccagtttcagaatgatttttttaaagtgtgttcaagtttgataaaaaamaaaacaaaacaaaaaaaccacamgggttggatagagaaacaagtaaccagagattactgaataaagtacttaattgtgcccatgtttttctatttctttaagtctttctttaaattgtctgctctttcaaaaatgttacattaatgctacttaatatgtctagctgcttaaatgtgatttggtgctctgaggctttagataatatatatttgaacataaacgcttgctaatttttgactaaattagcgtacagaaaatctggcatttcagataatgaggccataaagcagamcactaacagagtaggcacagctgttatgtaaaccacaggcacttgaatactcgcctacctcataatagcaaatatctcaggacaatataacagtactacattctattccaccacctgggcagacatggaaacatctatcccctgacagccatcctattatgggcaggaactccatcttacacttgtttatattcttgatgacacctaatgtctcttaaaatatgtgtctcttaaaaactactcggtggccttagccatttggggagattataggcaaactgagtccattagttgactaaggaccaggagaggttcccgccagtgcccgggacttctatttgagcacgcacaacctcagcagcttagactagaaaactgtagacacagattccctggtgtatcccttcctgggccttcactctgaatgttggattcctcyctagggaggctgtcatgactgcaaagcctttccccagtcagctcagcttctatgtcagccattcaaagagtgccatctgcaggatgaactgaggactcaaatatttaattcatcttcaaatggcatttgaagaatttgtttaaaatttgttcaagagctattaaacacaaaagttaaagtttaatgaaggataatggattgccacataaattcttcaaagatatcatttacatctattttaatagctgccctaaatgtctttactacaaagactgaccactggtaagaatcacagatgcctccactatccctagggtggaaatgtatttgttcaggggctttacactgcctaacccctccccgtgggtagccattccctctgttgagggcttgcttttccttgcagaaggacaaatttccaggagctgtgacagatgtaatagctgtctttctgctttgattcaagacaattttttgaacctaaatacagagaatgggtgctcagaattcctttctcattatcagcctcaggtaaaggaatcctaaatgataaggctaaaagaggtcccttcacagaatcatgatcctttagagtattgcttataagttaccccaggctcctaccccacagcatatatagccttcctgaacacatctcataaacagcaacycaaacaaagaacaagagtgtccatgctttggctttctgtcattgatcttcttactcgagaacttttcagttcctgattaaatccactcctcttctcccagtggccatcatctaattgagagcagaaacaagagagaaagaagaaccctttccttcctagtttacccctttttcaccacctaaacatggcaatcacgttgtacagaacaaagcaggtctcagacaggctgctactgacagtcaacctgccttcactgtggtcagcattggttttcctatgtggactaacaatcccaggatgctgggccactcaatctcccagagtggtgatgaaggaataaggcaggattaattccccaactacaagatccagctctggaggctaatttcagggtaatgggatggctcacaaaccccaggtaaagtgctccctttgtagctcacatctgcttttctccttttcagagcaaacattcctcctaaaagcatgagccttttggaagttagaactctgtcttctctttcaaaaaaaatacagtcttatcagaaagcagagtcagggagatgtggattatgccagtggattactcattggaagggccagaggaaagttgtaatggatgtcaataagggtggcaacatcccccaccctcactccctttctctttgtcccacacttcccataagcaaatgggcacctagaaatgaattttatgcccacttcctatacctcaataaggagggacagcatggaattaggataagaacatgactgtggaatccaacagacctgggtttgaatctcagcagagcccctgacaagctggatgacttgggcacatggaagaactttctaagcctcagtgttgtcttctataaaacaaggcaaatactacctatcattcaggattggtataagacaagatatataatggaaacataagctctcaaaaatgtgtccattctttctttagcrtgaatttaaattcatgtgtctttgccgctgatggaaaggcattgtcccatgtgaaaggaatatcaggcatcagtgagaaggtggaggaacagttgggaaaaatgggactgggatggccatgggtcttgaatggttgtaacaaaatgcaaaaactgcggcctataaccaaaacatgggcctataaccaaggttggcattgcctctgaggctatatcaggcagagggcaaggaagattgagctgggtcagggctatgggtggctttggggacgtcctttctaagtgaggaatgctgaggcataggacagcccacaggcagaagccccaaagctatgggatggccctattccaacagaccaccccacgtactacaacctccactctcagcagtcaggggatacctgtggccctctcccatcctttgccccctaacagcctagaaaggaatgacccaggaccagatattgtggatctgtgctgcatcttgtccatcataaggtgcattgggacctgtgtctattacattggcaaagtccacctcattctgcagaaggtcctcattggctatgaggctttcttttttttttattgtggtaaaatatacacaatataacacttacaattataaccattttaaagtgtataatttagtggtattaagtacattcacagtgttgtggtgcaagcatcaccatcatccatctctagaactcttcatcttgcaraactgaaactctgttatcaattaaaccaggggtgtccaatcttttggcttccctgggccacattggaagaagtcttgggccacacataaaatayactaatgatagctgatgagctaaaaaaaaattgcaaaaaaaatcataatgttttaagaaagtttaccaatttgtgttgggccgtattcaaagccatcatgggccacatacagcccgtgggcaatgggctggataagcttgcattaaacaatagctccccattcctcccttcccccagcctctgacaaccaccattctactttccatctccatgaatttcactactctaggtataagtagaatcataaaatatttgtcctttttgtgactggcttatttcacttagtataatgtcttcaaggttcctccatgttgtagcgtatgttagaattccctccctttttaaggctaaataatattccattatctgaatagaacacattttgtttatccatgcatccgtcaatggacattggagttgcttccaccttttgaatattgtgaaaatgggtgtataaatatctgtttgacagctgggcacggtggctcacacctgtaatccctgcactttgggaggctgaggtgggtggatcacttgaggtcaggagttcgagaccagcctggccaacgtggtgaaaccccatctctactaaaaatacaaaaaattagccgggtgtggtggcaggtgcctgtaatcccagctactcagtaggctaaggcaggagaatcacctgaacccaggaggcagaggttgcagtgagtcacgatcacatcactgcactccagcctgggcaacagagcgagactgtctcaaaaaaaaatctgtttgagtccctgctttcaattatgttagggagacagcctgaagtggaattgctggatctatggtacttctatttttaatttttgaggaccctccacattgttttccacagtggctgcaccattttacattctcatcaacagtgcacaagggttctatatgaggctttctttatcccacaggttgggtccaatccacccatattccctgggctcaggtcgccactgacatggtctttctgcctcctatgaggcctctcatttttcagcatatgcttgcagctcccctagagatgcagtaatgctccatgactttcctgttcttgcttggttgttgacatgccatctctttttgcatccatagcacatagtctgtctggggctgggagcctccctgggtgaggcccagggctctgtacaatgcccaaagtagggcccacattgagggctgtctgcctggtgggatcgaagtcagctctggctaaagcagtgatatggcaaaacctagctctgtcattctcactccttcagcagcacccacctctctgtcccatatgggcaccctccctgccttactcctcattattttgttttacatggcagctratcacgcctgataaaataactggagagcagtatttcatctcgaaaatgaaaattttcaggacccgtttggaaaactccccaatgcagaaatataacagagttaggataacatttttgaggtggaggctctgaacaaaaacactttaaaacaattatactattagacaaatggtcagggcctgtcatacaacatctttgtataaattcaaaaacagtgccctttttggatcaggtgtgcagctcagctaaaagactgaacattatataaatggcagtttaaatattgtacaaatcacacgaaggcaggttctctgggcacattcaaccctgtgagcgcatggctggtgagcaggtgccacctatttctccaggtcctggaaggtatgtggctttgtaaatagagctgggactgatttttagctctcactcactggcagtgacaatcataagcagtagccctggggtgatgaggaatctaataatgtcattccctcctgccagcaccacctcgtggacaaggcatttttagatcacaccagcaggaagatytttttcaaagaccataaatgtgggcatctattttaccactcacctagaatccaaaagaagacaaaggactccttgcatcaggcaggaaggcagcccagcagccacaggttatcaacccagcatgcctcaccaaacaccaaagccacagccctggtctccctcatctagacacacacacacacacacacacacacacacacagcttctcacctgagccacctcttcaaagtcatcatgcctccctcatctagmcacacacacacacacacacacacacacacacacacacacacacacagcttctcacctgagccacctsttcaaagtcatcatgcctcttctgcagggcccgggctcgatgtagggacttcccaactccagtgtgtttgctgagaaaggcctcaccatggttttcaatccagtccaacacctggtcaaagaaggataacagcaacaatgactttctagcagaaggaaagacatgtgacaacatgtgcaactgctagagtcctaaccacccctatatcccatcycagttgtaaagcagcagttcaggtggaaatggtcaatctgctgtgagtccatgggatttcattactgtcattggcaatatcatagtcccacctttacctaaattcaacttatcctttttgatctccatattatccttccattactttttccattttcttagttcattattttaaacaagttacacagaccatcaggcacagtttaaccccctcaccacttctacccaatcacataaagatattggcaggaaattaggtagtagcagtttgggcagtatcttggccctcattactcatcygtcacgctgccataagaacacaaacagcaatggkgaccagtcatggggatcctgcctcattgtgctccggggactccccttyctaatcttgaaagcaaagtccagggtagtcagtctccagttggatgctcatgatatctgaccactaggacaasagccccctctggcttytttccatctccctcctccaatcgataccaaccaaccaamcaaacaaacaaataaattaaagtgtktgcatcctaagtcctttaatatctgagtctcttgggaagcagtggagacttcaggttcttccaggctaaagatctagtgatttggcttcaagacagtttccttgatatttagagacactggaacagagacccctgggcaatagaggggtgagagagaggggatgctaagaagggtggaaaataagttttcctgaggggcwcttgagaggcaggatggaaatcccttagtaaaagccttgacgtgcagggaggatgaaagcctttaatacccattttgcattcttgcagatggcctaacaaaaatgtgtgtatcccagagatcatcttttgatctctgaagagttggcgctcagtaaatcaggtgaccacaattaaatcagaattacagtatagacacacctgttatagatcctgctaaaactcaagtgagcccactcactgcctgcaatattaaccattaactaaacatttaattaatgatgtactagcctttccagattttggaagcacttactggaaaatggtttagatgaactaggtctatttaaaaggatggtttaactcattcctgtgtctcaaacggattgccctgcagcaaacagaggtaaaaccaaatcattccattgactacaggtatgggagttctctgacatttgggatatttaatatctgcagtgtgcaaggtatgaacattttcaaagtctttggtgacaggatcacaaagcccacatcgtgattgtgctagttcagagaaaggtatatatgaatataaaaatgaggcttaacaaatatccacttaatgaagacaggcggagtaattgtccatcatcatgaagaaaaaaagttttttataaataaaaaatgaattcatctamacattatggagattttaaacactttataatatattctggcaatatacatattttaagtattctggaggcacaaccctaaaaagaaattgtggtagtgctggatttttaccttttgcaaacactgaaaggcagcactgaaaggaactttacatgttcatctcttagaagagcctgcgtttctctagaattacttacggtgaaacttcaaccaaaaaaaatcaggagagtatatttttacttggcttgccacaattagatctcacaattctgtactgtaaaggagttatgagcttcagcatgcaaggtcaaaggtaaatacttgtagtcacaaagtttcccatatattaggtgcgaagtatagtaaagttttaggattttaatgcataaactttcatcaatcccttttgaaaacaaattgaggtttgatgataattttttgcatataaaagaactaccagtggtcgtttatgaatgtgttggaatttataacagatttttcagactacaattttttaaatttagttttgagcacttaagtatggcctgcttgtctggcaatgttttcatgagttttgttttatctcattttttatctctagctttaagaaaattggttattctgaagcaaattggttgaagaggaatatttttcatctactagttcacccacatacagtgtttgcactccccagaaacgatttcacaacttctaaatattttttaaacgcaatttgtttcctttttaagttactttgctttctttaaaatgtcaatttatttttagtgacacttagttttacttaattggctatgccttcatcacttaaaaacctatttctttcatatttgagaagcttttacttcactttaacataactttgattgctctgtgatgctctggtgccatcatttagtccaatttctaccattaaaattgaagctgtagggaaaatatgtgcaatttcgacgaaagttcaggagctatgcagaaatcaatttaacaaatcaaaaagcaaataatttagggagttaacaaaattactttagtaatccagactgaaaaagtatttgaggctagataaacatagttaatatatgaagtattgttaaagattctaatttctgactattttgtttcagacagttcatttagagccatcattgcatgatacacgtgtttagaccacatactgtctggaccctgattccatgtcgtccaacctcgggagtacaatctgactttccatgcagatcctgcgcagcagagaaacatgttcctgagcagacatcagcagtgcctgacaattacattacacgctataaatttatgtgtggcttgagattctggatatttgtcagtttctagtgcattccattaagatgaacaaggtcccagaatctgaacatcaatggttaaagaataaattgactttctagtcaaatcctggaccctacctaagtacaagcacccatcaaggtactccttataatcttattcctgaataatttctcttcatctacaaggcatatttaaaatactcaattaccaatcatagtcaggatatacagcatgatagtcattcatacctatcgatggctctgaattggtatttgagcatttccagttttggaggttttatctttttgtttttgtcaggcagcagagaagcatgtgtgggtatataagtattcacatattcggacatttatttaatagtcttattgtgccacagtgtcaggcactagagcagctctggaggtgggggtgtagcagtaaacaaggcaggcatggcctgatgctgagaactcagtctataggggtaacaagcactagacactaaatcacacaattcatcattcattgcaaaggtgaaaagtgtcaacagccaaacgcatcttctctggggagtcacggaaggtttctcaggagaagtgaggtttagctgagatctgagagagagtaggatttaaccaaattaggaattgaaaagaccagcatggcttgcataggggataagtaggaaatggaccctgaaaaggcaggaacaagattgtggtgagccctggtgtgctgaacgggagaatccattgttcatcctaagagccactgaagggctgcaaggaggataaagacacttttcattttcagttataaattattgctctgactgactaggtgcagtggctcatgcctgtaatcctgtccctttgggaggcagaggcaggtggattgcttgaacctaggaatttgagacaagcctctgtaacatggcaaaactctgtctctacaaaaaatacaaaaaaaattgccaggygtggtggtgcacacctgtagtcccagctacccaagaggctgaggagggaggatcccctgagcctaggagttccaggctgaagtgatctgtgatatcaccattccagcctggacaatagagtgagatcttgtctcaaatatatgtgtatatatattgctctgactgctttgtggaggataaactggagaaggcaagagtagagaagggaaaacaggaggcagaaattctgacaagaggtgatggtgacccaggcgaggccaatggcagtgtctatagatagacaggctgggggaaagaattgccaggacttggtaattggctatgggggagatggagaggcaggtggtaagcctggcccccaggggcatgtcttgaataactgagtggaaggtagaactagtcactggtacaggagtgaatgagttataaggggtagcacagacataacatattttttttccttaagatttttttccctttccatgctcatactcttgttctgagaatgactatggaaaggtatactcaggggcataagtgacagtgatttgtgcccctgaactggaatgggaaatrgtactcaataatggttgtcagtcagattctgggaaagatgtgcctttagtttcaaagaagtaatttatacactaaggcttaaaaataaattataaattgttaatctagctgaatcccaataataaaacggaataccaaatccaktttaaaaatataacttcaacctaagtgcccatcaatggatgactggataaagaaaatgtggtatatatcaacaatggaatactattcagccataaaaaagaatgaaatcatgtcttctgcagcaacatggatggaactggaggccatgatcttgagtaaaacaagtcaagtacagaaagacaaatatcacatgttctcacttatatgtggaagataaataatgcatacacatggatgcagagtgtggagtgctagacaatggacaccggaaagggagaaggggctgggtgatgagaaattacttaatgagtacaatatatgttatttgggtgatggatatcctaaaagctctgactttaccrctacgcaatctacgtatataacaaaattatacttggactccgtatatttatacaaaaataaataaataaataaataaataaaggcataccctcagacttaaatgaaattaacccacgaattctcaaaagggcttttcaccagggtataatttttgagcagccccttaccttgacactaagtcccctatacctggccctaccccctcttaaccccacccctagtgagttcctgsctcaccccccaacaccctaaaagctgcctctcatctcctaaattttgctctgtttttcccttcactttccatatcctttcctctcgtgtacccactttccaggctacctcctacttatcctttaagctstgcctcaaaatcattggctatggaaagccttaactcgttaataacccattcaggctggagtgggtgtttctcttattctgttgaaactacaattattgcccacaggcctgtctctcacactagactccaacctctttgtactcccaggacagagtgtggtactcagcacagagtagttgcttaatacatgtttaattgaactgagctcaaactgacccctctaatgcagaactttggagtgaacatctcctgctctacactcccactgtaactctatctcagtctacactcaaagttctctctttgtgcatctccaccttccccactgccccacttggcaggtagttagttcttagagggatgtaaagagtatgggtttttcaccatttgtatgctacccttccctctcctctatcacacagcatccttgcctgcatcttgcacttggaagatacacaatgactgtttatagccatgaattgccacgtgcatatgtggccaaggtccctgccctgctcgtcttgagaggaattttgccaccccattcaggaatgtcatcactagggataacaacgcaggtgagcccaggctccttgccactacagcaggcaggcagtcttgtaacaacttgtaaagatcttcttggtttctcgtcttgacttttcaaccagaaagtagtcttttccaagaacagtcttttccaaaagagatgctcacatccttgactagatttgaaagttaacttaacagccattatgcataattccctaatcaccccctttcttcctcatctaattgtgtttattccaaccagcatacaatcaagatgcaatgcctttcagcacaggagacagtcttttctaactgccaaggagaagggaaaatgttcttttcttttttctttttcttttttttgaaatgaagtctctctctgttgcccaagctggagtgcagtagcgtgatcttggctcactgcagcctctgcctcccaggttcaagcgattctcctgcctcagcctcctgagtagctgggattataggtacgcatcaccatgcctgggtaatgttttgtatttttagtagagacggggttttgccatgttggccaggctggtcttgaactcctgacctcagctaatctacctgcctttgcctcccaaagtgctgggattacaggtgtgagccaccacgcccagctggaaaatgttcttttgaagagaattattaacaaacaatctctgtatagtggccatgaacgcatctgagctcatgggaaaccactctggtcttaaggactttgtaagtaccattccatgtgtcagaacctcttcttcttcttctttttttggagacagagtctcactctgtcacccaggctggagtgtaatggcacagtcttggctcactgcaacctccacctactgggttcaagtgattctcatgccttagcctcctgaatagctaggaccacaggcacacaccacaatacccagctagttttattgtgttttagtagagacagggttttaccatgttgcccaggctggtcttgaattcctgagatcaggcaatccgctcacctcagcctcccaaagtgctagtattacaggcatgaaccacagtgcccagtcccagaacctcttcttaaacacatccttattgctcattcattcagctctccactcactcatcaccagctatcgccatatgacacacggcatatttgcttggtttgggtgttgttttatttccaccccctgactgtaagctctatgtaaacagggggttcatttgatttgctgctgtgttcttctcagagtatttgctgaataaatgggtaagtgaataacacatataatttgaaaacttcctgagtgggaagaacaaaacccatgaaaagaaatggagacgttttgcaaccatatgtggaatcagaatctcacctctctgattcctcacctggttctctctgataagtcatcttatttgaaataggttattcagcttgtgtcrtaatttgatccacggggtaaaacaagaagatgcttgatgttttaggtaaactaaagaattatcctctcttaattcctacctctcagccctcagccccctacatttagaaagccattattctgatgtaaattaaggatcatctatatgccatcaggcatctacaagacattttgttctgttaaaggttcaagtacacacagtgtgaagagcactcaggagagtctgccacatcattatttctgtctcctcacacagcacactgagcactagttctgaaggggagcagctcctaggctgcctgtaccacccagctccccatcggctgcaactggagagcatgcaggcaccacttgaaatgcccaattaccagcaactcattttgcgtcccctctttggaacaaatatgatcaaaataaatgtcttgctatggcaggagaagccatcattcttctgagagggctcagcagaaactcattagcaggtgtacggactgtgcttccactgagagctgcaatcctgtcacctggcagacccaaagttgggtggaagccagctgagggtccagagacccaaagtctcagctgcccctaaccctgggcctctccagccccagcccacctgcacccgtcccctcccagcagagcggaggctgggtcctcccacctctctgagagaacctcctctgcctggtaccttgctgtctgtttctggaggcactatactttttaacactaaggcttcaaactcttgccaacagttttgaacttcagaatgcttaagaatcacctggggttctttttaaattataggctccacctcattcccaaattctgaatcaagaaatgtagaacacggcctgataatctgtttttaaaaagccctccactctgcccagatgattttaatgcaggggtccaagtatcacactttgaaaaatatagttacatattcacatgtgatgcctccctcattttctgtaacaaatggaaaataatttttagtgattttttttccattttgggtttccttgcatccaatacaggagcacccagattcataaagcaagttcgcagggacctacaaagagagactcccacacaataatagtgggagactttaacaccccactataaatattagacagatcaacaagacagaaaattaacaaggatatccatgacttgaactcagctctggaccaagcggacctaatagacatctacagatctctccaccccaaatcaacagaatatacattcttctcaggaccacatcgcacttattctaaaattgaccacataattggaagtaaaacactcctcagcaaatgcaaaagaacggaaataataacaagcagtctctcagacaacagtccaatcaaattagaactcaggattaagaagctcactcaaaaccacacaactacatgggaactgagcaacctgctcctgaatgactactgggtaaataatgaaattaaggcagaaataaagaagttctttgacaccaatgagaacaaagacacaacgtaccagaatctctgggacacagctaaagcagtgttcagatggaaatttatagcactaaatgcccacaggagaaagcgggaaagatctaaaattgacactgtaacatcacaattaaaagaactagagaagcaagagcaaacaaattcaaaagctagcagaagacaagaaataactaagatcagagaagaactgaaggggattgagacatgaaaaacccttcaaaaaatcagtgaatccaggagctgattttcgaaaagattaacaaaatagatagatcactagccagactaataaagaaaaaaagagagaagaatcaaatagacacaataaaaaatgataaaggggataccaccactgatcccacagaaatataaactattatcagagaatactataaatacctctacgcaaataaactagaaaatctagaagaaatggataaattcctgggcacatacatcctcccaagactaaagaagttgaatccctgaatagaccaataacaagttctgaaattgaggcagtaattaatagtctaccaacaaaaaaacgtccaggaccagatggattcacagccgaattctaacagagatacaaagaggagctggtatcattccttctgaaactattccaaacaatagaagaagagggactcctccctaactcattttataaggccagcatcatcctgataccaaaccctgtcggagacacaacaaaaaaagaaaatctcaggccaatatccctgatgaacattgacgcaaaaatcctcaataaaatactggccaaatgaatccagcagcacatccaaaagcttatccaccatgatcaagtcagctccatccctgggatgcaaggctggttcaacatacgcaaatcaataaacataatccatcacatraacagaatcaatgacaaaaaccacatgatatctcaatagaggcagaaaaggcctttgataaaattcaacaccccttcatgctaaaactctcaataaactaggtatctcaaaataataaaagctatttatgacaaacccacagccaatatcatactgactgggcaaaagctagaagcatttccgttgaaaatcggcacaagacaaagatgccctctctcaccactcctattcaacatagtattggaagttctggccagggcaatcaggcaagagaaagaaataaagggtattcaaataggaacagaggaagtcaaattgtctttgtttgcagatgacatgattatacatttagaaaaccccatcgtctcggcccaaaatcttaagctgataagcaactccagcaaagtctcaagatacaaaatcaatgcaattgattttttgcacaattctggaatgtgcaaaaatcacaagcattcctgtaaaccaataatagagagccaaatcatgagtgaactcccactcacaattgctacaaagagaataaaatacctacgtatacaactacaagggatgtgaaggacctcttcaaggagaactacaaaccactgcagaaggaaataaaaggacacaaataaatggaaaaagatttcatgctcatggatttacaaacaagaaagtgatgaactgacagggtcttaatttcagaaaggctctcatttttgaaagcatgatgcagaacaaccacaggtgtggttttatactttttcttagctttagtttagagtagccacagaaaagtcagattacagcagttccctgatagttggagtctggaatgccaccctccccttggggaggcctttcacacaccctccttgcagcccctctgcagctctccaggacaacagctataaaatcagcatgagggtaaagaggacaccatggatattgcacaattcacggcccagatcatctctgagagtaatggagagttcactgaaatagcaacgcctctcctttgtgccttcagaggctggtacctcactctgtctcaatcatagactgcctcctgtgctctcctgtgctcaggagtgatatatttatcaggatagctccagatggcaggagtaggcaactgattcacttgcttctccactcccggcaggccccacaagggcttcagaactgcagccagcacatcagtagtgcccatttctcctgggactgaggtgttgcctctgataactcaaytgatgctccagtcagaagaggactcttcaaggggagttatgacagcccaagaagtggggrcatgctcgaaggcccatctgttcctgggactgattgcacagtgactatccccctattcagagagtgtcacagtcagtgataagaatgctcaactctccctccactctgcctgaccacttcaggcacccwgcatcagaggcccctctaatgacacctgtgaagggaacagatatcccaaagacatgtacagttggctctcarttttccatgtgtatttcastacactggaaatatacaatggattacattgtattatataatacagtagataaattagattatacttggattatacctggttgataccacaaaagaatgaaaggagagtgaattgttattttatatgtataatcctggagttacacggtagccacagaaaagtcaaacaggtgtttgaacacgagtgcgtccacccgagcagcttctctgcagctctgcagagcccatcctaggacaactaagcccatccttagttttcctatggtgaactaagaggcagatgacagtgagcctggatctcagtccccatctcccagccagctccccccacactagtatattagtcctccagcaaagatcccagggtcctctggaagacagaaacagagaaagtacaaggagaaaagaatgggttatttcatctgaaagggcatttgtagcaagattgtccttttgtggtcagaaacataaccatttctttattattagtggtaaaggaaaaagcaacaactgatgtcataatacaaaaaaaaagaaactacataaagtcaggaataacctgtaatcatgaaacatacactgaacaacagcccaggttttaaatctgattttcctggtccaaccttgtcaaggaatcctctgaagtttcctgtactccacttcaccttcactctggcaggccacgtgcatcccagatggaccgtatgtggagtccaagcctgacagtgcttggataaccccccacccccaagctgtctagcaatcattgcctgagtgtgggtcaagctcaccaaaagaaaaatgtgccatattggccctaatcctaacccatattgacactttgggaggccgaggcgggcgggtcacctgaagtcaggagttcaagaccagcctggtcaacatggtgaaaccccgtctccaccaaaaatacaaaaattagctgggtgtgatggcacatgcggttaatcccagctacttgggaggctgaggaacaagaatcgcttgaacccagaaagcggaggttgcagtgagccaagatcacaccactatactccagcccaggcggcagagcgagactctgtttccaaaaaacaaaacaaaacaaaagaaaaatgtgccacatgactacgaggaattgcagttcctgagactgagtctccctttacaataccacgtggtgagaaggccagtctatacagtcacttaggcaagaaatatgcaattcacaggtccagtttttgttctgtgttttggtagggttctgtggagcagttgagagctgaatttcattatgtccttctataaatctgggctctcctaagcctgatcacctaggtcagggacttgagctcrgtctgcctcctagaatggataatggacaccggggctcagagcctgttacctgctgtacatcctgctggaagacgcagagctgcagccgctggtggagccgcaccttgcggtgctgccagatgctctccagcygtcgctggtgatgtaacacctcatgcaccacgtccagcacctggtgcactgccttggagtagttggctgtggccgtgagggattcggagttcccagggctcaggggccgctgcagcacatcaagtagtgctttgccatcctggctgacctgcaggaaagagagaagtttaagttaagggaaaagggtgataggcagggcacagagagaagcaggaagtgtctgcctgagggtccctgactaggccttctgagaatctcaggcattccatacccagacacctagccagccagagctgccatggggcccatcctccggcctggtggagggcagagcagctggaatcccctgatgtgggagttgctggagtgctggccagttgtctgtgagactctctcccctcctgaatttcagcactgtgagggcagagatactgcctacttgctgctctcgccccaatgcccaaaacagtgcctggcacacagtaggcatttggtaaatttttgtttgtttgtttgtttttgagacaaagtcttactcttgtccccaggctggagtgcaatcaatggtgcgatctcggctcactgcaacctctgcctcccgggttcaagcgattctcctgcctcagcctcctgagtagctgggattacaggtgcctgccaccacacctggctaatttctgtatttttagtagagacggggtttcaccatgttggccaggctggtcttgaactcctaacctcaggtgatccgcccacctcagcctcccaaagtgcttggattacaggtgtgagccacagtgcccaggcttggtaaacattttaactgactcacaccaggtcagacagcataacttcatttcagaaatgaagtcaatgtaagttcccaccataatcctctcctcctctttctttcccaaattcctctatttggctctaaaattctagatgtgtgacaagaggcaagttatttaacctcctgggtcctcagtttccttgtctgtaaaggagggatatttatgtacatatttcataaagtcatggtgaggattaaatgagttaacacacataccgtatttagaatagagcctgacaagtgatactggctaccaattttatcttcatcatcatcaccattgatatggtttgtctgtgtccccatttaaatctcatcttgaattgtagttcccataatcaccacgtgttgtgggagggacctggtgggaggtaactgaatcatgcgggtgggtttttccagtgctgttctcatgttagtgaataaatctcatgagatctgatagttttataaaagggcagttcccctgcactcactctcttgactgccaccatgtaagacatgactttgctcctcctcctctttctgccatgattgtgaggcctccatggccatgtgaaactgtgagtgcatcaarcctcttttttttctttttttataaattacccagtctcaggtatgtctttattagcggcatgagaacagactaatacaaccatcatcatcatcatctctctcccatcctctttatttccttgtcattttctttcgtctttatccttttaaaatactttgctctcgctctrtacgagccctttctttctcctgaaaagcagtacaatcctcatttttctagaacatgcagagaaaggctgggacacttagacagtggacacaccatccactttcctcggttccccaacactcgcccacagtctgagaaaagtgggatgacactctctgccattcttctcattggagttctggcacaatcacgggcatcaataattctggaaaatgacacatacaatcaacacctatggccctcctgtgcttgacaaagtacccaacagaacatgcatctttccaatttaaaacagggatgactgggaattgatagaaatgttgagtccccaaatttggttaccaactaaatcaaagctggcttggagccttccccaaaagaaggcttttggagatgaaaatggtcttttatctcaccagcaaggtagggaatgaggtgtgtgtgcttccatctccacacctctgatgatgaagctgtttgccgggtttgcatcctcccctcacccctcctttggtccctgataatagcttggatgggggtccaggaatacagaagcagatgttactcctgcccatggggccacagaaatgctttcagggcagggtggttaggaggggtgctgcggtagagtgcagcagaggccaggagaggaaatcaccaccacccacccaatcctgccatccccatctcccataattgactgccaggggagtggggtgggggaagtagcttatacataatgcagaggtgatgcccaccagagacataaataagacaaatatcctatagtgaaacccaggagagctctctttctggaattctgagcaaatgctgtcttttggcaccatgctatgtccagggtagggcagttagagatggagtcccaagtcctagaaatccaccccacatgagctctaatcctctgcctcagtctctacatctgtaggaagcatggacagctcactggcctctgaagtgggcttggagggaaggtttaagcctcacaacgctagggcctgataattaattgagagaaatattgtgtctatatgtataattacacccacacctcacatatgtggaagtataatattaatctcatttgtactctctatatttgtattttgcaaggagtaaatttaaagattcttgacccatgggcagaggcacagttcdaagacagaaagctttgagccatatggatcagagctgatgagatcagatttggcttgtaagtccttcgttgtaccttctacaatgacagaatacattaccattttttagtattcattactgtcagacactgggccaagtgcattacatacattaccttcattttatttttttaaatttttgttgggtacaatgattgatttatttatttaaatagttttggggaacaggtggtgtttggttagctcccacttaaaagtgagaatatgccatacttggttttccattcctgagttacttcacttagaataatggtctccaactccatccagattgctgtgaatgccattattttgttcctttttatggctgagtagtattccatggtgtatttataccacattttctttatccattcatwggttgatagacatttaggctggttccatatttttgcaattgtgaattgtcatgcattacctttataacctcaacactatcctatgagacaggtgttactactttgatttcacagatgaaaccaggctcaaagtggttaagtaacttgcctgaggtcacacagctagtaaataggagagccaggattcaaactcagtttgactgtggcaaaaacccttactcttacctaggagccattggttcttagacttcaatgtgcatcaaactcacctagggtaatagttattaaaatgtaggttccaggtctcacttcttgayattctgattcagtctggggtgggacccaggaatctgtatcaggtgagtccgatgcaggtggtccaggaacccattttaatactcctctaactaatcctgcccagaggaaacacatgggttggatgtgaattcacttcttctcctcatccagcttccttaatcagcccatctctctccatccctcagtccccttcctcagaattcatgccagttagcaaacatactaacttatgtgtatctacacagatatacctatgtagctgtttccttttactttgagaggactgtcaagaggttttttccctttcttaactttacagtaaccccctgcctttgatttttcaatggaagagtctttgtccttcacattcatggaagcttcttactcctgcaaacacttatctccaccctgtgtgttttcctctggatcgtctagtgagaaaattaatctttttttaatgagctgcttcataaaaaaggtggcagggctagtgtgtacatctccactcaccaaccagaaagcaacctccagagaagcacagcttcattttcttatattcctcccccaagaggagaaagtccaatcttcacacacaggatgaggcaggtgtatggggtgtgtgtgtgtgtgtgtgtgtgtgtgtgtgtgtgtgtgtgagagagagagagagagagagaatgaatgcgagtgcaccaaagtggtgcctaataatggccccaattttttctgcttcctggctggagacaccatagttcatagatcaaggttcctaaagatgtcaccaaaaaaaaagaaaaacagcctcttcttcttagtcccacccaggctatttcacagggcacaggccagtgccctcatcacccacccacatgcagacatgcccaagaaccatggttgccctgctccattctcacctctgtgtaggcttgggtcacctgctcatacaaggtctggtggtggtggattgccagctctaggtcttgcatctcrgatggcagaccaccttcactgcacatcttgcaccaggcatccactcccgacaggaactggaaggagatgcagggtggatcagkgggggagcactgggggtgaggagttgggtggattatggagagagggtcagataccttgggaagaaacatcaggacttctgaaagccttcagagaccactgtagagggtagagtttttttaattctatgaacactaactcctagtaagaaatcagacccaggcacccatttaggaagtatagtctccacaaaattgactattatgaaactgtaggtggcaggtgaatcatcagatgttcaataggttatagatacacactaactgtaatgtccaggtatggaaacagctcaccacattccacggatacattagagcttcttgccccacgcacactcacaggcacacgtgaggggctgtgtgtaatgtaaggagatgttccacatctgtgctttacagtatgtacatccagttgtgaagacaagcaaaaaacacctcacacagaccaccaggaaccccaggaaacttgcagagaccatcccatatgggacggaaactgccctcaacaggtctcccactgttgggtcagtcccctgaagggtggaaacgagagaggcagtctagggggacaggctgtgctacacctactgcatcccaggttgtgatatatagacatagatcttgacagacatcaaattatttaaaaattaaaattaacaactgtggaagactatgggtcttcacgcacaaagggtaagctaactgaaatcactcagatttattgggtggaaaaatgcacctttaaaatgcaaataattcacccaacagtctggaatcgttctgtctgtgattcctctcgtctggatgcacagctccatttaaattaattgcctaaagacctctttatcccattgccaagaacagcccatatgaggacaataaagagctgcctaaataaatacatggaaaaaataactttgagtcatgtttttccccagttaaaaagaagcatggtttatgaatgtccctgaaggactagtaatacctgcagaaattgcattaaaaaatagatacaaataaaatcgcttctgatccaaaccagtccagtcaggaaacatgaaataaacgtgcacttctccagttttctcagttctggtacagcaaccgtttgcgttctagttttgttgtcactgtcagctttcagtccctggcctgttgattgttgtggttgacttcattctgtacattttgtaacacactagaccatttctaagcaattctggaagagtgccaggtgccatcgagtatcagatcatataatatgtacatgctaaratctcagaagcttctttgctccaccaataactactttacaaatgaccctgggagcaacttgacattcttgtgtcaatcatggggggaacactccttcaaggctcatgggatttctctgcaatattctaacaggtggcctgtagcatatcccacaaaacgatcacctcaaggagataatgccagagagacaaagagagaagcagttgggtcttccttaccaatctgggcaaaccttgaataaagtatgtaagtgataaggttgaagacagaacaggagattggacagcartattctcatggccctaagaatgaaccagtcactrtcagtcactaccaccaacaaccttaacaacggcgacaaaaagatatggccaaatccctctcaaagtatagggttgtgcttgacacaagtattatttcagtctttaggaagttcttaggtggaaatagacacaaatggaggaaataaaaagataccaggatagtatgtggtgcaaatacccatagtagtaatgtccactgtttagtaagcacacgaggcaccttacatattccatctctcgtgttgtatctttagcacagccctgtgccatttatgattagctccacattacggaagaggaaacaagctcagaatggtgatgtgacttgcctaagggtgaatgaatggtggagctgggatcagaatccatgtgtcttgcctcaaagtctagactcttaattatgccatgttgctttccacactagagagggtaacagagggagaaatttaaggtgtgaccaggtgtctgactctccttggcctatattacccaaatgtgatgcaaagaaagaattgtagaagttaagaccacaggcctagtgtaaaacacacctgaggtgatagcctatctactcatagattgtgtgattttagcagtggtgtgttagaaaatgtttaacaaccagcatatatatgtrtgtgtgtatatgactatatattacatatacacaggtaagttcatttacaaatyctactgatataaagaatgtataaaacacaatttacagagaacaacagcatatacaatactctgtattgtatatttaatgtagccagttgattctcacaggatgcttttgacctatggttgcaactgacaaacatgtatagttctgacacacatgctggttgatatttwcactatgttaaggagtgagacaaaggtgaaaagcacctgaatactacgccagaacatcacttgttcatcaaggatgtcagcaacttctttgctgaaccaaataacagtttttgaatattggaagaatatttccttgatttttgtgtgttatttacaacgtaacagctatacacaggacacatttttaagtttagtctgcattttcaaacactttctccctcattttcttaagactctaggcaacaataaagcaataaatcaatccctggtttgtagcatctgataatttctataatatgaaactcctaccatggtgtattttaagctaccaatgtgacatcaccaacatggagttgggaagaggtgatccatacatagcacacaattgtacggtatttccaccacagaaaaaataaatacataaaaatgatttcaagaacataggtaataacaatatgttgtaaaataatcaggaagtgatgaattttgagtatttattaactttgcttttaacataacayatttaattataaacctacataattaagcamtagctagaatgtgacaaccagttctcaaaattcctaaaaatttaacaactgtctctccatgagctggttcaagacaggctccaacacatcatgggatcttaggcaggccaatcacttaatctctctgagcttcagtgttcctctttgtaaaatgggttagcaatgtcactggccaatgcctggccacttagtaagtacgagtaattattatcttgacccattatattaktgttatattcccattatccatagcaaatacttcatgtaaaattagtttcccctgctctcagcacctcaatgatcactttacattcacccctttgatctgtgttcaaagaatgcacactaagcagacagtccacacatgcacacatgcacatgcaaccactaccaagcaaaatgtaaaaaggctctgggtcccctcttgtttgtatgacaagcaaagtcaccaagagttaccaatgtttctttgtgcacacaggggccatcaaagtggtagaacataggttattgttgcaatgactcggcagggtcttcagtgtttcaaaaagacaggtggagctccctatagagagtgtgtgtgctcccatccagccctcccctgcccatgcccaacccttcctaccaacagcagctgctgcaggtttctgcaccttacctgctcagccttctggtggaacacagcagacatggcgaggatggtgctgcgttcatccagggcagcagcraagctcttccactcctggtccagctgggtggagatctgcttgatttgttgtgaggcataatgaccggcctcagagaggcgggaagccacggacatgatgcggttgatgttgacataggcattctggaaagaaaaggagagtgctcagtggggcaggctcaaaagacatccactgagcactttcgtggggtacatatttggggaagggagctgcccaaaacaaaagtctgagagacgctggtacagtccatactagtgtatttgtttttggcccaagggaaatctttttctacaattcaatttcagtagatagcagggaactttcattgtggggaaccagcatagattttgtgccaactattaatgcactttaatgcagtcactttacatggactactttatgtaatcttcacaaccatcttatgargtcattcccagggatggcacataactctcaagagcgttctttggaagtgatggctcagacgagggcacaagctaaaggaggcagagacatctctcttgctcaggggagagctgtacccaggacactattgccatctacatacaacaaacagggcagaagtactcatcaaagagggcaaaggagacacagtaattccacatcttcctatcacctagcaaagatgtccccaccttcctcctacctccttcagccctgccaaaagagctgaggcactggtcatcaaacagggtttaaataaagacagcatttgaacccacacacttttccatgctaataataaggtctgtgaagccctttcttatctctgcttgatttaggaagatttccccacctgaccccaaaaggcatctgtgggtaccccaaaaggcatcaaggaggggctctcttgatccattgtctcctgtcatcttgtgttttgtttacttgttttgtttacattcattcccatctttacttgctaattaaaaattcatgaacatgtatgctgtttcctattaggtcactgaaaaatgctccaggaaggaacgagacaaaagaaaaactccacaaacataagacagtagtgattatggctatttttaaccgctatctcctattagttgtctgaggtgtcaaaacaatcaggtaaggttgtggcatccacagggagcttttccgaatcacacaatgtctgcatgaaggaggaccagggaggcargttattcacacaccttcgttatttgttacaaatcttctcaaatgattatacatgttctgcagtaacagcattttctctaggttctgttagctcagatgtagttcattaatactgagtaggtttaatgaaggttctttattttcctttctcacttccctcatggtccgcattcgtcttagctgtccctgacctctaagcacaccatcccaaacctgggccaggttggtagggtctctcttaatttaaaatgtctctgtggaagtttaaaaagttaagtgaagaacttccacacaaatccatcctgatgtctaatgacccctatgtgtcatctctctttttagtctggcctgagagctttctgacatagtgcatttccctaagagaactaggacattactgattcttgttatgggaaataactatccctcaaagatgtaagaatcattctcagccttgttttctgagttaggacacaaattctactgaaaattaaactctatttatggaactgacagaaaaaccactctgcacttagaaatagagaggaagaatggggagrgggaaagcacacactgattttgacagttttatcttctatgggaagaatagcatgggaagtccctcaaatctcctgctcatgtcattgtcttactttgggttctccccaaagcagaccttgagacaattatttgggagagacagtttacttgggcatggtcccaggaagcatagtgaaagggagggaaatgaataaaggatgtgttaagttctatgagcaactggggttcaatccctattgagaccttttgagaaagtataaaacacacctctgagctgtcccactgaggggtgaggaatctgggttactgatgcactaagtcccattgatctttggttgaaggtccttcctggggtaagttcctggcatttccagccgaacccacaaacagaccaagcacacttctgaggtcagagagtgatcaccgccgataaatgcaggaagctgtcagtctgcatgagaatcacctgcagatgacccccagggcaggctgaggccatataggtgggacattgacagtgtctgatagagctgtcctcccaaactggattcaaatcctggaatccatgcccctgccaccttacccagatctatctaggtttttgggttttcctgtcctggagaaaggccttgtatactctggccagatagaatgcaagaaaagcagtaagagcaaggcactaccctgtccccagatataccctatagacacccagccctttgtcatcactgcctattacatcctcctccctcccatggcacacagggaggcatatttctgcttacttttaggaagaactttctagctattagaggtgtccaactgtggctgcctctgtagactcttarcaccttgtcactcattcaaatatttacggagagtgggccagggtctgtgttgggggctgtaggagatcaaagaggaataagataggattcctgcccatccaccccctgcccacaggggctcacagctgagacttaagacaagtcctcaaataacggtaatttaaggcaaaatgaagcaagtgcttccacagaggtagaagcgactccctgtggggattcagagggaagggatctgaaccactggcagggctgttgggaagaggctccccgcatgaaaaaggatggggaggctggcagtcctccacagtccccttcaacctctaagcctgtgatcatagattaaaactaaaagcaaataaacaaaaaaagaccacagcttacagttcacattctagactagcacagtaaatgctttttttgtttccttatcagcaggcggagaaatgtcttgctaaaactaacaaataattatgcctcacaaaagaagtagaggcagtatccctcataatagagggataaatacaatgttgacttatgaatttgctcattgttcttctctatagccccttttcagaatatgaaacacttcaggcaagtcacatcgctcaagttcatcatcttctccttcattttcctttgccccagaacctgagagaaatgggcagatagattctaaactgcagttgtccctaggtacaacgacagccacacaacaaaygagaagggagtaatggcaaggaaggtctccaatgacttaaaaggaaagaatgaggttaaagagctggattaggagtctgaataaataggagtgcttactcattaagcataaacgacttttcatggcctttggtcaatccatttgtgtggttcttctgggtgactgtttatgcccctattaggaacatttgggagttatgtttgtccttgggacatggccaagaggaatggatattttggckctttacagctttcccatttcctaccagctgccccctccactctcttccatctgcctggctctcccattcttccctgccagccttcaatgcctttccatctgcagagctgcccattagtcaagggcattaaaatcactgggccaggaatcaagagtcatgagttttggtcccagctctggcattcacttaagatatgacttgacttctctgtgcctcagtttcctcatctgtgagggagtcgacctaatgatcgcagacattccatttctgagtaagtaatgtcagttccaggagaccaggagcatagtgctgcctactccagaggtatatgtagcccaggcctgctgtccatgtctcagcacctcatgctggctctgctcactgcccagtagtgtgaggaccaagactggagatggacccctgagtccttcagcttctaggtgaccaagggccagaggcccttctctccctctcctctttagccccttcccctcatctgagatgctcagactaaccagtttccctggccagaaggtaataacttgactaataattctagcttgatatgtatcttcttaaatcctttcctcaaaactgatttattaaatttaaacccccctatatatgcagtctgttgttattaaattattatcattatccaaagtatggcacagcccaaggtatagacacaatctaccctgcagaaggcaatgcacctgcagcatggtccgttgcattatctgccccatcttacctacccccaaagcctttcctcccatcattttggtcataaacaggaaaaataactaaattccaacaaaatctcgataactcaaaaaccgtgtatattgacaccctgccctcacttttgttacccacaaaattctttttttcatcctgcagtccttaactggagatcacaggatggagagccccttcttctgaggccttgtcccatgctgtgattaactgaaatcgatggagcagagtcattgtcctgaaagaactgcttggcagaatcttgatcaaagttttcagccctgccaaaagggctcccacttccaacctgattcctggcttacgcctacyggctacaaaaacaagataatgatagctttccattaaaaaccttagctaaattttctctttgtgatttcttatgtggtatactgaaagaaatactgcttattctagaaataatcatttatgcaagttatcattttggtaaccttaagttatgtgtcaggggctgattataagagaagatcattgccaagagaaggtattatttgaatcccattcatttcactcctaaaagctgaggtgaactttacacttttgtggtcataggcccccactctgaatgagacacattctctgtggattacatgagataacataaagcatccagccagatgcctggcacaaaaccaatagtgcaaagaatgtcatatcttttccctcattcagttccaggagattgacattaactctaaaagttaggtgtataccaaatcaaagtattagtaaaaagtacaacaaaaagaaaaatctatcaatgattccaacaagaggcaaaaaaagcgaagtctcattgtctttcacagagagcacaacacaaggttcctactattccctactatagctgttaatgctgccctagccacttaccaggctatgccccacatgccacaaaccctctgctgcagacactatttccctaggagttaaaggtctggagcccagaattgtctataagtttttccttgacccagagagatcagaggattcagaatcagccaataaggtgctttctgagccatgctctttcaatacaatgtccttccataccttaarttggagaaatagggtctttatctcttgagatagtcttcttggggtgcctcaaccaccttggcatgtgatagccacatccagagcgctcagaagtggggccatcttgtcctcatacaaggaaacagatccttctccttatcacaaactgtattacaaaaggtgacagaagcctcctccccatgctgggtgttggggctcttcactttgtggtctatgggcaacgtgacttgtcttcagctcgagagaggcagaggaagcccatcaaagagctgtttcatctctgcaaagaacaagtcctgagcacagggatctcaattcctttccagttaatggggctacagctttttaatcattactatgaacatgaaaggtgtgatcacctgtcagatcatcacaggaggcaaggtataaccaccacttcggggacactttccctaaaggggccctgtcctctcgacaagctcttgagaccttgactttccaaatcaaaaagtcaagggagggaggccatgcaaacaaccagctgagagccacggtactcagcaaaatcactcaggtcaaatgaaaatcaaatgctcaatgaaaaagctaatacaaaatataaacagtattgcctcgactgagaaaacgttatacatacgagggaagcacacccaaatactaccagttattgagtgcttattattattattattattattgagatggagtctcactctgttgcccaggctggagtgtagtagcacaatcttggctcattgcaacctccacctcctgggttcaagcaattctcctgcctcagcctcctgagtagctgcgattacaggcgcatgtcaccatgcctggctaattttttgtatttttagtagagacggggttttgccatgttggccaggctggtctcgaactcctgacctcaagtgatccgcctgccttggcttcccaaagtgctgggattacaggtgtgagccactgcgcctggcctgaatacttattttgtaccaggtatacatgatggtgggaacttttctttagggtctttttctcatctctattctcttatgtatagaaaagttaaaaaaatttttggtatatatattttatatatataatttatatataatataaataatcagggagaaaagggttattaaaactatacagaggagactctccctccccactgaagtkaataatcaaaatatcagatgtcaaaacacctgatggagctagggaacttatgttcaacctcctacttttatcaattcactctttttattgaggtgcaaaggttgttggtttctagtttctttcttccccactataaataatgctaggggtttattggtatttttaactttaatagatttggttttttaaatttcctttttcttatagatggagtctagctatgttgctgaggctgaactccaactcctgggctcaagcgatcctgtcttctcagcctcccaaactactgggattataggcatttggtatttttaattttaattttaaaaattattttaatatatctttaatacatttagctgggttgcactccatcaaagttgaaattactcaaatgtccccatctcttttgacttcagcaaaaaatatatatatttttagtaaagtacaatttacatatagtagaataagcaggttttaatgaccaaaactgcttttctaaagacaagaatacaaaaccactttatttaaagtttttagaagccaagttcatgcaacaatctcattttacagttaggaaataaaaaaaggaacccagccattgcttatatctacctaatgtgtgtgatatcagtcaagcgacacgttcaaagaaagaggaagaatgagactagagccccagcatcttgatttcctctctacacggcccctctgcttattgctccctttttcttgtgccctgcagcttatattaacttaagtttttatttcctcaatctcaaagccatgaggaatagtatttggagatattccaawacagttttcagagaccttgtgagtaacattcagtatcagtaagaaaatagattgtgtcaaagcaatggaaaaagctcagcctcatctcctttctccagcttaataacaccatatgtattacttatatatttgccagtacaaaactcactttgggtcctaaagctgttaaatcattagtttatgattaattagtttaacattaccatgtaaacctgctgatcccacctcgaaacatatggacactgggatagtaacatctggaataagaactgtccatgcttgaaactatactacaatagctatgagatgtgatgagctctaaaggaaacctccaacttctgcctcccatgaaccacagggtgccctctggggggccaaatggggcagctgattgatgactatctgatcaggtctggccaaacagtaggccaaaccatgtggaggccatctgtcactgccggatggagacagaaaaggaacaggaatagccccagtgcccagcaaagataacattggctcacgagtcctgtccctctggcctggcttgcccatagcaatgtttcctccagcaattgctttacaaaccattaagcagccatgaaaacaagcgcctggccatatgtccaaaggccacaggaaacccaggatctggtttaagaaaaaagagaagctcctctctctctctcagctctgagtaaacctccttgggcagggtaaatgtttttgtatgaggcatcattgcaaaattgaaatggtagggaatgatgggtacagctggaatcagattcaggggcacctagtgaggcaagtgattaggaaaaattgcagcttttctgggttaggatgtagtaactttaggctacctttaaggttgaaattagagcctctaagacttccgggaaatatatttatcagcattttatccccaactgcccccccagcccccgccttttttttttttttttttttttaataaggcctggctacttagagcttgatctgtgacactggcttcacctagcagcttgttagaaatacagtatttcaggcccttccccaactttctgaatcagaatctgcattttaacaagattgtcccaggttataggtatgcacattaatgtttgagaatctctgcagttaggagctgaggagcttccccgaacaagaactatttcttctagcacgcctgatcttaacaatagctgaacatttgcaaacataacatcatgccaaatgtgcttaaaatgtacaaacacatttcacccttaggccatccctgacaaagtcactgtcattatcccctatttacagatgaggtggtaaggttctgaaaaatttaaataacctgcctaggatcacagtactaagaaggaagtacagagctacagttagcacctactgccccagctgttttactttgccataaatgcaatagctggggcacttccctctcccttgagggaagacgatgagaaatttctactgaagatctaaaaatcacagccgagagaaaaagagcctctggagagagaactcagtaagcgtgttttcatctctgaagctttcccattgggcccttgacgtgctcttggattttccagaatagcctagctccggaatgggcaggagcctggtaggtggaattctcttgccccctcctgccttgragcaayaatctctacctgtaaatctgaagccagctgccctgaggaacaggtcattttctccatagaaccgcaagaaagttcaagattaaggcaactctttgctttcatcaatatcttgccttatagctggagtcttaaatatgtcatcctatatgtttattcatccattgattaattcaacaatacaagacattgtacaagcaaggtacaagacagacaaaattcctatgttctcagagtttaccttttagtagaagagtcagacaataaattaataaatatttactatatctttatttcagtgttacataaaatatgcctgggaaaaggatagcacgtgatggggctggagagtgctacataaaatagagaagccggggcagggtgacccctgagcttgaccctgaatgaagtaagaaggtgagccatgtggctatctgcagaaagaggagcagcaggggcaaaggccgtgaggcaggaatgtctttggtgggtcaagaaacagcaagaatcccaggatgaccgggacaaatgacaagttgtagaggctgagatgtgaaaagtaagtggrgttcagtctattggatcccagtaagccatggtaagggacttcggctttcattatgaggaaaggaagacatgaaggtattttaagcagaggagtggcaagatgtaacggacctcacctttaggcaggatcactcaggctgtgggtcgagaatggactgctggggagcaaaggtggaggcagagagaccaggtaggagctactacagcagtccaggcaggagctgatgtcagcttggatcaagggggtaaccatggaggcggcaataagaggccagattctggatatattttgagattagagctgaaaggacttgcagaagacagtcctttagcttttcctcatttccgggcctctggttgtgtaaggaactgtgacttctgctttttgtgctgctcccttctcatccgcccgtctcgtcctgacctctcacacctcttcagtttcctgacttgcaaacgtctcacctgtaatgtctgtaatcagtctctgtccttcatctggtactcctagctggctaccatgctgtccccaaatggcactgtcactgmttattatcgacacttcatatttgtgttctgctttacagttcaagacttctcatgtgcatatctcatctgacatactaggtttcactgaccatttcatgcctttcattcaactccaggagaccacaaagaaaggcataagtcagctttggctgaatttcrgacaaattaactgcttagcaaatgcagacctgacggagaacaagtagtggccatagatgagtatgtgtaagtgggtgggtcaactgagctacaggtctcgggggcaaacaccgagaggatacagcaaatagcctgggttatggaacatgctgacaaaggacctgagagagcagtggacggaagccagaaaagaaggtcccaggatcgtgggtagagaaccagcagtgagggagaaaaggagggagatctggggtctgaaggggataagcaataaagagagatggttgagccaggcagtgccaaccatgagtcagaaacctgagtcatcagccaagtcctgctggtcagctcagaggagccttgcagaagggacscaggccatgtgtgcactagagcaaaactgagaaggctgcctaaaccaaggagcttccctgtgcttcctgtttgaataggaaccaatccccaaacatggctgattagagttagggcgtaaaagcaaatgggacatctggaaaggttgggatggggagcaaggagtagggattaaaacacaggcactctttctccctgaagactcttgaggtcggagaaatgtcctcatcttctcctgtagtttagatacttgactctccaaacctcatgttgaaatgtgatctccaatgttggaggtagggcctagtgggacttgtttgggtcagggggacagatcccttatgaatagctcctcctcaaggtaatgagtgtgttctcactctgttagttcccacaaaagctggttgttaaaagaacctgggctgggcatggtggctcacatctgtaattccaacactttgggaggccaaggtggatcacttgaggccaggagtttgagaccaacctgggcaacatagtgagaccctgtatctacaaaaaattaaaaaattagccagcatggtggcatacacctgtagtccagctacttgagaggctgaggcaggaggactgcttgagccctggaagttgaggctgcagtgagccacaatcctgccactgcatgccagcctaggagacagaaccagatcctttctctcgtgccatgtgacctctacatgccagtgtctttcatcttcctgtatgagtggaagaaatctaaggccctcaccagaagcagatgctggcaccatgctccttgtatgacctgtagaactgtgagccagacaaacctctttataaattacccagattcaggtattctttttttttwaatatactttaagttccagggtatatgtgcacaacgtgtgggtttgttacatatgtatacatgttccatgttggtgtgctgtacccattaactcgtcctttacattaggtatatctcctaatgctatccctcccccctccccccaccccacaacaggccccggtatgtgatgttccccaacctatgtccaagtgttctcattgttcaattcccacctatgaataagaacatgcggtgtttggttttctgtccttgcgatagtttgctcagaatgatggtttccagcttcaaccatgtccctataaaggacatgaactcatccttttttatggccgcctagtattccatggtgtatatgtgccacattttcttaatccagtctatcattgatggacatttgggttagttccaagtctttgctatggtgaatagtgccgcaataaacatacgtgtgcatgtgtctttatagcagcatgatttataatcctttgggtattctagttcaaccattgtggaagacagggtggcgattcctcaaggatctagaactagaaataccatttgacccagccatcctatgactcaggtattctcttatagcaacacaaatgaactgacaccctccaagtccacaggctaattatttgataactttagagtttgacctcagggctaatgtcaattggcttatttccttcaccctgaaccagtagtgattttcaacttggttctcagcctggtacagatttcctgagtcaccacagtacggttaaatcagaatctagagtggaacccatatgtggtattttgggcatttttaaaaagcttcccaggtgactccagcgggcagtcagagtgcaggactgctgccttagagacaagcactagcttcaccagagttgaattcaaagcacacccttctctcctttgggtctagtttaatgctgacaatggtgccaagagcaagggtcataaattaatcctgagcagatcagaaaataaaatctaatgctcctactgagtcagaagaaaagggaagttccatccaccaggctgtctgtggagatacaaacactgtatcctgttcaacttgattgataagaacaggtctggctgggtatacatgcagtactttgcaatcacaggttccctaaaggcctgccttaggaactgcagtgttaacagcgaccactggatcatatttatttttgtcagggggtgggggtktgctttttagtggctttgcttctgtctttaggatgagaatcccagaaacaaagatgtttgggatcagtggaacttgaaagatcatgcagtctggtagttcctggatgttagtgtgtatcgcctggggacactgtaagcatgtccatccctgaagaaaatcagtgctctcattcaccttctaattggtggttgttcagcttctgctggagccatgccttattgggctccctcaaaaataaaggccctaccttcctagctctgcatccttgatgctcaaatagtgttcagggttggtgacagacactgtgaaatgcttaacatcatagttcattcaacaagcgtttatttaggcacctactaactgccaggcattgttataatttctgcagatayagctgtgaataaaacagacaaagctctgcctttaggagtttatactctagtgggcaaaattcyctttgcgttaggtacatgaatttgggaatgactaaatttcaagctccttgaagatagctttgtgtctcatgaaccttgctgttctcagtgtttagtaaaagacacagacagcaaaagtttgttgaatgcacaaatgagtgaatactgtgtggtacacacagatcctcttacttcagcttccctaacaccaccagtgttggtgtccacactctgtcatggccattccctttaatgtttaggaaggttatattttcaagcaagtaaagacccacttgcaaaatactcactcttcagttgtcttcttttcttttttttcaacataccatacaatttgtccatttaaagtgtataattcagactgggcgcagtggctcacacctgtgatcccagcattttgggaggccaaggcaggtggatcatctgaggtcaggagttcaagaccagcctggccaacatggcgaaaccccatctctactaaaaatacaaaaattagccgggcatggtggcgggtgcctgtaatcccaactactcaggaggctgaggcataagaatcacttgaacccgggaggcagaggttgcagtgagccgagatcgccccactgcattctggcctgggcaacaagagtgaaattctgtctaaatgaaatgaaatgaaatggaatgaaataaaataaaaagtgcataattcaatggtttttagtatattagtatttagtatatagatatgtacaaccaacatcacaatcaattttagaacattttcattgtctcaaaaagaaactctgtacctattagatataactctcttataccccttccattctaactctaagcaacaactaatctactttcttctttaaaggtttgcctattctggacttttcaaataaatgaaaccaaataataagtggtatttggttactagcttctttcacttagcaaaatgttttcaaggtccatccatgttgtaacacatgtcagcatgtcattcctttttatggccaaataaatataagtccattatatgaagatactacattttgtctatccattcatcagtttatggaaacttgggtagtttccaccttttgattattatacataatgttgctgcaaacatttgtgtacaatgtatggacattttatgtagacatatgtttacatttctcttgagtacatacctaagaattgaattactaggtcatatggcaactctaactatttgaggaactgtcagactgtattccaaagtagttataccattttacacgcctgcagccatgtgtgagcattctgacttctccatatccttgctaacatttgttattatcagagttttacttttcttttttttttttggagtcttgctctgttgcccaggctggagtgcagagtggtgcaatctctgctcactgcaacctctgcctcctgagttcaagcgattctcctgcttcgccctccccagtagctgggactacaggcgtgccccaccatgcccagttagttttttacctatttttagtagagaccaggttttgccgtgttggccaggctggtctcgaactcctgacctccagtgatccacctgcctcggcctcccaaagtgctgcgattataggcgtgagccactgcgcctgtccagagtttttgattatagccaatctagtgcattctagtggggaagaagtagtatccagcctgggtgacagagcaagactccatctcaaaaaaaaaaaaaaaaaaaaaaaaaagaagtagtatctcattgtggttttgatttacgtttccctgatgactaattatgtcaagcatcttttcatgtgcttatgaccatctgtatatattattgaagaaatgtctatttaaatcctttgcacattttaattgggttgtctttttattattgagttgtaagagttctttatagattgcagacataactcccttatcagataaatatttgcaaatattttctcccattttgtggtttttcttttcatytcttgactgtcatttttgatgcacaaaattttttgttttgatgatgtccaacttatccatttttaatttagtgtaaggtaagggtccaacatcattcttttgcttatgactatccagttgtcccagcaccatttgttgaaaagacagttctttccccataaaatgatattggcactcttgtctaaaatatgttgaccacagacacatgggtttatttatgaactcataattctattccattgatctatatgtctgtccttatgccagtatcacattgtcttaattacttttgctttgtattaagttttgaaattggatagtatgagtcttccaactttgttctctttcaacattattttggctattctgcatctcctaaaattccacatgaattttagaatcagtttgtcaatttctacaaagaatccagttgggatcctgatagagatatactggatttatagatcaaggatttgaggagtattgccatcctaacaatattaagtcttctaatcaatgaacatgagattttttttcatttatttgtatctttaatttctttcaacaatgctttayagttttcagagtataagttttacacttttttcattaaatttattcccaagcatyttattcttttttatgctattataaatggaatttttttcctatttccattttcaaattatttattttaagtgcatggaaagacaattaatttttgtttattcattttgtatcctgcaaccttgttgaacttatttactagctctaatagttttttactgaatattttgggatttttcatatacatgcttgtgtcatctgaaaatatagttttacttctttccaatttggatgactcttrtttctttttcccgaataattgccctgaatagaccctccaatattgaatggaaggggcaagagtgtcgttgtcttgttcttgatcttaagcggggaagtatccagtatactattaagtataacaatagctgtgaatttttgtagatgccctttttctggttgaggaagttatcttctattcctagtttgttgagtatttttattatgaataggtgttggattttgtcaaatgctttttctgggtctattgagatgatcacrtgatttttgttttttttttcctactgaagttaaaccaagctcacaattctgggatgactcccacttggtcgtggtgtgtaattctttctatatgttgctggattttgtttctttttgtttgttttaaagatggggtcttgctctgtccccaggctggagtgcaatgacacgattataactcattaaagccataaaactcctggagtcaaataactctcctgcctcagcctcacaagtagctgggactattcgtgagcaccaccatgtctggctaattggatttggtttgatagtattttgttggaaatytttgcatccatatttataagagatattggtctgtagttttcttgtgtgacagatttatctggatttggtatcagggtaatactggccttgtaagctgggacatgttccctcatcttttttttttttaatataagcttacaaaaaatgagtattaattctttaaatgtttggtagaattcagtgatgaagccatctgggcctgggcttttctttgagaatatttctttgattactaattcaatctcttcacttgctattggtctattcagattatctatttcttcttgaatcagtatcagttgttactacctttctatgaatttgtccatttcatttattatctaatttattggcttgcaattatttatagcatctctttataatactattttctcgtaaggtaagtaataatatcccctctttcacttctgagtctagtaatttttttcattkgttgttctaggtaaaggtttgtaartttggttgaccttttcaataaaccagcttttggtttcattaaatttctctattgttttcctattctctagttaatttctactctaatctttattatttcctttcttctgcttgctttaggtttcgtttgctcttctttttccagtgttttaaagtggaagtttaggttattgagaacttttttttagcttttttaagataggcattacaactatatgttctctctaagcacaattttagctgtatcacgtaagttgtggtatgatgtgtcaaaaatttcattcatctaaaattagtttccaattctcctttttattttgtctcttagctattggatattcaggaagatgttatttaatttccacctattcgtgaatttctgaaattctttctgttaccgatttctaatttcattccattgtgatggggtaaatatctggcattatttctatccttttttatttcatgaggtttgttttttgacctaggatatggtctattatggacaatgtttcatgtcctggagaagattatatagtctgctattgttggatggagtgttctatagatgtctgttggttcaatttggcttatagtcttctatttctttgtttaggtattctatttccttctgctaatttgttccatccattattaaaagggggtattgaagtctccaattaatacacttgaattgtatatttcttgcttcatttctgtcagtttttgctttgtgtattttggtacttttttgttaggtgtatatgtgcttatagttgttacatcttcctgatagagtgacattcttcttctttaaaaagttgcyttttatctttagtaactttttgctgttcttttaaaatgcacttaaraatctgttattaatatartcacttggctattcttctgattgctgtttgcataatacatgtttttctatccttttactttccatctatttatatctttgaatccaaaatgtgcctcctgtatacagcaattagattgggtcttatattttttaaaaatgttttttgacagtgttactaactggatcttggtttttaaatccagtctgacaatttctacctttgattggattattgaatcctttcacatttaatgtcattattaatagagtttatgtctgccatttgacttttttctatatgtcttttttatacttctatwaccctgtactgctttttttgcataagtgagtattttgtagtgtagcatcttggtatctttactgattgatttttttcactatattttgggagttattttcctagctattgctctagggcttaccatatacaccttatcagaatcagcttctactgtacattaacttaattccagtgagacataaaaatattactcctatagagctttattccctttcctcacattttgtcatattttatacatattacatttataaatgttacaaaccaaacattagattgttataagtatcactttctgtaattttatgtcttttatagaagctgagacaaaaaaggaggattactatatatttatagcttttttcatattagtcttatttatcatttctgaatcactgtatttgtttctgtggattcaagttatcatctggactaatttccttagcctactacaaatttgctcctaccaacctcctttgtgctatcactggaaaacatattacatttttatgttataggcccaacaatacattatgtacatattatcttatatgattgcttttgaaatcaattaagagaaaaaaggagaagaaatgtgtgtttatactgtcttttatagtcacataattacctttatcagtgctctttgtcttttggtgtagattcaaattaccatcaagggtcacttgcttttagcttgaaaaacttcctttattatttcttataaggtgtatctgctagaaacaaattttctcagtttttgtttatctcagaatagttttatttcaccttgatttttgaatgatagttttgttggatatagtattcttggttaacagttgtttcctttgagcactttttaatatgttgtcctacttcctttggacctccattgtttstgatgagaaatcagcttttaatcttattgaggttcccttgtaacagagaagtcattttcctcttgctatttttaaggttttccttgtctttggctttcagtattttgccataatgtgtctgcttatggatcttcttgaatttatcctacttggagtttcttaagcatcctggccataaatattttaaaataaactttgaaagatttcagccactatttcatctaataatttaataatttttttctgtttcttcctctctctcctctccttttggtactgccattatgcatagcagttggtgcacttaatggtgtctcatgttttcctgaagctctgtacatttgtcctcattcttttttctctctgttcttcatattgcataatttctattagtttatcttcaagattgttaattctgttttttcttgtcagttcaaatctacattgagcctctctaaaaaatttttgtctcagttattgtatttttcagctccatatttcctttaaaaaaataagcctctcagcctgagcaacatggcaaaatcccatatttacaaaaaatgaaaaattagctaggcatggtggcatgcacctgtagttccagctactcaggtggctgaggtgggaggaccgcttgagcctaggaggttaaggctgcagtgagccatgattgtcccactgcacttcagcctgggtgatagagcaagaccctatttcaaaataaataataataataataatgtctttactgatattctgtgtttgatggggacattgtaattatgctttcatttaattcttcaactatggtttgttttttgaacatatctataatagcaattttaaggtctttgtaaaatctgacatctggttgctctcacaggtgatttctattgactgttttttattttttttctagtacatatttttactccttttttttcctggtcatactttcctgtttctttgcatgtgtcataatttttttgttgaaaattggacattttaggtcatatagcagcaactctgggtactggtctcccacttcttttagagcttgttgttgttatttgcttatttgtttagtgactggattattgaaatctattcccactcccccacagctccacagtaagaagactccaatgttgctcccagggggagtacagcattggataggctcacaggcaccctgcaatggcagtggctttggcagtgctctgattttctttccctgaccacacccagctggtaccagatcttgtaccaggtttgatttttccttggtgctgtcaatggaatttaattccattaattgcaagctgattgctctattgttttcaacaatgtactggggcataagtggttccacagacatatgcaattaaatttgggtctctttgaagagatagttcctgaagtcaatgcttgaaatttgttctggccccaggagatctctttccctgattgtctctggcaaactaacctgcctgaaatgctgcctrtgtcgccaatggatctaccaatcttctaatttgctttcaccagaacctccctaagagcatttttgtaagtggcttaaacttttccatcctctgttgcacatgaaatcagttcctttggggaaagatttagagttctttttttacagtttgtttctaccccaagcaaaatctctgagctgcagctctggagctggggttggggacaatggtgtgctttcctgaatgacacccccactttaggagctgaatgctcagtggagtgagatgaatagcctcaggtcttcttggcttatctctcccaacatggaaattctgcctaagggtgattggggccctggcacacattgcacagccactgttctaagaatgagggctgggtagaagggagtctccatctccgggggacattcacccagaacttggcttcagcaacacgtagtttggggcaggataagaaatgtcccacctgggaagatactccttcaactgggaactagggtggagggtaaaggaaccctgtgttcttggttgaagctttctggagtggagtttcaaacttactgagttgggaggggaaaagaagagagtgggtcttggttcaaataccacaggctcactgttcttattgaattttagtgtatgttcttgaataaatgtttttcatttgctgtatgcattttggaccatttccgatactttaaatgcttgttttaaaatttttcactagtttcaatggataacaggtttgcagagttcttcacactgtcatgctggaagtgaactgtccttcagaatgtataatgttttcttttagaaagtgataatttaatacatatagatcttcatagagaaatagttttctgatttaacgtgcatatagatcacttggggaacttgtttacaatcctggggtcctactcccagagattatgattttccagaactagggtggtaatcaaaaagaaatctgcatgtttagcaagctccctatgtgattctttgacaaaaaattatactaaaaagactaatgcttactggataagattgaactcttcttcttcatttttttaaaacaagttctatgtctactaagggactttgcagctatggcagtgtcaaacactggctacttaaacattacaatagtgtgtgtgtgtgtgtgtgtgtgtgtgtgtgtgtgtttacaacaaaatctagaaattctgacattctaaaaaatgctgcctgtttggagatggraagtgccacagaatcatggtttagggctgccaagaatcaaagatgacagagggcttggggcaaggtttctcagattagggttgggagattagagttgggagaccacctgcctgcctcagaatcttgatttttctcataccagatctgatttttccttggtgctgtcatttgtaaycttccctcaaaacaaagagagaacacactgtagttttttttctgcaactggtctgatttgcacaccatcaagtggcaatatgtgcctttggcgagcaaattagtgggattaaaacagctatcaagcatgctgcagcagaaaggattcctcccgcccagctgcacattgttatcactactgtgaatcctcacagtcataatagaaaatgaatatcatttcatattttaaaactctagacagaagccattagcaatttatttttcccaaagaaccagctaattaaaattgtaaataagattgtgttacgtttgcatgtactcctgcgagtcgcatgaagaaccagaacatagatggttagatgactgttctgtgcatattaccacccaacttcacttccatctgcccatactcccatcagagtagaaggccacaatcaggggaaggaaaatttatgcaaaaggcttccacaacagaaggcagaattaaacaagaggaaggccccagagagctcaggaaagctggttgtctgaggcactgtaagaagcaacagaaaattttcctactgggtttagtaggtgggttgttgttattattactattaattgaagatcaaaagaactgggtttcccagtgggaaattcaaaaacacatgttatgataaaaaatctaaagatcaaccaattttaactttttttcattttatttatgtaccatatttagtaggatatcactcccacactcttggtatgttaataattgatggcctctcctggtaccaattcatagataaaatttagaaaatttctgatttttcttctgtgatttaatgatatgcaattatttctttttattacagactgaatagcagagccccaaaatttatatgttgaagttctaacccccaagtaccattaaaaactgactgcatgtgaagatagggtgtttaaataggtaattaagttaaaatgaggccattagggtgggatctaatccagtctgagtggtatctttacataaaaagaggaggttaagacatacagagagataccaggggtgtgtgctcacagagaaaaggccacgtggcagcacagtgagaaggtagccatctgccagccaagaagagaggcctcaagagaaactaaacctgccatcaccttgatcttgaacttttagattccagaactgtgagtaaacaaatttctgttgttcaagccacccagtccatgacattgttatggcagccctagcaaattaatactctcagtaatggtcacctttgctggaattgggtcttcaaccaatgtataaacacttgacatgtgaaaataaaacagaacaggtaagttattagttgattattttcattgacaaaatgatacacctaggacttctttaaattataagttctttggtacattatagagttacttcaattcacaggccattaatttctatcaatgaatgaacaatcaacattaagtcaatgcagayggttgattgaaaaatgtacctgacctgaccaccccctcatctaaattgggtccttttcttaaactctgtcctaacatcccttactcttccaacataagacttattggtttgtaattatatatttatttgtgagattatatacttaacatctatctctccgctggactctccatgagacataatcatctctgtcttgttcaccactatatgctcagtatccaatacaatgtctgatctttaattatatgttaaatgagtgaataaagaagwgataaggttcttagaaccttaagttggggaggttgattgacaggttttaggattcccctgaatctccggaaactgtctttaaaaatgtgtttatgcatacatttctctgaagagaggattcacaaccttcatttgatttcaaagggatctgtgaactacctgaaacataaggaaccattggcctatttccgtgtggtaaaataagattcaataccaaaagacttacctgcagcctaaaacaaagtatgctatatgtacatttacatgaatggatgtgtgggtatatgtatatgtgtgtgtataatttccaagaacggaaacgctgcagtgaatctacacaacaatccacattcccacttcccctgagtaactgatcattcctgtagtcactgagttcgagcagtagccacttgcatacatgtgtttcttggcagcaacatccatcacccaggccagagaaaaggaatctgtaattccctcttttcacctgcttgggatgctgacctccctctttgcaggaagtttcttttaataacaaaccttaaacctcccatttaacaaaggcaccaggtatgtttatcaagcacaggcgggcaagcaatttgatccaaaaaccctgggatttcccttcccttaccctgaagccagagaggagatccagcctaatcaggccaaggaagcctctgagtgctgtgtgcattcacagtgagggaggctacaagattggctgggacacactaattggctgttgcatactaaatctcttctcttctctctccagttccagaagatacttcccttcagtaaatttcctcccttatttttgtcctaaaaaatggagacttcaacagtaaatctgtctgaagaaaggtttttgatgtgctgttaactctcagttatccacactagcagagaagagcagttaattcaaagataattacagataattcaaaaccaaaggctcttttgatttaactttgcagttcactgtttctaggggcttggtggtggatttacctccctaattatggttgtctttgttgcttattaaaatgagtttgtctgccttagggccaggctgttgggtaatgtgaaaattctggcacagaatttgtaaaactcaccagggaaaatccacaaggcacacaaataatcagacttgactagatttgagttcacrttcttaatcacctgttaccaattgctttgctgctctacactaaagggagacagaaatgagaaatatctacaggagaccagtgggaagaaaatgagtctttacactgagatgaagacacaagactgtgttgtggccaagactgataacacaatcagtgttgatgatttccctgcctggtctcataaccttcatctctgcagccagagtgatctttctatgcaagtctcatgatgttcacctctacctaacatctttcagtgtgctagtcattagagctgttcacaaccatcctgctctctctttcccagcacgtgataggactgcacaatgtccccagccacttcaaattggacgtggttctgtgactggcgttggccaacggaatgtgagcaaatgtatcacttctagttggaargtttcagagccagcatgtgtccagcatgtgtccttsggtacatgctttgcctggcaagactggcagcatctgagctggcagatctgagctggtgactataccatcagcccaggtctctctgggtggctatgataagcagagctcctacaagctagggatgggtgtgtggtaggaacaataaacaaacctctgttgttttcaaccactgacattttaaggttcttggttaactcggcatatctctatcactgcacatatcaagctgcaccatgattatctacttttctttctctagctagacagtgaacaacttgaggccagaattatttaattaaaagtaatggcaaaagcacaattacttttgcaccaacctaaaatatttcttctccagtgtgttaactctagtgcatagcatatttaaaagagcctggtagacaatgaaattctcttccttcttggcctctgtgattcaccttgtttctgtttttctaacacttgccccactcccaacatcaccagctacaatgataagctgtctttgtttttcagatatatgaggaatggtggagctattcttctggaccaataattcaagtagaaagagctggtggaggagataggcattctgaggctgcaggagtttgaaatacaatggcttcaaagagcagacacaattttgaaataaaatcttggggtagccacgcaggaaaacaaaaatatatcccgaagtgttaggtttatgagggataagagtggtcatctggagtgaactcctccatccttatcattatcataacaccagcatttactgatgacttactatgtgccaggcaccgttctcattgttttacagttaacacattaaatccttacaacaaccttatatggtagctattattatttccattttatacataaggaaactgaagcatagagaggtaaagtaagttctatctggccaaacrgttagcaaacatccctctctgagtgttcagcatctgcctgaacactgctcatcatggagagctcactgtctcccactgcatcccaccccacctcctgctccaagccacatcctgccgccccttcaaactgccatcccctgaacatttctgccttctaaacaaacataaagcaattctacccttttctctttaaggcagccctttaaatattcgaaggcagaaatcacatgtcccttagggtttctcttccccagtctaaacagccccgggtcactcaaccatttccaatgtgccacagcttgaggcccctcaccatccccgatcagtgactcacacatgctggggaccaaaaaacgttggctaagtcagtgaagtggaactggtggaactcrcccttctagacttgagctgagccaatgcctcctacaacccgggacacattctttcactgtgtaaagcaggatctggaggcataatctgctgcaggaacagctggctggccacatgccctgcactcatccccattccaacaaatggaacaccaaagggtcagcatgttcacagttcttcctcgggtggaaagtctgtttctgtccctcctcccacttctccccactctcccactcccagaggcagtgctgagaacagcccctcagctcaccatggagttcatggcaaagtgattgtgctgcgtctggaggtcaagggcgtactggtagctgactccgatctccgtgtggctctggaggaataactccttgttgtggcttatccagtcaaacatctagagaggacaagaaggcacagcataatcagaatggtcatgggtcgaatagggcaaaactttcagagctagtggaaggggaaaaagctctcctgctggtgctcagtgagaaccagttattgttctgagtctcggggtcttaatggggtgggccacagcctgatttctcaggagagccctcacttttagcgtaagaccccaccagcagccgctgtgttgcattacagagcctaagggaaaaagagaaaatgagtgagataattgggagatgggagaggaagctgtttaccattaccagcatgcttgctttagggacaggtgctgaggagacaagctgggaggcttaatgcatctcctgccgcactagtagaagagagaaatctttgaaggaagcaacagggacatccttactcgcctctgccccccttatacactgcccagccacacacaatgttgaattgattctgaagtgaatcagcttttctcataactctacagcctcacaattcctgggtttctgctataacccactgggaagcagaagatgagggttttaagcgtagtataagtaccacctggtgctagcacagtgggcattaagccatcttcctcctcctagctccataccctggttttcacttaggtatccagccctcttccaggcagcccacatacttcaatgggagctgaccagaacccctggctttttgggacaccagacctaagccaaacagtgcatgacatttcccaaccaatgggattgtctcagatataagaatgtgatccaatttagtacaataaaacatgagggaagtttgctagaaacttctaggaaaacagaatcctagttatttagttatggcttctcttcttccagtattgttgtatgtggctctgacctcaaattgctgcagccattcttctggcagcctgagggtgaagccaatgggtagagaaagggtggagccaagacaactgcaggaagcaggcagagccctggctgagcattgtctggtttccactttgtctctggacttccttggacctgagccaakaaatcctctttattattaaagccagtttaagttggactttctgtaatattctgtccagagcaggaaattctactattttctccttaaggcagccctttaaatatttgaagatagccatcacatgtcccttacagtttctcttccccaaggggatgcggactggaagggaagagaaaaatggttaggaggctgctacagaaatcctgatgtgggtgaggacctggaaactcaaccatttccartgtgccacagctcgaggctcctcatcatctcagctcagtgactcacacatgctagggaccaaaaaacaatggctaagtcagcaaaagccaagaaaggtgtgaaagagtatacttggagaagagaactgcactacttaagcctcacamtccatttgggatggactaaaggccacagcccagttgcagagtgaagcaggaaacagctgagaacagaaacaggctaagaagtggccatgattgcaccagctctctggagccagaactgcagccttatccaattatgtcccttgaacagaagagtgagttactacttcaattacattcaaccagtatttatgggayacctgctatgtgccagggaccgctggaggtggcatgaggcaaaaatgactaaaatatggttcttgagtattagtggcttaaaggctaatgtggaaagttgacatggactcagatacaactttattataatctggcacacaatgtgattaaaattacaactcaaaaaaacatctactgataagatagaggtgaatattggctgttgagggagcacagaagaggccacctcacctatccttgaggagtgagatggggaagagcagagaaggcttctcagaggaggtgacacctgagtcaaaccttgattcagataggaatcagccagatgaaggccagtgggatgcatgctcaggcaaagcgacagaactgggatagcccwctgtgtcgagggcaatgaagggtcctcagctgtgtttctggagcctgacatcaaggaggaagtgtggctggggaggcaggtgggacagactgaccacaaagrgccttgcacacaggcttcagggaacctggaccacacattgtcggctgccaggtgctggtgggaggttttaagctgggtagtgaagtgtgaagtgagctttgatgacagtgagggatgtggactggaagggaagagaaaatggctagaaggctgctactgaaatcctgacgagggcgaggacccggagtcctggattacgggagtggcagtagagtctgagaaattggcagatttgagagctactgggagcaggattggggacttagttgtttagagaggagaaggtggggaagagctagagagaacagccaggcttctggcatggcacctgagtcctggtaataaaaagtaccaccacagatgctgcctaaagaagaaggtaagaagcttgggtgggaaattgtatgttccgttttagatgtgctgagtttgggaggcctgtgagagtttcaaggggaggtatccagtaggcagttagatttgtgtctaaaggtcaggagagagacatcagggctgtaacaactcacacttaagtataaaaacatcaccttccaaaggcaaacgtgcatgatttggagattattctcccttttgaattacacttccatctacttacaccaacagtaaagaaaggacgaaaggaccattctttacttctgagtgtcagagaatttatttcaggctggggctcctgtagaggttgggtcgatatttgtgctgtgtgcactatcctgggtcctccagcctcagctaccctcacatcacaggcatttgttcagggcttttattttttcttctttaattattattaaggacaagaaggaaaagaagacaggaatttagaggactctgattctataatttttatctttagaattctgcctcccagccctattttaaaataatttctcatttcttttctttattgacaaaagaatcaataaagttaatgaaagtctgaaatgcctgaagtccttagaacttgtgatgaaaagcgctcactccatacactttcttggatgtttcagtggccgattagtgaccttccctgtatgttatgttaaatggtcacttagatatgcaaataagcagatgagttatgtgctggcaccagaatgattagattgctcagcaccagatccctcaaccacagagtagggaaagctgaacacaggccaattagggtggaaagcaatataaaaatgagttaaagacaggtgagagttgagagtgctgaaggaactgtgcaccttgctgaatcagcttcttacaaaatgaggtctgcgcccatgccatcccaactgattttgcctcctacatttggagcatacaagcttgtcactggggtctgggacattctggaaaagtttagctttcactggaggtggcgctccaaagaggtgatacacatctcagtagagagaaaaagacctgctctggggattagatggtctcatgtgatgtcaggaaccaaggtttcctaagggacaatcacaartcttctctrgacctaaacttgctgcctactagcatataatcctcacccctgcaaggctggctgtctgcaaggktcatagtcatctctgttacattcagtggaactggctgcagaggcagaatgtgtgcatacatgaatgyatgcgtgtgcatgtatacatacagtcaagtgagatgaagactacactggttccaggcccagctctgtcactaactccacatgagactgtggaaaagtcacttcatttctgatcttctcctcatttgaagagatagtggtttgcagaatggaggcaagcatcctggtttataatacgcacaatttggaaatgtatagaatgcattttttccacccaaaataaaaaatagttttgttgattctcctggatcagaagatatattcattgctacaacttacatttctatctttttgaataaaataatgtcagtgagaaaaatggcattgttttatagccagaraagcttctggatttggtggtgggtgcctgtaatcccagctacttgggaggctgaggcaggagaatcacttkaacccgggaggyggaggttgcagtgagctgagatcatgccactgcactctagcccagggaacagtgcgagactccatctcaaaaaaaaaaaaaaaaaaaaaagaagagaatcttcttagtctcagccctgacaattgtgtgatgctttagagttcaaaatgtccactcacccttcatcattacattgcatccataaaacaatcccacaaggtgctatcatcaggcccacttcccaggcaggaaaacaggttcagggaagtaaagtccagggtgtagatttaattcattctacccaaggctacattcactgagtgcccactgagccatgctttggggacaccgccctgcctcccactcatatggctgtaagactttctctgcttgagctccccagggcagttatccctaaaagttagctgaaagggcagctgtagatgtccgtgtaataatctcttcagaacctgaatgatctcttaccccagatggtactctatctggggtaaggtgctattcctcagttggaacacttccctgtcaatatctagcctgctcctccttctctacctcctctttcttctcctcttcctccactgcctgccccaccaagatggagtgccaggtgtctggggatggctgattcaaatagctctagttctctcaatactcactgaatgaatgaatgaatgaatgaatactatgagttggtcataggttattcggttgctagtctccagataagtggactctttctaagctcccttccagctaggacattttaaactaaaaatatctccaaagtgccttcaaacttgtctttgttttttgagaagccacaaatggtgagttcagcaaagtgtaatataacaaaaaaaattctacaaagaggaaagttcgtgtctaaataatgaaattgtatctctttgaaattaacatagtttagtctcattaagaagatagatgttacatgtaagtcatttggggtttttttttccttttcttttggggttttgtttttaaccaagctaagtaatttttttttctgctggctaaaayccagtgaaaatatacaaatctagttcttaatacagtaaatgttaaatgaatctacttaaatgcaaattaggaaaacaaacagaaacctttttctcctttcaataataggaatagctaaaatgttattattgttctttttttaagaagcataaattatttcataggacaagtatattaagaatcttatgtttattttccttcatttgccaaatttagcaatagcatctgatttagagttttaactttcaaaccaccttattatctattgttagtattttatastctaattatagattacattggtattaaatatgttcatattcagctttgatgagctgattaagaggacacaagacaaccaatggcttttctttgcctaaatatgtgcatcccaatatcaatcatgttcactataccctgtgtacactacagtggtgcatccataaaagcttgtgccctagagagaactaacaacctccttgcrggtgaaccttgttatatctgggaaactagccgcccagtcaattccaaaataaaattgtatgagtgttagagcgcaaggaacagaattcaaatcagtacagactctgctgtataaactttgacaagttttatcattggtctgaaattcagttccttatctataaaatgtgggtaataatttaaactacttaaaccttagggtatcagggagattcaaataaaatgatggctatgaaaatgctttgttaagtgctacatatatgatagattctgaaatctgcatatgagcatatattctattgcacatatttcctaaatgttttcattatagtaaaaaacagatgaaaggtatgaatttaagattgcagtaaatggggaatcacacctgcagctcatatgcaaacacatccaccgcccacccacctagacatgcaccccccagagtgaccgcagggcaccgcacagacacagcccaaaggtgcctgtccatcctcccaccacctccaccttcacgcactcagagacccagacaccctctcggggctctgcctgagggcactggtgccttcctgctgtccctgggtggcctgaccagggaatcttacttcctcttggcttgcttccagactctcccttccccaccctctctgctacacctcaactctcactattagagactcagttcctttggctcttaacagtttttcactcaggtgagatgcctattaaaatgcaatttttcatgcaatccctcctggaattagcttatcctgaatatagaaacagtttagtaggagggcaaggtcctttgtgaacatggcccagggatgagatcctacaaagtggcagagaggtcctagagagtaggagggaagccctaaaatagacgtgagaatcaaaggcaaaatctccccactttacaattttgctttcatggaacttggactgacccaggacacattttcttgtgcaaatagggcaacacacagacctcataaaggaccccaaaatgtggagttttctccaggttccaagaattccttactgaaagaatgtgacatctcacctctttcgtatcctgcaaaccctgcagaccacagagtatttaggttctgaagagatcattacacggacatctacagacgggggaggcagctgggatatgggcctgagaggctgtaggtgtaataaatatctcttgaagctctgcttgtttccttcgtgtttttggcatgtcagttggcatacttttatatattgtgtaaaagagaagccatttttgtcttttgtcataaatccagtctgctcaaggaaggacagcacagcctggttacctgggagacactttcactgtatcctcagtaactggccaggatgccaaacatctcactgaccaggccacgtctctgatctgtaaacatgctacggatcccctaactcatttcttacaccttccatacccaaattccttaaatctcaaatcccatgtctaacacccttacatgttcctcacaatctagaacaggtcggatttctctgtgaaacagccaaatatcccactacgagcaaagggttaacaaaaccctttcccctcttacatggtaatttgaccttcagttaacatccaagttcagcttccctgaaaacagataaaagatggtatgtgccaacatgttgctaaatcatgtttcttatggtaaaaaaaaaatcccctgcttcacaaatttcatcttgattgggaggaactgtaagtgaactgcaaatacctgatgggtacaccatagcttggacatccctgaggtggtgatttttataactgcaatgttcattgcagaaactctggaagctgtgccaacggagttgttaccaaacatactggttcccatggggcatggagtttataagccatggcagctcctacagctgcccaatgcagatcttacctccttgcacctaagccgatggctgagctgaactgctgcaagcactgctctgctggcaagctgtggttcccatcttctatcattctcagtagatcagtacccaagatggcccatggtagtctcataaatctgagtgtttagtgggacctaagaagactccctggtaggtgttgtgctcatattttagagccaaactatacctacaacagtataaacctcttgtcttctttttcttcctcttcccttctctccataacaatttatctccatgatatgttaatgttatctccataacatcaatgatgatgacrgttatgacgattccaacaactaagatttgttaaatgctcactatgtgacaggtactgtactaagcactttatatatattaactcacttaatcctcctaataacctcataattatctccccaatattaaccctcaatatcatcatctcccttttatgaattaggaaactaaggcaccaagaaattaattaacttgtctaaagccacacagctaataaacatcagagtcaaggtttcaaacccaggaggtctagttccagagttgatgctcttaactctgctgctaaaccctccaatgagcccggagcttccttctgtctctccttctcttcatcaccagactttcagaagtgtgttctgcccctactgcctttgtttttcctccatccaattcctccttcagcccttaaaatatggttgcttttactactttcttgagttgacacccacgatgaaacccagtcacttcctagtttctgaattctttattctgtcagttctcactcactttgacctcgtgtcagaatcagatgcagtcctttctgaaattccaccctgtctgccccccaagaccaggtaattttcagcagcagcccatctggcttcagacatgatgagtgtctcttcctgctttcacaagtctctagacttgtaaacattttctctggagaatcagtgttttcacatacttgaattttcttccttgacacatcatatctagtctcagcatgacaaaaatgacaggaaaactctaattttgaaagcttaccaatcctccaatcctacaatgacttatctaaacttacctcccacttccctggctgccaatttgtggcttccttttgtgtycttcacagcctattgtgacaatctaaacatggacctcagccctttacccttcatccatcaaaccctctccatgtgaatatccacccgggcccacaacttcaacaacaataatactatgtcttatttcatgtgcctgtgccaagagccttcatagtgtatgtcacataatcctcayaataatgctacaaagaagatattgttaattccattttaaacatggtgaaaactcagtattaagaagccaaataaattggctaagatcccacagcttgtaagtgatgaagataaattggamtctagtgtccatctgaacctaaatcccatgcaagttcctgtttcataatgctctctaacaataacttcccagataattgacaagaataaatacatgccaggctctacacaatgaggtttacacacattatctcaatcctcataacagccttatgaagtaacagatgccataatcaccacctttttatttattttttttttaggtagagaaacagattcagagagattaagtaacttggtcatggtcacacattctgggtggcatattaaagactcaaatctaggtccacataactccaaaagtcatgcttttaaaccattaaatggtctccccaatacagacttaaatcctggactatctatagtcacacagtgcctgctatggtttgaatgtgcccccaaatttcatgtgttgaaaacttaatccccaagttcatatgttgatggcatttrgaggggaggcctttgggaggtaattaggattagatgaggtcatcaaagtgggaccccccccatgatggaattagtgactttagaaggagaggaagaggaacctgagctagcacacttgccctgtctcaacatgtggtgccttctgccatgttatgatgcagcaagtagatcctcacaggatgctataagctcttggacttcccagcctccagaaccatgagctaaataaatctttctctataaattacctagtctcaggcattattttatagcaacagaaaacaaactaagacagtatctatggactcaatattaatatcctcttaatgttccacaagcatctcaaaactactaatttttcctgccttcccacatcttcgcgtcatccctcagagctaactttttctctattttctcaaataactctggaatatgccttttacttccattattgctgctactcatccctcagcccaccctgcctagataataaattacaaatacttgcctatttggcccccttactccattctgtcccttatactaagccatcggaccccatcaggttcactgcactaatacattgctttcccgtgtcattatctcagtcaaaataataaaaagaaaacaaaaaccaacccctactattgctgatacctacaatgaaaaatccattcttcctaaccaggtatttgaggcctctctcaaccccagactggtccaaatctacattattatttcacatcacagtcctattccaagtatcttttgcagccaaattgttttattcactgccatgcagacacactatattatgctcattccatccctatattggtgtccacatttccccccaycatgaaatacccacactcaaatctccagattattcccatccttcaaaattgaagtctcatctcctcctgatgcctttcttgaccaaataagcccatactgacttctttttcttggaaactcatttctctagtgtttaccatagtagttcacaaacatagccttaatttagaactatctgaaatgttttcttaaaaaatataacttcctggctgggcatgatggctcacacctgtaatcccagcactttgggaggccaaggcaggtggattacctgaggtcaggagctcgagaccagcctggccaacaaggcgaaaccccatctctaataagaatacaaaaaattagccaggcgtggtggcaggcacctgtagtcccacctgctggggaggctaaggcaggagaatcacttgaacccaggaggtggaggttgcagtgtgccgagatcacaccactgtactctagcctgggtgacagaatgaaactctgtctcaaaaaacaaaaattaaatatatatattaaatatacataaaaattaaatatataaaaattatatacatatatatatatcttcctaggccctaccattgattttctgattccatagaagctctccaggtaacctcaatatacttgcatttttatttaaaatgttcacgtggagacttatggtctgtccctgactaagtagctggtatcatatttaaccctactgtctattagctatttgaaaggcattggtcaataaccaagatagaccaatgatccttgaaagggagaaagcatacagtgtaagttccatattcacctcagctttctccctgaggatattttcctaactgtggagcggagaagtagaagccaagcagagggcaggaatagtcttgatggatgtaaaaaatgggtatcagcgttcagggactggtaaggaggctgagatttgggtgacaggatattacagtggagggagatgcagaggagctaccttaaagtcttcactaaaatttccctcaggtccttagccaaatcccaagctttgcatatgcaggacaagactccagaaagtctagcagagaacaggtatgagaggtggggcatattaagagctaaaaagaaattttagaggtcacacagtgctggggaaatgctgggagttctaattcaaacagagtagagaggctttcatgagctctctgggcattcatttgtgaccccagaaacaccaagctataggaataagagccacatgtttagaataagggctatacactaggattaataaaaagataaaaatatacctaccataccaaagtctaaaccaaggctcaattagatcaatataatcttttgtaatttaattgtattcytgaataagactttaagatatttagggaaagataaactatcaagagcctctacagtgtatcatctacaatatccactatacaatgtaaattataagatatataaagagacagagaaaaattactgataatcaaaacaataaaattgtctatagaagatgatccagatatgaattagcagacaaggctttcaaaataactatgattgacatcttaaaaaaatggggggaagggacaaaatggattaaaaaatggaatgttccaatggagaatcataatctataaaaagaattgtatgaacattctagaattgcagagtataatactgaacttaagaattcactggatgagtgtaatggcagaatagatgcagcagcaagcaggatgaatgaacttgaaaacaaatcaatagaaaacagcacactgggcagggtgcagtggttcatgcctgtaatcccagcactttgggagaccaaggcagacagatcacaaggtcaggagtttcagaccagcctggccaacacagcaaaaccctgtctctactaaaaagacaaaaatatagccaggcgtggtggcaggcgcctgtaattccagctactagctactcgggaggctgaggtgggagaattgcttgaaaccagaaggcggagtttgcagcacaaaaagggaaaggggaagaggaaggggaaggggaagaggaagggagaaagagagagagagcaagagagaaagagaggaagagaagaaaagaaagaaagaaagagaaaaagagaaaagagaaaggaaggaaggaagaaagagaaagaaagaaagatgaaagaaaggaaagaaagaaaggaaagaaagaaagaaagaaagaaagaaagaaagaaagaaagaaagaaagaaagaaagaaagaaagaaagaaaggaaagaaagaaagaaaacagcacactgaagcacagagagaaaagcaaatagaagcacaggacacagcagaagagatgtgggacataactaaaagatctagtacagtgccgtccaatacaaccttctgtgatgactgacatgttctatgtctgtcctgtccagttggtttgccactaggtgccttttgaatatttgaaatgtggcaagtgaaactgagaaactgagtttaaaattttatttttaagcagggtgcagtggctcacgcctgtaatcccagcactttgggaggcccaggcaggtggatcatctgaggtcaggagttcaagaccagcctggccgacatggcaaaaccccatctctactaaaaatacaaaaattagccaggcatggtggcgtgcacctgtaatcccagctacttgggaggttgaggcaggagaatcacttgaacccgggaggcagaggttgcagtgagctgggatcatgccactgcactccagcctgggcaacaagagtgaaactctgtctcaaaaacaaacaaaccaaaaattttatttttaattaatttttttatktgtataaatttaaaggatacaaatgcaattttgttacrcggatagattgcatagtggtgaagtcttggagctttcagtgtatctatcacaccataatagtgtatactatacccactaaatttaattagccagatgtggctactgactgtcctgttgggtagtgtagttttaacacaggcatacttagagttccagaggaaaggagagagaaaatgggacatgatagactctaaggataagaaggatatactactccttctagagtagtatattgaacattgattccctaacatccagttcaccccagatcatttgttcaaaccagtcatactaatttcactcccctttttatttacatgttcaggattgggcaagtcttaatgagtatgaaccaacgaaattgaggagagatttgcttagagcttctgggaaacagaagtcaatgtctgtgtttctccctccttctcctgctacccctatcacttggggaagagtgaagcatgttgctctgttacaactggcagctgtcttagaaccatgaagggaaacagccttgcaaggaagttctcggccaaacagtgagatctcagcagaggagtgagatagaaagaatcctgagtgcctgaagatgggctcgcactgattcatcaatcttgaagctcacatcattgtctctgaatgactacttaaaatgtgaaataatacatttccttgatatttaagcaaattttactgtcttctgtttcttgaagcccaaagcattctgataccaagagtcacaccctcatgatgtttagtgtgattgttcattcacttattgagcactcgtattccagacattgggttagacacgggtgataaaagatcaaggccacggtctagtgagggggacaaacacattccatattctgttaatgttaataaaatgtgaaaaatactataagagacrtatactgtgggctgacagtagaggagcacttggtccaacttggcagagatagggttagggaaaagcatggatggcttctgggtggcaacacctggacagcacttgaaagacaacaggatttcrtcaggcaaagaaggtgtagtttgcaagggcattttaatcagaggaaatagcttragcaaaggcctggaggtttaaagcagcagcataaaatgagggattgtaagaagccatagtaggagatagggagataccagatcacaaagggcaaaagatgcattggggaaccactggaggggagtgatagctcagatttgcttttaactacgaagtgagtgtctagactgagaccctcccagatatacaggcatttatctcattgcaaaggggagaccaagccagccttgatctcatagaacaaaaaccaactagcacattgcagacttctcaccaactgatggtctctgcctccgctttctcytccattttgttccctctcccatctttttcacacaaactattcaaatgtctgggtcaaagaagataaagatcataatatgataatatatgaaaagttctgagtatagcatatgatacatagcagatccagaatgtatgctagtctctttccacttcctctgggttcagacaagataaactggcagtcacaacaagtagttgctgtctgattagagaaactaagactgcgaaacttcatgctaaaatcacacactgttcttgacgatgagctgcagttcagcagctgtctggagaagcacacactcaatgctaagccttaaaaggccactctcctcgcacttgccctcctcaagttaagtgatgtaataaaaaatctcaccaagtcattaatataaatattttcagactttaaataaggtgtttttgcattttatttccagcctatgagcctggatgcactttattccctgcagcactggcaacacactcattaccctcctgtggggaaggaatggtcatccaggagccagcaagtcaagcagatgagaaacagaactaaccaagccaggagtcagcccagacagccccgggatattgactctgagtggccaaattccttccatttgaaccacaaatgctgataaaatattttcaggaacacagtgagggaatgtacttcactcacttcccaaaatgtagacttgaagaggtcaaatcctatttaatccaggctgagaaaataatgcccaactttatcccggagctaaatttagacataaactgagatctggcccttggcaagttaatttagatgagctaatggttgttcctggcataagggatacactcaataaatggtaactattattgttactgcaaaaatggagtgtctgttggatgttctcatctagtcctcccacacatcctaaaatcggctgtgccaatcacttgcacatctgggaacaaagctccacatgaggctaaggatgaggcagctctttctttgggagcccctctctgggaggaggcaggcttccctgtgggagcccttctcttggggagaagaccaccacctakctmtgctggtatgtgctaggtgggcctgaccttgagcttaggaggaggactaggcaccccattttgccccttctcccctcttccagcagcagcctctgcaatggggctcagacaggtaaggggccatgcagggagccaggctgggcacatccacaaggagaagcttggcagtgtttccagcttccagaccctacaggatatactctgcagggcttaggaagaacttactgaatgaagagccccatcactcctcaaggctgccagaggaccaaggtaaatgcctgtgtttagatagcatccattgtccctaaaagtaggttagaggccaggcgtggtggctcatgcctgtaatcccagcactttgggaggccaaggtgggtggatcacctgaggttggtagttcaagaccagcctgaccaacatggagaaaccccatctctactaaaaatacaaaattagccaggtgtggtggcacatgcctgtaatcccagttactcaggaggctgaggcaggagaatcacttgaacccaggaggcagaggttgtggtgagccaagattgtgccattgcactcagcctggataacaagagcaaaactccatctcaaaaaaaaaaaaaaaagaaaaatgtagggcagaaatgcaacaaccagctaacacatgataatgtttttagtaaccttcataatcacttctttcacttttctgtgccttaaaacaaattaaaattaaaatttcatttaattatccatccttcttccaaaatgtcttcgggaattgttcccactcgtgtcccactgccaatcctcctaacacgaaggccttggtgctgcctttgccccctgacatccagccagtcactggtctcattttcttcccttgagtgtctcgagggtttgtcccttccctttctactttcactaccacctcatctgttcccacttggattagtataaaaggaccagaaccagtttcttgcctccaaatcactctttccattgcaaggtgaaacttgctaacaccccagttttcaacagtgagtgcattaaggtagcgttcctagaaaccattcagcagtaggtggtgctcttgtgtcagctcagtgttcacaggttttgttctattctcaagcagcccagtgagtacagactgtgtcacggtcaactatttatttggcactaagtatctctggtcaacacagagtaattgaagacactggtcctaacctccagaaattttcaatataattgggggaatgagatctttgagcacctagctataatgctagatggcatggaacagggacaatttgagggggatggataagggctgcaggaaatgctcagagggagaaagagcacctccaacagggcagaacagagagagtagcatctgagctggaccttcagctgggggagggttttaataggcacatatagtggagcaggcattccaaatgggaggagtgttggcatgaacaaaggcatgaaaaggtgggaatgtgcaaagcacagaagagaatgccctgagggatgggagctgaatgcccaagtccagtctcactctccattctagggccctcaygtttgtaccccctcttgccacctcatgacaaggtcacctccccagggaaatctgggacaagctggycaacccaatctctaaagaggatggaggaaaccaaaccctcttttatctctccaccagaacgcatatgttacagagtatatcttctcaccacatcagcagttgttcctatagcaggacattcttatgctagagaaagcttactaaggagagactagaggtgaacaaaycaagagtgggatttcaaaggggccatgggatgggrgactgggggaagaacccttctgggattccagctagaggcagatttcctccaagagattaatattcctttgcgtgttttttttcttttttttattatactttaagttctagggtacatgtgcacaatgtgcaggtttgatacataggtatacatgtgccatgttgttttaccacaggtttccgactctttacaagataagagtatgaggcttttgctctccttgggaatgacctcaggaagagccatgggatacaggaatggggttgaacagtagatacccttgagttgggcttttccctgagaaacagtaactactactgaccttggcaccagaacactttaactcaacattttcatactggaaaaatctctctgtgctcacatgtgagaagacatcctcctgtatttatatatgagatggtgtctctctctattcaagtgagagaacatcattctctgggtgggcaaactcttggggtttcagatcaactaacttgggctacaaaaactagtgcacctacacatacaaaatctcattctcacctgtgcaagtgggaccaaaagctkcagactcctcccattacccctcatccacttgaaaaactggtcccaggaaagctgcattaaagagtttagagcccacgtcaaacgaaaataggctgaaagaactcacagaactttatctggtgaagaaaacatgaggaaggtccccaagcactgtccccaagttatgggagagctgccctgcaggggaaggaagagagtagttccccaatgaccctgggagacagagatgggactgcagggtgtaactacaggagggtagattctggcctgctggaaggaggactttctaacaactggggctacagaacagtggaacaggctgcctcacaaagctgtggcttcctcagccctggaaatgctcagaagaatctggaaaaatgcacatctggaagggagttctgccatgggtaagggattggacctgaatcaaagactttaggattctcagatgctcctggcaagacctgaaccatttgccagaatccagttttcctcgtggtccactggttattccatggacttctgactctctgttgtgctctgactcctggtaacccacatggcatgaacacagacctcctgcactcctctctgtagagcctgtgctccagccacacccaactgcagacattcccaggatccagcctgcattttgaggctgctgtgcctttgctcacactcttccatctccctgmatcccaaaccctggctaaacatttctccatctatgctcccatagcactaatagacaccgttgtgaacttacctgtgcaatggctatttgtttgctggtgccctctgctccaacatggccaggcctgaatgtagctcatcttccaattgcccatccctggcacagtactcggcacagtgattggcttatcttcagcaagtgttctctaagatcctgccagactggttacagcttccatttccttttctccctgctagcagctgaccttgtgtctaatacccactgatgaggtcctcctcaagatcccttcttggtttctccagccaccaggttcctcacctccatgctctgctgccacaggctgcctactttccactctggcatctttgttgtggatggggctgtattccccatgcatgcccctcaagagagcctccccaggcatctatccactgctgattccactcatttacatgggccagcacaagtctatctctacaaatctaccatttgttccatgtgctgaatgtcttcaaggctccagccatactggtagatttatgtacattttctttaactcatacaataatcctaaggcaggtattaaaatctatattttacagataaagaaatcagtgttcagagggggtgaactgaacacagtcactcagctacaagtggcccagcagggattcaaacccaggtttctccagtttcaaagccagtgctctctctgtcccccacaggaggcctgaactgtgcatggggctcttccttaactctgaccaaggaaggaagcaggaatggaaaaggaaggccattcaacaagttcagagagaacaggtgcacaaaaggtaaggacaggcctgaggagatgccaggacagggaccaagaaggtcacaagtgggaaagggagtagaagaggaacagggaaaatggtagaaggtagaaaaaaggaaggaaagcaggttcctcaaagcaaaatgcctagaaagaaaccttgggaaagcttcctaccccaaacagagactttgttttataaagtctgacaaattcatcaccccaggcaggataagactttgggtcctgttttgggctctagggagtgaccagaactgtttataccttggaaggagaggacaggaaatagaagcggatactttgcccagtgatggggcattcccaaattactttataatttataaaacaaattataaagtaaaattggttttactttataaactctgattttccctgcactgccctacactatcctccayccaaggcctagggtaagagtagagacacatagtcccagcagaaggcctgtcacacagtagacactcaatgtctgttgatgaatgagtcaatgaacttttctcagttactgccctgcaccacacacacacacacacacacacacacacacacacacacacytgaagtgtcyttcattcttcaaacagggtaccaaaacctttcccctgtttcccctactggggcagagctgacatgtctcctttttgcttggaccacctccatgctttttctcccatacatactaagacactcaccccacctccaccagccctaccccacccagaaagcaacagagaccttgatatcttaactcacctgggttctagccactggagtggtgactctctaaaccatcttttccttacgatgtatcaagaattacattagtgctaactctgattttccctgcactgccctacactatcctccatccaaggcctagggtaagagtagagacacatagccccaacagaaggcctgtcacacagtagacactcaatgtctgttgacgaatgagtcaatgaacttttctcagttactgccctgcaccacacacacacacacacacacacacacacacacacacatagttcatctctgatcagaccttcttttcacagctcacctcaactgctgcagacagagtcagtgtgacagcccagattctggaaagtactgttaacacagtgtcttagttctcagttccaaagagtcactaaggggtccacagttctatggggtccattcataagcaggggctgcataggcagactttttacacacagcagttcaggtcttggcaccttcyactctcttgagagaaccgtggaagggagccaagcctcatgcctgagcattcttccccatccttcctccattctgttctccacacccacactcctcctgcaggcgtgctaatctcaggatacaaatggggctgaaaatgcaggagagggaagaaaggagagggagaaaggatttaagagggagaaaaacagctttgggagaaaacacacacatgcagcctgtagaacacggtgacttagattatttttggaatctaatgtttctaatgttcaaggggaggaaatgagaaaaagtaagtcgaaattcccaggaccagcaggctggaaataatacaggacactgtgttctgtgtcagggggcgggatacagacacacttccttgccctgagctccgtcaacaggaggtggaggggtttggtggttaaggtctcagtaggagaggggagagcaggaacaagagggcaccggagcctttctccaaaaaaagcaggaaattacaaccaccccgtaaaggccttgcccttctggccamcccgaaggtcacagctctttgaagcctccctcccaacatgaagggctcaggcaattgaaccacacagagacatgacacgcccctctggaggcctgtccagtgcttgtcccttcaccacagcactggtgaggacacatgtcaagtgacccttatcctcctagcccccagcccctttagccaccgcctaggttcctggcacatgccaccatctgtcctgcacggcaaggagcctccaaagagagggtgtagagagtgtgtgtgtgcacgtgtgcacacatgtgtgtgtgcatgcgcacatgtgtgcgtgcgtgtgttgggagaagagggaggagcaccagcttcaaagcagaggactctatcccaagcaaaccactcaagcacaccaagtctcagctttcccatctgtgaaatgatgcccctatacgtgcccacctggcctaycacacacagtacatgggagacttggatgatgaaccatggactggatgattttgggtgggtctctgctctgggtcaaagattactatgtaaaaggaagggctgggccagaaaatctctaaggtcatgggtgtgaaaatactttgaacattccgaaaagaattacatattgtaattactgcaaaggcacttcactttgacaaatgacagtggaatcatgttactgctgcctcatggggaatgggggtgttggaggtgtggggaagagaagagacagtgggccagggtccaccagggaagtagaagcagcaggatttctctacaacagccccactggttctggtcaccccaggcaggataagactttgggtcctgttttgggctctagggagtgaccagaactgtttataccttggagggagaggacaggaaatagcagtggatactttgcccagtgacggggcatcctggggatgtcctgcaatgctaatgtggccaacaggacataccaacctcaaaacgcaataagcacatcacccttagcacagtggtctgctgcctaccacgatgcccagtggtgcccagtgtagattttctcatggtgattaacataaaagcagcattattttgtttgcacagacttccaagaatattaaaatgcataaacattgccataggaagtatttctggccccaagtttgcaagggaataagacaaatatgctcttagctatactgcaaagcagaaggtgacaagtgtctcagatgtagagggtgcatggggacaggtgctcacctctcatgggacaccaggaagaatcacttttctctggggctgcttcaaggacagaccttgtttttccagagaactttccctgtggaggatgtccccrccctgactcctcaggtgtgaccccagtgtgacctatgtgctcctcttttgtgccctgcccaggggcactgcatagcctggtgacctgcaggacccccaagaatctacaccataatttccaacttctctcaaaaatcaattctgaattttgttccattaaggataattgaaaatgatttagagcaggttcatttggaasagagcatcagtgacactcttcatggtctcagcaggcacccatgactgaagagtaaatcataactgaaatagtgcagggagaaggaagggaagccaatgttcctggaatagctatgctgggccaggcaccatgccaggcactgctacatacataaccccactcaattctcataacaaccctgcgaagaagtttgtcttttttttaagcaaacaaacaaacaaaacctcaagggagtagggttttatttgctgagaggtttcttatttttcataattacccaaggcaacaatcctgaaaagagaagaacccactataaatatgtaggggagaatgaaaaagcacaaaagcaaaaagtattatacaattgttaagttgtaaaagggcttagatatttatttagtggagcaagtctcaaaggaagaggaaggaagagaaatggattggggttggggtggggctttattaaaccactctgcagattctggtacatctcctcagaagtttattctctgtcatcaccacctccaaagctaccaccaccatgaccgtggccaccccacttctcctgttgaaagatgttttcatgaagagagagtattgtgcatgagaacagtgcagtgtggaagcagaagaaaagtcaaaagatgctgaagtagaagtaatataaattctttatctttgttttgtcggtaacacaattgggggtgataagttaaagatgtgcctaatgtctcacaattgatacgtgtcaccccaggacaaatcctaaccccacccaccacagctccatttcagcatggcacccatggatgtgaatagaatttcaccgtgcaaaaatgaatatgcaggaaggcatttaaaaattaggttttccaaggtgagctttcctgtagtggtaaaggcagggctaggcagccacggaggccacagtctctgctgaacacctaaaaaaaaaatgagagattctcatttgggctagatgtcttggtcatgggggaggtaggcaccaaaatatcctctcaagcagggtgataaggatattgtcttgggtgtttcccaaccatgcatttacacattaaacaaatacaatgtgctgcataaaccaataataggcatgatttcaatactggaagccccattagccagctttgttcactcttttggggattctcccaaagtgcgaatatcttctcctttccagaatagctttgggcaaggctaaaaaatgggcctcctgggtagacatcagtagagcttcctttattcagaaatgaagtagataaagatttctcaatcagttaagtctagttatgcaccggaactcttcgaagctctgctccttccctgaaaagactggaagactgagggccttccccacatcagaaggcagatgggagtttcgatattttctgatacttatcattggcatcagcacattgacatcacgaggtcataatgactgtcatcagatggcaaggctgggatttctacggtgtgtgggaggtagacgtgtggacttcacggctgcttctagttctagcattagaagatgtgccctaggcacccaggaaggggtgtgtcgggggaggatcttccactgagtagcactcacccttccattttccaaaggcacatctacaatgagtctacttaatgacctttaagaccacatatggcccccagtggggaagaggcccatcccttctcttcagtaataggttgtgtttgcagggcagacaccttcatcacacagggtctaccacaactggaggggtggccagatgtgaaacatggctgcacagagagccttaatctgcaccaggccaatgagtggtgacctggcttgtgttctgcgaatacagtggaggacaggcccattagttatagaccagagggcgcccggctgagactgcagtggttcatctaacatcatgcattgtttgaatcatctctgaattactctgtgtttccacagattgctcattaagactttcctgtcattcctgagcagcagtgttccctcttctctgaacattctccaagcacagaggctgtgcctaggacagtacagcatgcacagaaagcatttaataagtaagagtttatgcaaagggaaacaaaaaaacttttggaggtatggctatgtctattaccttgatggttttataggtgtatacgtatgtccaaacttatcagatcatatatgttaaatatgtgccacttattgtttatcaattatacctcaataaacctgcttttaaaaataaaaaaaagtgaatacacaggagcttatgtgctcacttgcttaattagatgktgagctgctccagacagaacttctggcctacccacccttttggtggctcacgacagctgttcaacattgattattaaatgaatgagtgacttgctttatgaattatctgtggaacagaggccctactccctagatacttaattgggagagagcacggcccactccccagcacctccaagatggggaatgtgggggctcaccacaggtgtcaggggaataagtgagaggcagcttcactccccaaggccagctggtaaatggggaacaccaacccattttcaagcccttgggaacaagctgtcaccctgcaaggccaggggcgagactgcgcccacctcttttacaaaaatagaggctgaactatcaccagactcctctgattgccaagagcttcccagatctggaattagaggcctccgccaaccagcctcccaccagaagggagactaagacttggctcaggcagtaactacttcctcaagcccttgtttagatgtggatccacactcacagcccttattccaaaccatcaccctcttcacccccttccaaagccaccaaataagtcaaaggctgaggcacttagctccgcgcagatattttaaattaatcttaaagcaacttaaaaggactgtttttctaccctgtccagcactcagcacattttcagtggcagctgggtcaagcttgagtggcattttcaccactgactcaacctcaaaatattcctgggctgccctcgtcccacccttctttttgctcccttgttttgaatattctctccctctctccccacccctctactcacatgcacatgcatgaacatacacacgtgcacattcgcccactcccccacactcctttttaaggtrtgagcacatcacacaacagacattctaaaccttgggttcatggatagaattcagggatcatatatttggatagggaaaaaaatcacgtctttattttcactaacctctaactgaaatatagcattctcttccattatgaacacagtcaacaaactgcattagtgtgtgtctctgactccaatagaaacacacacattttcatatcacatcagggctgttgtcctgaaacatcatttatttacattcatcactacttcaggattatggtagttattagacttcaagtagatcttattagtatgttaattaaaaatacatatagtgctgctatttttaaaacgtaataactatttccttattttatttttaacgtttaatttagattcaagggatacatatgcaggtttattacttgggtataatcctattacccaggtatgggtatagtacccaatagttagtttttcaacccttagccccctctctctttactgcctccagtagtccccagttgctatgttgccatccttaagtccatgagtatccaatgattacctcccacttataagtcggaacctgtggtatttggttttctgttcctgcaaataaccrtgtttaagtaattgttttccaagcctatgtatattttttgtacatttacaaatgttattctgagaaggggtccatatgcttcaccagaccaaaagagtccatggcacagaaagagcccctgctgtggaatgagcattaaaatgtaggatttgggatttttctctagggccatcaaggcatgcgccaggagacctaggggctaacaggtggtgttcagtggtagcagaaggcaagctctgggagcagagggacagcagggttattggataagagcttggatgggctttgsasacagattaaaacactggccctggctaaccaacagtatgaccttgggccagccacttcacctctctgagtttccatttcttcaactgtaaagtagtaattatcaatgtactatacaattcttatgaacatggattgagagcatataggtgtaacagcaattactgccctgttgaatggaacttggcaggccctagaaaggcagcctccttgacctgggaacttctggagctatggtatgcygtttacttggtttttcagacaggcactatctgtgccctatgcaggcttcccatgtccttgagcctgagggataccatgaagtgccccaaactctaaaacatacctaggcagacctaagtctcccacctccctttctgtcccttgctcactgaaacaggcacccaggccaggctgcaaagcagattccctgccccagagcaaaacaggcctcaagaaaaaagagatgttccagatctttccaaaactggcaacagggccgggcacggtggctcacgcctgtaatctcagcactttgggaggccaaggtgagtggatcacgaggtcaggagatcgagaccatcctggctaacacggtgaaaccccgtctctactaaaaaaatacaaaaaattagccaggcatggtggcaggcacctgtaatcccagctactcaggaggctgaggcaggagaatggcgtgaacccgggaggtggagcttgcagtgagctgagatggtgccactgcacttcagcatgggcgacagagcgagactccgtctcaaaaaaaaaaaaaaaaaaacaaaaacaaaacaaaaaaataaacaaagaaaacaaaactggcaacagagccaaagtacctgattctggcttcacagaacagctggctcctgccttggcatctaatcactcggtgagcaatgcaggaattctgaggtctaagctgcccttctyagggcaggtcaggccagggtcagacccaggcttccaggccactgggcaaagagccccaagmaaggtcagaagttcccaaacyttgcttaaatcatattcaaaaggtatataaaaagtgatatgctataaaaagtgatatgcattaaaaaaactgcatatactaatttttttactatatgttataaaaaattagaaaacattataaaattatacagagaaattaaaatcaaccataagcctgccccaaggaagcaaaactattaatattctgataaattttcttgcagttatatttaatacataaattgggatcacacttatacagagagctgaagatctcgatttcatcatttaaaaatacctagagacatttttcaatatgagctcttaaaagacagaaaaccatgatatcagacattgtaaaattcacaggttactgagagatgtcatggcatccctaagaacagtattggccatttaaatataagttatatccagaaaactcataggaagagagcctattttattcttcttaaagcacatataatagtaaactcttctttcttctctttagcttaaagagaatctaggaaagatacctttgtatcctcagcaaagaggcactatatgcaattttccttttttacattctcttatcttacttttccctgataaggggaaagctttgaaaattcactgctggaaaaaatggtgtcttactcaagaaagtgcttagcagctgaagagaaacctttggaaacaagtgggtatggcaggaagagccctggacttagaaacagaaaaatgctggattcagatgtcagctctgtcactgtagacccaagatcaaagaacatccgtttccctgcatgtcaagagagatgccaccactcaacccataaggatcaaaggattatgcagattaaataagactgtgtgaaagtggtttgtcaatggtaaaatacattgcagggccataatcactaattaatattatagtggctgttaacagtactgtttttgttccttagctggcttgagccactcattgcaggcactcggggcagcttctaacagtaggtaaaagcagggaccctggagccagactgcacttcccagcttggtgaattctttaacctttcagtttcttcatctgtaaaatgtgattataatagtacatctacctctcaggactcttgaaaggattaaaatgagtaaatttacacacagtgcttagaacaatactgggcacataatacacactatataagggtgagcttaaaaaaattacattagctaaaactagtaggcacactgttttaaagctttccaggaaagtactatcattaatcagaaagttggatgagcaacctctgctccctcacccccatcccggctcaggtttggcctgttcccttcctaccttctcagcatcctgctcgaagagccgcagctgaaagcactggtccagcttgagcttgcgcacrtgccacatctggtgcaggtgctgccgggtggagtgcagcttgtccaggagactggtgatcttgggcaccaggctctggaagtcagcactgcccgggatgcagttgcgtcctgagaagccgtcgctgcagcggatgcactgcagcagccgctgcccctcccggtccagctcctccacaggggccttcagcacctttttcttgagctgtgtgtgttcgtcaatgagccgccgagagccctccacatccacaggaaactccttccgggctagcatctcctggaggtcctcgaggcgcgagagcaggtgcacggcgctgttgaagaactcctccagggagagccgcagttcgatccactcctcatggttgtagtccagggagccatcaaactcctccgtcagctgggaggggtccaccagctttgtgaggccctccacagataccatgctygtctggaaggggcagacacagacaaggatactcagtgatgtcaggggaagaacagggcagaaataggatgagggaaaggacaagataaatccacataataatgaccacagcctgcctcggaaatggtgagtggaggccatgggactcactggtcaggagtcacagatcagtcaggatcagcagtttctacagactgctgactgctttagcaagcctctacaactgccagccatttaccaccccagaagaactgcttttgtgtccctcctctcctcattttccctcctcctgaccccagttcacttcaaaagggcttcagaggctagaagcagaagctggaagaaaaactgacctagtttctgggggacagttttcyacagctttaaaaccaaggcccgtggacccagggtatcatcatagttggattaagcaacatgggccagtgcttgggctgcaaagatttcacagtcttatcttttccaaggctctcccttttagctcttctgtggtatggtgaacagaactagggatgggcaacaggggagtctgcgcccttggttttctctgtgaggcccctacaagctcctggagagcggactggagaatgtttgtctccaggaaggaaagtgtctccagcaaatgatgatgcaggcaaccaccttagtttattagtaaacatcttttccttcctatagggctttaggcttctcttctttctcatgaagaatgagaggctagcaaattaatatctgtgtttgggtcccagccctatgcttattaactgtgtgacccagggcaagctattaaggtctcagagcctcagtctcctcctctgtgtaatggagataattattccttcctcatggggcttgcagagattaaatgtatcaatgtgtgtaaagcacatagggtgcatagcatggagtacatgctcaatccctgttagtgctcactctgatgatctgaaggctgcatcattactcaaaacctgaaaagcaatttatctctctgtgtcttgccactctctgagcatcccctctttgttccttctctttccacccctctcctaagagraaggaaggaggtgccataggcaggaggactggtctggaacaatggttgtcaaacttgactgctcattagaatcctttggggagtgtgcaaaaataccaatgctcaaacctcatccctagaaattctgatttaattggctaaatgggagcttggacatcagtaggtttaagartccctcagatgattctaatgtgcaagtagagttgcaaactcctgctaatctccatccttgctactcaaagcatagctctcagaccagcagtattggcatcacatgggagcttgttagaaatgcagaatcttaggccttaccccagacctattgaggcagaatctgcattttcaaaatccccaggagatttgtgtgcattaaacttgagaaaccctattccaaagtactttstccttcaaatttggctcaaagtttaccacttccgggaagtcctccatcattatacttaccaattattatatatctgttgtataagtatctgttgttgaacaagcttatactctcatctctgtatcacttgtcaccccagtctgcactaagtattaaattcactgtttttaagatactgccttataaatattcctttgattgggaggcccccagctatctctcctatcctcttatttaggaggcagagacaagcttgttcaacttagagtgaaagaggtacagagagatgggacatgcaggccagcaatgctgaagcagaagtatcaagacttactgaaaasatgcttttcagtctcttcagcttatacatctataggcttgttgtcaccacctctgtataaacaagccaaaatatagaaagcatttccctrcaggacttctagtgttctggaggggtgccaggagactataataggtcactgtttttataccaagccaaatttcttgtattgtttacacagagtgagaatcgcctgcatcaagtgtcaggtcattgtgctcaaatcacagcctatttgacaccacacacaggcgctcctggcccccagggcacaaaagtctggaatgggaagctgctgaaagattaaaagcagctctgtgttttcaacacacacacatttaaaagttcatccccttgcagatgaggactagaattctgaggaagggaacagtttatatttggctggaatacagacgcttaaatcattgatttaatctgatgtattgtcattgaaaattctcaggggaaacatataccctccagaaaatttagtttaaaaacatgttttccttgattatgaaagtaatacatcatccttgaaaaaaataaaaacatatgaagtaaataaaaaccatccactatccagtcacrtagaataaaccatcactaacatcttcaatctcagttttcttctccatacatgcactttaaaaacaaatctcagattatagtgtccatattgttttatcacctgcattttactaaacaataaatattttaatactattttttctaaatatggcttttcctggcttcatcgtatttgggttgcttgttttgtttttttgtttgtttgtttattttgttttgttttttgaggagtttcgctctgtcacccaggctggaatgcaatagtacgatctcagctcactgcaacctccgcctcccgggttcaagtgattctcctgcctcagcctcttgagtagcttggattacaggcacacgccaccacgcccggctaattttgtatttttagtagagacagggtttcaccatgttggccaggctggtcttgaactcctgacctcaagtgatccaccctcctcagcctcccaaagtgttgggattacagtacaggcgtgaatcaccacgcccagccagtatttgtggattaatgtcaccaacagtcatggctagcaaggatacaacctatatatgtgtatgtatatgcactatatatgtataaatatttatgcacatgtgtatatatactattgtataggaacatgtgagctgtgatgaacattcttgtagacatttcttgtttgcaattttacctggctttttaccttcttgtttgttgagatttcatattaagaatattttcttaaattaggctgggcacagtggctcatgcctgtaatcccagcattttgggaggctgaggtgggcagatgacctgaggtaaggagtttgagaccagccaggccaacatgatgaaaccctatctctactaaaaacacaaaaattagctaggcatggtggcaggtgcctgtagtcccagctgctcaggaggctgaggcaggagaatcacttgaacccaggaggcagaggttgcagtgagccgagatcatcactgcactccagcctgggtaacagagtgagactctatctcaaaaaaaaaaaaaaaaaaaaagaatattttcttaaattagttactagatacagaaatacagtcaaatagaaggaataagttctagtattcaatagcacagtagaggaattatagttaacaatcatttatggtatatttcaaaagctagaagagaactgtaatgtttctagcacaaagaaatgataaatgtttgaggtgatggatatcccatttactctgatttgatcgttatatactgtatacaggcatcaaaatgtcacatgtaccyaaaaatatgtacaactatgatacagcaataaaaaaagaattgctacatcaatggatataaactcttcctaaggtttttgttacaaattgcaaagctgcctccacaaacagttgtcccagttaacacaaccaccaacagtaaataagactgtctaatgaaggtgtgcatttgggacaatctcgtgagcctcttgttcctccccatactctaactggtaaggccatggcggccaaggaatcctgaaatctcagcccttgaggtgtcacatactgtatggtagatagagaagaggacrtgagaaatgtgtggatggcagaaggggaagggaaagaagatgctaagagagagaaatctggctcacctcaaagatgaatttggagctgccaaagttggtcttctgtttctgccagaagttgtcgggtttaatgatgagggccacatggatctcagctggaaaggcttcctgcagcgttttgaggaggggcttgatgaggtcccacttggagccccgcatgtcgatgatgacagtgaagccacgtttgcacacgtcctcactgtggggaggtcagaggtcggtatggtcactctgggtagctgagactttggagtacacagtcaaaaagcaccyggaaacctgcactccccttgaccagaatcactctttcaacttcatgccaggtctcttggccaccttcaaactcagctcaaactgtactgycttagaaaaccctttctacatctgaccaatggtcctggcattctgccttctcccagcacttggcaaataacttggcctttcttacgcaggttgagtatccctaatctgaaaatccaaaatctgaagtgctccaaaacttgaaactttaagagggtcaacatgatgctcaaaggaaatgattgttgcagcatttcggagtttggattttyggattagagatactcacccggcaagtagaatgcaaacattcccctccaccgcaaaaaaaaaaaaaaaatccaaagtccaaaacatttctggttccaagcattttggataggagctacccaacctgtagtcaactgtacttgttgggatgtttacaatttggatattcacaattgtatttgatttttattttaatgtttgtctccctttcttgttcctaaaatgaatcatgttttccccattgaaattccagttctctaaagacagagaccctgttgcctcttaaacctgagatggaaagtccttgacaggggtgttgttctgccctgtgctcacatcagtgacaggcactggtacatcttrccactaagcccaaactgggccaaagaatactttttcaaaaaaaggctctatgttgattctgccagttgatgagagatggtacacaaagtatgaataacatgtatttatcaccattgtatttaagatgtattacttgtagtttattattatttctttttactttttttttttttaaagagtcagggtctcgctatgtgcactggctggagtgcagtggctattctcaggcacaatcacagtgcactacagtctcaaaactcctggcttcaaatgatccccctgcctcagccttccaggtagctgtgactacaggcttgcgccaccatgcccagctttgtggtttaaaatgtaagtcagcttaaaaaatcagatcgctgagtcatgctgatcactcagagagagccaagagtggaactgactggaatggaagatgcagaccagttgtttcatgtatttccattgtaagagtcacagtgtgaaatgcacgtatcaggatgttgagggacgatgggggaggagtgactcttgaaatcaaggcaagatgaagtgacagtgaccatcttgaaaaccaagacataagcaggctaaataaatcaagatgttgctatataacttagtagcaaagtttatttaaacatttgaactttgactataactcctgagaataggaagaaaaaaaacgaaggtcagaatagttataacatctcagtttggaagaaagtctatgtttgggtagttaggggtctttccttctcttatgtttttaaagccaatccgtttattttataattcaaaatagacattggttacttcacattttaaaatataaataccagcatagtatttccttagggtctttcacttaatttcccatttcccagactgcacttgtttaaaccactatgtatgttacctgacccacatatgtgcctaccacatatcagttgcttacagctgctggcagtaaggccacagaaggattcaggtcacaaaaagaaataaaaacctttttggggggctttattcttaaatttcaaccagtgatgagattgttacagcctcattaagagaccacagctcttgactatgtgagtgtctcaagcacaaggcagcttacttaggcctccctggtacatakaaaagtccccaggagaggcgactctctccagcatgagagaaaggatgagtattctccccaatcctgcatcccaaaggaaaggagttgcctcttcttccctgacacttattgaaacaatgagtggcygaagctttccataaataattttgtctatcttcttgtcttaaagcaatgtgactttttctccaaattacaggatttctttcccattataagagaaacacctgataattacacaaaagttgaagtagtcaaagatccatgcaagagatgctaatggtaggactttataacacccaggcctatttcctttccaccttttctgtgcgtagagttttcatatcatatactgttctacttttcactgtaacgtagttttttctcatgtctaaaatttcttccaatctgttgcatttagtgatagtccatcttatgcctataccataacttatttgatcattctcatgattgttttacagaaaggtatgtcaacttacatgtccaccagcagtgtatgacagtaccacccccttcctgtatcctcaccagcactggtcatagaatttttaaaatctttgcccgttttattaaaaaatatattatattatatttaaatttgcatttctttgattactagttattgctttttggcctgtaaatatttcttctgtgaattacctgatcagctcttttgtccatctttctatcagggattagtggctttctattgggatttaggagttttctcactgagcatcatttagtttagcttaacttatatttgttgcatgcccaactatgtcaggttcggcaacgttaactgtgggtcttgcctttccttagagatgattgtcttccttatttycctgctcctcagactccatctctgttgctgtaattatgctgacctgagaattctttgtccctaacaacaaatattctgtgttgctaccaagagctggaggtcaacaatcccagcatccaaagctggtggtcagtagcaggttatgccctgttaactaatcatttctgacaactaagagtagaaattaggtcctaatattccgtaggaggttctcaataactcaggagatggagaaagaggcccaggagctgagtgctgtgacctaatctaattggcatctttctgtgaaaacaggctaatcttccaaggtgctttgtgtgtttggtttcaagtaaggggcatagctgggaaaggggaaacgactatttcattgtgtgctcattctrtgctggggctatagttcagtatttgccatacatcatttcattatatcctaacaataacttcataaactaggtatggttatctccatgtgacagaagatgaaatggaggcataaaatttgcctaagatcacataactagtaagtggctaagcgaaaattcaaaaccaggactgttgacttgaaaacccaagctcaggctggctcacgcatataatcccagcactttgggaggctgaggcgggcagatcacttgaggtcagaagttcgagaccagcctggccggcgtggtgaaactccatctctactcaaaaatacaaaaaaaaaaaaaagaaaacccaagctcaggttactatatcatactataacccaccacactgacactatgtgtgggtgtttttgtttggggacaggagttgggggtcagagatgaggggattaagttaggggactcagaggagaygggataaattagggcaaggagtctaagtgaatgatctcccttctggagtctgtgaaaaaccacaaagtcagagaagcaaaagagcatggcatattgagaaagttcaagtgaytaactctggttcaggcctttgaatgcaagagagtgcagctctgagtgccttggagagtcccattctgggctctgtccctctttttgcacaccccaccccctccaccccaggagccaagatgactcacccacatacagtstgtgctgcacatccctcttccccttctaggccaagctcctagtatctgaaaccctaatactctccgcccaaaggacccttagcctacttcctgggcccatgggtatctctttccagggtccaattcccaagggcaagtaacaccaccattatgtgtacccctaagcctgaggggtggcaaagggctgctatttgcaaggatgtggctagaatataaatgtgtgagctggggtgttcacttgaatgcatgaggtccccctgccatgtagggctgagctagggagtggagagagaaggcaggcasagcatgagtggaggctggtctactgtgctgccacatttgggcctgggagctcaaaggagtccaacaaatctaaatttaaatttggcctcctaggttgctgtgaagatatatttgtcaaggtagaaggacagaacatgttttatttaacagtttgttagcttgctacattaatttcacatattcasacaaagggtrtgtgagcttccatttgtactcttgccctaggcaccacaatgttagaatcaggccttgcaagagacgagactggagtggatgcaggcttcaaatcagaatgcacctcatatggcaaggcaggagcagtggatttgtcctaaaggcactgwagggtaagattcagagaaggaacatgatcaggtgattcagacagattaccctccaactgtgcagaaggagggtaaactggggtcagcccaaaggagtgtgtaagagtagaagaagkgtctttgctaaaatgactcttcaaggaagtcttccatggacaaccctatttaaacctgtaactgtcacccggcactctttataccccttctctttatttttctccttagcacttattaccatctggataatatgttttacttatttactgtccatcttccctcactggaaagtaacctcagtaagggcaggaagtttttattcatttcactgttgaatgttcagtgcctactacagtgcctggtgcaaacaaggaaggggaggcagcagctaagsgtatgaaaactagaaccagcttcctaggcctgaatactggccccatcatttacttactgtggaaccyctctgtgcctcagttcccacaatgtaaaatgtgaataataattacagggttgtcttaaagcctaatagacataaatcacttaggatggtgccatacacagactgttctgtgtaagtctaagctgccataggagatgtcactggtgtccacccagggtccctttactaaccactatgcstkttctccagttccaagagttttggagctatcagctgatgcctgtaaccatctctgaatacttgctttagctgatgcctacgcttctccaagagaaacctgggcagttatactcccacaccagggctagcaagtgcctgtctggtacaggtrtgtcagagcctagctcctttacctcattgcagagtaactctgaagtgtgatgcattttcaccgcctccccagtctccccagaaggctccagctagacttcacctgaagtcttcacctatccttagttggtttttcccctttcctaactctgcttctttcagtctcttacaagtttttcctgaatagcagacccttaataaatcatttgtatccaaatccctgtcatattaaacacagtctaagacagttatttttattacagtgttatgaataataatgtaaatataaattgtatacagttggccctccatatctgtgggttccacatccatgtactcaaccatccttgatggaaaatacgtacagccacctctctgaatcagcaggtctcaaactttggttggttgaatctgccaatgtgaaaccagcagatttagagggccaattgtatatttcatacatatatgaaattctgaaggcaatttgatatatggtctggaagttaaaagagaaatctggtgtggaaatttttattcaggagtcacacagtgcctggcacatagtaggtgttcaagaacatttgctgaatgaatagatccccgaatgggtggtagctgatgtgcacacaagtgggtgagatcccccagcaaaatccaggaagaggaaaagaaccatcttctgagtcaagaatagaattgacaggaatatcagtgtttaagaggtgggagaaggaagtagatgaccctgaggaaaaaatgaagaggttagagagaaccaggagaggaatgacgtcaaagaaataagggaggagaggattgcaaggaggaaccacagtgtcaaatgctgcagagagactggtcattcactaagagcagaactattgtacttagcaaccaagaggccacggtctcttgagtcagggaaatttcagtggggtgctggggccagaataaatgctggagcaaggaagcagtcttcctggttaatctctgtaatgattagcaggaagtgccacagacatcagaggctgcttgtggtgcacttccaccccctggctctgtctccccaaccccagcagtggccagagtctgcatggtgctctctggccaaccaactcccgcagctgctccccagcctgccctcttccccaaggctgttctctcattcactgtgctcaaatgacagcagtttgagcagacccgtttacagtggaacataactaacaggtagcctgctttttttcctttaggtgatttaccttttaaaagatatttattagcccgaatcaaactttcaagggcagaagtttgcattgtgtatggtgaggacgggggcataggagggtgaagtttggagcagcagacttttatatccttattttttatttaaaaatatttttcaaagcagacttttaaatcccctcaggaggggaaagaacagtgggtgacccccttcctgttcccacacctgctacttgagagggagaaggcagccactgccctgtctcccctgtgctcaccctgccctatagtttcccatctgggccatgggtcccctgaggcccccttggccaggttctcaccctttgtgataaattacaatcccttcaaactgagctgtgttctgtttcatagactctccagggctcttgggcccagaagtcataaatgtataccaaatgactggatgattgatcagctgtttcttgtaccatttcctcttttgttcattaaatgccactggggcygttttcacttagtaagcctgtgctatctcagaaaagcactttcaccactttatgccaatgcttctcaaactttagtgactttctttatcacctagaacacttgtttaaaaatgctgatttgggggaagccttccagatattctgatgaatgttggtctgggataaagctcaggattctccccatagtgatccaaggacaacagttaagcactcttaggtgtggtttttgagagtttaatgataaaaactcactttgtctaaatcagatattacaatatgcatttaataaatagtaggtaacacacaaatagatagagtaacaatgaaataagtcagaacaacatctgcaaggtgaacaacaactacaccatacagaagcctgttgaaaatgttagtttctctctccatggcctcargstctctccagtggagtcatttattgcaagaataggcttggaaggatttctgccattggagtaaatgtctggttctttttgcaaagactgagctcctcctcttggcctaatgaggatttccctaaagagcttggcagtttccctccccagtattgctgcatgtgctcagacacctactgaagatttgctttccctggctcccctctctaagttgccatgaaatcactgcgaggtttctgcttcttgtcgtacacctgacctggcagccacatctcaaacttctgggcaaggcctgggtgtctctctaggtgcatgttaggtcctgcccacacctgatgcccacagagtyatctcctgacccactgggctggctccaggtctgatagatccaggtgtagagggcttctgtgggtgggtgggtgtgtgaggaatgaatgaataggcgtgtcacaactgatcgttttcactmatggtagcctagcagagatcacaatttagcagcccactattgaagacaatcccccaaagtggttttattaggcacagttgttgttgtctgtaaagtttttatgtctttggagaaggcttaaaaaccactcttcaagccactccycgctcatttacaaacttacacaaccagtttgttggcctttggatttgccttctctgtcttagttgctactattatcccagctctgtttcacactttaggagactcaattacctccacttcaggggcagggggcaattagggtaccagtgcctcaagccacaggtctctctggacccagacagcagggctgagcacctgtcaatgacaaccccaggccaagctttgtcctacattacagtttggccttagggagacaaatgccactttctcccatcttgacttccaatctcttcttcctgaacttctttccaggttcctgtctgagcaaatyccagagtgtctctctggattctcccctggccacatgagtgaaccaccttgcataccgcccattatcatctgaccacagggttraattcaaatgytaccttctattctttcctgatctttcttctacattattgcctgatcatcctctgtcagagcaatctcctcctcgctaaaacagacaacacattatccatgcctctcttaatgcatttattagtttcaattttatattcagtttgccctctcatgcctctatgcctttgtgcttgcccacgccaaccccatctttgcctgggtaatttttactcacatttttacattcacaagcctcacaagcctcttcttccaagaagtcttctcttacagatacattccctccccaccctgctccatcygcactgggataaggggctcttcctatgcattgccatgaccctgtgctttcccacgtggcaactgtcatggctattgtggggtatctacagccaggctctggttgaccaatttctagagccttacagagattcatacggcttcaaaaggagaacctcattatgaaggtgcttcacaaataatacagtgtcacataaatgcaccatattatctattagttcattaatttattcatgcaacatacatttattgagcatttactttgtggctggcccagtaccaggcaccaggtatatataaatgtggacaagacagaaacatgaaagtttcattctagaaggagaggtggacacaagacaatgctagataaagagaataaatgcaagttatgataagtcttaagaacttcttaggacagcccacatgaggagcaaagactgaaactataagaaataatttgttargggaacactaaaaaaatactagaggccgggcacggtggctcatgcctgtaatcccagcacttggtgaggctgaggcgggcagatcacttgaggtcaggagttcaagaccagcctggccaacatggtgaaacctgtctctactaaaaatacaaaattagctgggtgtggtggcaggagactgtaatcccagctactcaagaggctgaggcaggagaattgcttgaacccgggaggcggaggttgcagtgagctgagatcgcaccattgcactccagcctgggtaacaagagcaaaactctgtctcaaaaaaaaatatatatatatatacttcagacagagggaacagcctgtgcaaaggccctgaggagtcaaacagcctggatgctggctgctcctccactgcagccaggggaggaagcagaaatcatgaactttggtaaggaagcaggagaccagcagctacatcttggctagccctctaaatcgtgaggacctcaaatcttccagctgaatagacatatacaatgaragccaaactactgaaatttggggcaactttttttggtaaaaatgagacatattcacatattagtggtaaaagctaacttaccgaacacatgaggctctgtattaacatttatatacattatcttatgaattcctcagatgaaactcataagtagctgctatttattatcctgccctaccgttaagaaaactgaggctcagagaagttgcttacagtcacaaggaaagggtaaaatcaggatttgaatcttgttttgtttgactccagtatttgtgcataaaactacaattttttttttttttttgcttcatagatgcataraacacttgatcttgaaraaacattcatgcttcttcttgctagctcctcctgttagaactgagggtaraaagtttcagaggtgggaagtgacttgctctaggtcacacagtctgctggatatcttagccatttgggccaggcatctagttgtcaactgccttactccaggtcttttataaaaccatgagaactctggaagtgacaggaaraaaaatcctcccttgaagaagcaaacatcaaataatctggcttggaggcccagggtatcctgtgtgagtactaaaacccctaactcaggaataaggaccatcctcctcatggtttccactgtgctctggcagcagagaaatggcctgaccctgtttgcccccactcatgtgatgccacctgagatctaccccatttctatgaatgtctggcagattcccacttaaaacagctgctggaataaagatcacattgatccattctgatggcaggtggggaagcagagacccataacaagcaccactccagcagaccagtcagggggatgaagatttctgcttacctccttagtgtgtgctgctgggggctggttccwttggcctgggtgtgtgtttcagggtatcagcagtgtgaagatgtcagaatcctagtgtgaggaccaggaatccctagtgcttgggctgtgatggagcacaattaaccttcaaataagacctattcactaggatgtccagggaaggtgacaaactgaacacgggtagagagctagcctggtcactgaggagtggctgacagagaagaaggacaaggcaagctaagagttcctcatttaatgagggtggcactggccctgccatagcacagctttggtcctacagggctgacagtgcaggatgacttggaggaatgatcgggaggagtcttatccatgatgcctgggcagcctytagtacctgcagaccgttcaccataggcagacagaaaccagaaaagggaggaagaaaaagtagccccaagtaagtatccacttcacactttctcccagaactgtgctgcacccatgtctaccctaaatcattacataaactgagttcttccaaatttgaggagaaagaaaggttcctggagttctgtagagaaaacaattctcctgacccatttgtgccagaattctcaagccattcagacatgtggagagtctctggctgtgggatctagactttgttcaaacttttgcccattacttgatctatgttaagctgctttctgctcctcagggctattctaactgcctctgtacttctgctgattgccccaagccacacccactttctgaaacaccagagatcagcaggtgttaaagaaaagtgttaaagacacattatcacctgctttaagttctctaattggtataatcagaagtagtaaagagaatattggatgagacagtgtcttacagagaatgagccgctctctaggaatgggttttgaatgaatgtttgctcccacagacagttctcaaactggtcctttaaaatggggaggcctcctggatggctgggtatccagaaggcaggagagaggtggtggggctccctgtgctgctcatgcgctctctccgctgggtcatgggtgactgttctccaccagctgtctttctgtcaagctgtaatccagctgccaaaagacctcctcagaatctacgttaattcatccagaggtttttgttgttgtttgtactggaagtcaccctctggcctcttacccaggttattattccaaagagttagtgtcttttctacccatttaacaacacatcttttgcctctgcacatctgatttgtgatgccagggctagtgggggcagtggggtggtgcaaaggtagtatcttatcctaaatctaagtttcaagtcctcctctataaagtggtttgactcagtatctgtgcataaaactgccatgctatcttgcctcatagatgcgtagaacacttgatcttgaggaaacattcatgcttcttcttgctagctcctcctgttagaactgagggtagcaagtttcagaggcgggaagtgacttgctttaggtcacacagtcggctggatatcttagccgtttggaccaggcatctaactgtcaactgccttattccaggtctataaagtgaggagattctgactaattggtctggggttggactcgatcatttttaaaagttccccctggtgattctaatgtgcagccatggttaagtaccactgaaggcaaagttgtagagatttgtttgcctatttctaggtctaggaactactccttgtcagttcctcaccctcaagtgtgccagaagcaaacccaactcttgcccatcagagtcccagggaaaccctaactgcagaccaaatgaggaaggttgatagtttccacctttttaaagtctgctacctaattctacacaaataatactattaaaaaacaaaacaaaacaaaaacaaaaagacctctcattgcaaacacctggaacagggatgtggtggtttctctttttctcttccaggcagagtgtggtaaagtattcaayagcacagactcaggtcccagggtcacacccaacattcccaggtatagccataaagtgacaggtccagaggcctaaaatcactcagcgggatctctgcatccaaatcccaacttgtcttcaatgctgcctttaaacaaaatattctacaaatcaagtcctctcaaaaagaacaaagacagtggctcacgcctgtaatcccagcactttggaaggctgcracaggcgamttgcttgagctcaggggttcragaccagcctgggcaagatgttggaaccacgtctctacaaaaaaataccaaaagtagctgggcaaggtggcgcatgcctgtagtcccagctactagggaggctgaggtgggaggatagcttgagcccagaaggtggaggtggcagtaagccaaattgcactactgcactccagtctgggcaacagagccagaccctgtctcaaaaaaaaagaaaaaaagaaaraaaaaaaaaaagcaaagacttgccatgccacgccgcaaacagtcaaaagagcatcccacagctgaagggagctcccaaagagagctccgggaatggcgggggtgacagcaggatcaggcaaatgcacgcagtcttccaaaggatgtacaccttggagggaccagcatgaggcagctgcataaaccctgatgggtttgtcaatcagtaaggtcattttacagccttacaggctctgaaacacaactcctgttcaccaaaggaagagacccactttctgaatcagagtggcttgggagcacagcatttgtttggaaggagctactcttagccaagagaagacatgaaaactgtgaaagcacaagaaccattgctcctagagtctggtctagctggctagggagagaaggtggcaaaggggtgggttcagatgggagtgggatggaaactgacatccatttcaggacagcagcttcctgccctatttcccaccctccctcacagagctgttcatcccttccttctgggccattcagaacatgcagcagaaatgaaatggaaaccaaagcactacagggaaagaaagaactggaaaccaaaacccacatagccctcccattttccgcagccctcctcagacaamccccaaggtactctcttctggccttctctaccctctccttctttcccgctccccacwccccttagtcaggctatatgaaaaacaattcatcttttaactttaaaaaatatcattatgatcatagcacatatatctgtgacaaagactgkgacctgtctaagcacagtgcctcagccaccccactgtaagacacaaggagcctttctaaaacgtggagtaagagaagagagctgaggggactcaagagaaatggcaacagtgcagccatgggctgcctcccactcaggtgctgcacccgacctgtccaggagacagagcagcaactctcccaggcttggcctactaccatgccatcaccactcctcattctcttgtcacacccccacctctccctgccctctcacaggaacccccacacactctccagctgggctctggtttcctggcaggccaggtggaatcctcattaataaaccacatgtttcctccaggaaacagtccttgctgtggcttgcacacacctcctctccttccctcctcctctttctccttaagtagcagtcacattcttgaaagcccagtgctctttgcctgcagcacgcagacacatgcacaaccatccccaccaacacacaatgcaacacgccacacaaagccaccccccccaggccatgcccactgggttttaccaaccagtgcaggagctctatttcctgcagggcaggcggctgttaccctctagctagcctgccttccctctgacacacagccagggttgccctggcagaggggactgatgagatccccatggtttacatggaggaaaaaccttgtgatggctcagacactagtgggaacctgggaattacaagggaggtcaaagagctggagtcggggagccctgtgggaggtgaaggcwtgcatgtttggatcttgaaatggaacagggaggaccaagggctccaggtctttgctccaaatcagaataaactaggctgcccccatgcataactagctcagaagctcaggaagctcacatatagggtggaagaatccytccacatatgacttcatagaggcccttatcctgtgcatgctgctctaggcaccctgctgtcccacaggcagggtctatgttagggggcagtgtatgtrtgattgcagcaagctcaggactggtaccctagccagctggaggaccctgagcccatgactggacccctttagacagcattctactctttttaaaagaaagagttggcctggcagacctctacagcttcttcctgcctttaagctccagaattccaattcatctatttcctttacaatccaggtcagatttttaccaccagtaaattatgtctgattacgtccatttaactgacatgcttgtgtggctgctgccttggaagctttcagtttttgtcttctcctgtggattctgaaaccttarccagaccacaaacctcctgaaggcaagaactgggtccctcccccattccccaccccattaatctgcaaattcagccaagagatcatttgaccattccctctgagtttgtgtgtatgtaagaactaaacaagtgtcctgtgtatccacagaattaaatctgaaccartgtgcaatcttcccaatgsagcactccttcatagtcagagctgcaagagggtgaggaatggtcttgctttcctccaagttcaaaacagggagtttctcttcagccaatgagggtgaagcctgaatttcctgcaaaggaaaacagcttatggtctggagatccaggacattctcttcctgtgtagggaaccagggtggagtgcatcacaggacaaggttcagaccttgtctcaggcaccaggccaaaacctggcacatgcattactagcgatggaaacagataaaattccagctccggacagaacagtctgggagatgcaagggagaaaaatgtactgattttagagttttttagtagctctcaaaaccaaggstggtcctcacttgacctagaacaaatgggaaatgcagagaggaaggaggctctgagagaaaaggaaagaggggccagggccatcaggacacatgcttgaattacgtcagtaaattatccgaaaaacattcatccttgctgagtcaccatggctgacaaagtgctcccatctaagttccaggagaaatggggctggctgtcatacttgcttaatttagaaacaagaatatasctcyttggtgagactgagtccactgctagttccctcgcaggtacatccatgctccgtcccctggcagaaggctctgccccactctgccacagtgccagtccacccacctctggcctgggtaaccccctgtggtcacagccccggacagaggaaagagaacctcctgaaggaaacctcagtctggcctcaggtacttcatgtctgaaatagagatcccggcattggccctaaggagtatggggggggtgaagccctctcctttttccttggggagcctccagtctaattgaattcagccagtttgcaaggtggtgctccacaccctcaggggcaagaaacaaaaccaaccattccaacctgcaagaggttcaccacctatcagagagaaagttgtgtggtttctctcaggacactcagatctcatagaagggatgggactcacccccattatatgagttttccagattcaaaaatctttaaatgctgttcaaatcacttgttttgtttaggtaatgctggacttttgagaacaaaattctgaataaatctttttttctaaagcaatctaagaaaacatgagatggggtggagaaggcgagggggagacttttttttttcaatacaagtgacagaggcaaactggtacagaaatcttctgcaactgatgagtgcctacacccaagctaaattctctgcaacagaaaccctagatagttttgtttttcttgtactcatcttccatgttgagagaaagaaaatattgtctggaaaggaaggtctgraaagacaaattatcttcaatgttttatcttcaatgtttgtggctgatgaaaaaggtcagggggacagtgggagctccaagagataagttcgcttggggcactgcaacttcagatctaccaaagatgaaggcaaaaccaacaggaatgttttttgttagtgttttagtttttttaaatttgattttattttaaaaagaattattatagaaacaccacactatttatatccccaaaatagcattattataaaattcccagtttcaactggcaattattacatagcaggtgaaacattttcacaaacattattttatctatcatttactacagttctttgagaaagattgtatcaaactcacttgtagttgaagaagagtaatccttgcttattggttgcttaaatttcagtgtttcaataaaattttaaacagtaaagcttggaaaatcccagatttaatgaggagagaaccagaatagaaccattggagcctctgacaaaacccatctatgtcttcttgggcaactgagctcaggtactctaccacttggtggcagcacacctaaactgccagaagagtgtacaataaaggcagtctctacaaaactgaagtgtcgtaacatagagtgtccgtatcaaatatatgcctgaaaacatactcaaccccaaacatcagtgaagggcacataatcagacttaaccaatgataagtaaagagagaaatagaaaacacagtgaaaatgatatgtaatgggggaaagagaaacagccccaaatctggatccccataactgaaaaacacatccttttccccagatgctaggctgtctctccagcatctatattcagggaactctcttattttcaatattccagccaaatgaatcccagctaaatttaactcatcctgattacctaccacaaactccagaaacacctgaatgcattggatcttatttcacctgacattgaagttgacctaatcaaggtgacaccagacacttcagcttcctaatcagcctgctcttggtgagccatagacaacagtagcctaaaagagaaattaaatgaccacatctaggctttccaggctcattcaacattgctgcccagaaaggcctttctccataaaaggcagataaggacaccagttctgataaacacaaaagaggttaaccactttaagccatgccagaactgactacacaaccagccaaggagctgaaacacatccagaggcaaaactaaagaatcaccaagggcaaaaaaaaacaagcaagccctttttagatttcatatcagatcctaactttaatgtgcgctccctgttaaggggccatattagtttaggaaagtaaaaggaatccttgcctgggaggccctgcagagcaggccctgtgaccaatccctttagtctttccaaagtcaggataaggtttaggtacacaatatatggccctaagttagggtcattgatgatggtgataagaatgtttgcacaatggtgcctgggcaatggtgagcaaataaatttagggaaatgcaaagaataggaaatctcattggaaaacagtacggaggtttctcaaaaagtaaaaataaaactaccatatgatccagcgatcccatgtctaggtatatggccaaaagaaaggaaatcataatggagtactagtcagccaataaaaagaatgagatcttgtcatttgcatgaccatggatggaactgaaggacattatgttaagtgaaataagccaggcacagaaagacaaacattgcaagtcatactgggagtataaattgataaatttggaaataaatttggtgagttgtcccaccagctttaaaaaaaggttcataaaataagtaatctgattaaaacatgggcaaaagatccaaatagacatttctcaaaagaagatatacaaaatggccaacaggtacatgaaaaacatactcaacatcactaatcatcagtgaaatgcaactcaaaaccatataagatatcatctcacctcatttagaatggctactaaaaaaaaacaaaaaacaacaacaatgacaaaaaaaaaacagaaaataacagatgctgaggaggatgcagaaaaagggaaacactcatacactgttggtgggaatgtaagttagtacagcaactacagaaaacagtacagaggtttctcaaaaaaaaaatataaaattaccgtatgatccagcaatcccactgctgggtatgtagccaaaagaaaggaaatctgtgtatcaaaaagatacctgcactcccatgtttactgcagcactattcacaatagccaagacatggaatcaaccttactgtccatcaacagatgaatggataaagaaaatgtgatataaatacacaacggagtactcttcagccataaaaagaatgaaatcttatcatttgcagcaacatggatggaactgaaggacattatgttcagtgaaataagccaggtacagaaaggcaaatattgtgtgttctcactcatatgtgggagctagaaaaaaacaactcacacaggtagtaaatacaatgatgattaccagacgctgggaagagaagggagaaggaacaaagagggtgattaataggtacaaaatacagttacatagaaggaataagatctagtgtttgatagcacagtagagtgactctagttaacaataatttataatatatttcaaaatagctataagagaagatttkgaatgtttccaacaaaaaaaatgataaatttctgagatgatggaaatctcaatgcctctgatttgaccactgcacattgtatacatctatcaaaatatcatatgcaccctataaatatgtacattatgtatcaatttttaaaaagcaaaaaaaaattatatatgtaaaaactaaaaaaagcccatgattgctacagatttatctcgaagaaaccacttaagatacagacaaaggtttacataaaaagatttttactgagggttacttacaacactgaacttctggaaacgacttagatgcccagtgatatggttaattaaatatgatgcatcccaagacacactattacacatgaaaagtttttaatgttatgaaaatattcctatagtataatgctaactggaataaagcaagcagcaaaactgaagaaacaatacagtccatttctgtttttaaaaagctctaggccaggcgcggtcgctcacgcctgtaatcctagcactttgggaggctgaggtgtgtggatcacttgaggtcaggagttccagaccagcctgcccaacatagtgaaaccccatctctactaaaaatacaaaaattagctggacgtgtggtgggcacttgtcatcccagctacttgtgaggctgaggcaagaggatcgcttgaaccaaggaggcggaggttgcagtgagccaagatcacgccattgcactccagcctgggtgacaagaktgaaactccgtctcaaaaaaacaaacctctaaaaaaagataggaaggaaatatgttaatatattgttattatctctaggtggtgcagttacaagagctttaaaaaactcttaaaatattttttctgcacttactttctccagtaaaagaaatatctttctaatttaaaaatataggccaaaactttgtcacactgttaggcacatatattcattcattacgtattagaagtgaagtgttactgacctatggctgtaactgctatcactactagctctaatcctaaacttaagcataaccctaaccctaactttgaaaaagcagtgctagggacaataaaggacaagtgacaaaagaaggtccctactttcaagcaagggaagggaragaaactgccagttgttgtcagccccttctgtgagctaaataatgggctaggcattttacatgtgttatctcacagaatcctcactaccattgtgtttggtaatatctttatgcctattttataggtaagaaaatttttagcaagcatgcgcatttcayctcccagaggggaggattctggggttcattcttcctggactggaataccctacataatttccaggtgtcagcatttttccctgcagcccattctttctctgctattgttccactcccaccaagtcaatgctgatgcccaaagccccttctgagagtatacatggaatatgcatgtgaaggagactcactaccctcacttattaggaattcttttgtccagtgctgggtgggtccttgatttatcgctacakgcacttactggttcctggaataaccagggctgcttctcatagttacttcatgaccaagtggtttccgcctctgattgctccagttattgttctccagggaatcacaaatgtgtctctccgcatttgaagcatgatagccagctcttccccactccctacaacctgtccctgttcacagcgtttccatgagcccctgtagtcccttagccccacatggactgtgcaggccccacagacctgccaagtcctacaatggtggcatggccatggaaatgaaggagcctcaaaatgtgcattaactgagcactaattccagaattgtacttctgacactacagcaatgccaatatagaaacagacaggcaggtgggtgaaggaaacatctcggactcaaggaaaatgaacaagatgatcatcgctagaatacgatagagactaccccaccaatgtaggcattaagctcggggtccctgctactgatagtctttcattaatctctttaaatagtttctatggtcttaagtgcttttgttttctccctacatctcttggtataatttggtaactaaatcatggttgactatcacccacagatgagcataaatgagagttaatgcatctaaaactgaacacaaacacctgggggaggaactgtgaaggaccctaacaccaccaccaccctcaccacccctgttgtcctgcatatccacagccaccatggttgccttggccagcagaagcccaaaactgaggtaattaccacctgtatttctcacctgcagcaaccttcacacttaggttccaaagagaagcttcaggaaagsaagtctgaagcrtagtggtccctgcccaccattgttagatctctgtgttggtgcccttccctaccgccctcttccattgtccctctgttccaaatccagtcttagcccatccttcagagttcaccttcttactctccccaaatcagtcctctcactctgccaccactgccacttccttcactttggcctcctcatctcttcactggataaaagcttaggctctggtgctagaccatctggctccagatcatactgactgtgtgccagtaggcaagtacttcatctstctacgtctcagtttcctgatatgtaaaagggaaataatgataattcccctctcaaagtgttgttgagaattaagttaatgcatgtaaaatacttataacagtgcctagaattgattaatawatgctagttgttacttttactgtctttaasccacattattggaactgtttccccattgcctagccttctcttccatttcatcttccactcagttgccagagtgaatcttctaaaaggcaattttaattgtcattctcctgctgaaaagctcttcaatggcttttttattgcctattagtaactaacttcttgaactrgacccacagaattctacatgcctctctgccctatcctctgccattctcccaaaagactatgtgtttctacatcttgagtttctggaacttaacctgacaccccttcatctcctttgcccacccccagtgttcctttgagcccttccctctgactggcccaytcctaccccttcgtgcttttagcaaaattatcttggggcttctaaatgctgctcacgtctcttttgaagtctccccactcccagtcaacagcgaggctgtatgttccayatgctggaaggccagagcactgggttcaaccctctatttcatcacttaactcagggtgctaccccacaattatgcacatgctagacttccccagaccatagaaggagacgcaaccaaatgtttatggaatctactgtgtacctggcactatgtaaggacttgatatactttatcttacttaataccaataattaataaattgaaaagaattttactttttgtttgatattgacacaaattatgatatttattctaaagtatggagaaaagtaatcattattaattttccttatttcagttagctaagagaaacttctcaagagacactttagcactgcattaatctattaataatttggtttggagttctcagagtcaaaaccttagcttctttttcactctaaattatgtttaaagattcatccatgttgttgcacatcacaatagttcagaaatgctagtcacagaaaactacacaatgtacaataccattcttataaagctcaaaaacaagaaaagtaaatcatatattgtttatgaaaatatgtgctgaactatacctcccaaaaagcaaaagaaggataaacataaaacccaggacagtgttattttkgggggaagtaggagagtcagaatggggaggagccctaggtagcattgaggatagaggtgatgttctgcttgtcaaattggagggtaggctctcaagtgctcgctttattattgtgcttcataacctttacatacactgcatctagtccctcatatgtagcaaatattgctatctatgtatgttcatatatattttttgttgctattattatcattattactattactgacctcctttaggggaaagactaacaattacgagcacctgggtgctagagagagcctgctagataattcctcacaatacccttatgagatagacattattttcccaaaataaaaattagaatattaaacttagaaatggtgactagcatgcccaaagtctccctctgtgccaaatatcttccatttgcaccttgaatccattctgtatcttctctccactacccagtgccctggggagttgacctacatggactacatcaatgggctcccctgtcatctggcttctcggtacattcagtcaatgatgacaggagatgagagaatgggaagagagtggggtcaaggtaccaattcccctgctccctgtcatggagtcaccatgtgttggtggcatcttccactgaaggccacagttcctstcaggcagcctctcacaaagctctcctctctcttagaagtggtaatgtttcccctccgtgctgtttccaggcctgcaatgcctgagggatccaaaccttgctggtttctctgttctctgcccacagccttataaactgtgtcttggttaaagtcttcccaaattacccaggttgaggggccatatgtttcccagctgcagaaaggtagagctgggatccgaagctcagcatcttccatctagactaagatgcctcttcatcctttgctgcaaaagctgatatgactctaaggaaggtgattactaacgattgcagttactactgtggctttatgtttcctagcagcatggtagaatgctatttgctcttcagggctggggttacatatagccaacaatagggacacctaactggtattgctggaaatgtgtgtaaaaagtatcttgtttatacatagaaattataagctatttatacatagggtttaaattcaaaatggataaagaaatcaacaatgatctttaaaaggtatgttttmgggaaatgtaaacaatgtgacctaaatgttctcattggtcctattatctggcctttccatcacctgatccctccccttcctccccacatcctccttttattgatgatcccagagcaaagagtaaggtatcaacaacacatctcaacaggcccttacaacagaacatgtttcatggcagtagtttggatagctcaggctctctcacgcagaaaatagaggcaggaaacccttgmagtttttacccctcttctttcakctgtcttcctggttctctctgcttacacctattttctggtaatgctgcacaaagacagygcaggccataagcccaacttatgttttgctgaaatccgtagaacaagagcaaatgttatcaaataataggccacaagtaaaggcaccttgatttgattgacattacagaataactcatcctaatttcttgttatctttcctcaccaatatgataaccacattccttggcagaacactcagtatctcagtggaactgctaagagcagattaagtgtcagatacatcaactggtgcccttaggagtcacagaaagaaggtcgtgacaaagcaggctaacagtgatgatgaagaggaattcaatgcaataaaagtaacccaggatttccttactagatgtagtgcttagaaattcctatttcaagcatttcgtcaactcccaataatcacagtgggtagattatccacactgtgggctaggcctggacagttgtttactctcaggctggattttctatcctgtctttcaatttctagggacattcatcagctgatcacatctgagtattttctttccactcctttcacgtacaagtaactgtaagcagacagcagaccaggacaaaaaartgttagataagtgtaggtggatgacagtaaagataacatgaggcctcaccaagattcctatccagaacttgtctcatagtagacactcagtaaatatttgttgaactgagtggatggagttattgaaaagttgaattagaagacgtttaaggtttcttcccaccctgttacctatgactcctcagaataagatgatggaaaacctgagtgacctaggagatagatgcccaaactcatcaggagcaagacagagaagttaaaatgacgggactcatctcaggccaagatggacgctgaacgaataagtcaggactgatccaagctgttacaccccaacaggatccttggtcctgggtaatgccccaaaatttccacctggagtcgaaggggactaaaaasaagttctcttaggatttaaggtatagacaaaatcttaagtgaaatcccagaccttaacttacttaggaagtctgagaagagagcacttagatgcatattggtgggggtggtaatactctgttctgaggccctggattttatgatgcaytgttttttccaatatcacagaaacctagaattcggggcaggaaagattcttagaagttatctaagcccaccttcaacccagtagaggaactttttctacascatccctaacagagggtcatctggtctccagtgacaggaagttcactttctccagaggcagcagcagtgttgctagacagcttccatgtgggcaggttctttctcctgattctaacgtccacccgttaatrcaacagaggccatgcctgttccctcatttctggggcagctctcctgaagtcaggaattgygttttttgttgtttttttttcttcatcttcatgcctgccagcaaacatccctcattccttcaactgtggagacatggattgtgggtgccttaatgtgctgcttccttgacagcactctaactgatctatgtagttcttaaaatgaagctggccagatgaatgttacagagttgaatgcagtggtccagatatggcctggcctacagagaggagagtgggactatttcttcctattcatttctaaattatcaacactatctgtttaatcatctattctaaaatggtcccccaaatggccrttaagtttgctggttccttaaattctaggatcctcwttcaccactcacttatccttatttgtttgtcttctgctggctggttcatctcctaygctacaatgcactcccatcttgggctgccttttactattactggtttggcactgggtaggaaaatacccaggtttcccctaaatttctcaaaatgtgtgttcctgttcaccacaartcctcaatctacctggcatagagaagctctaaatacttgttgactacataatgaataaatgcatgaataaataggtagcaaatgttggtcaggagaggtggctcatgcctgtaatcccagcactttgggaggctgaggtgggtgtatcacttgaggtcaggagttcgagaccagcctggccaacacagtgaaaccccatctctaataaaaatacaaaaattagccagttgtggtggcaggtgcctgtaatcccggctacttggcaggccaaggcacaagaatcacttgaacctgggaagcagaggttacagtgaaccgagattgtgccactgcactccagcctgggtgatagagtgagactcagtctcaaaaaaaaaaaaaagcatcaaatgatcaaatgtcacctacaggcttgatcacaccagcctgtaacaatccacctccaacaaccagagcctgtctttttagcatcctggatctgacccagataaacaatttcttctcatcagtatcatctactgagtctaacagttaattttcattgttccctttctcttccaaagccatggctacaaagaagaaartggcaaatataatctgacctgctaagttattcagttttcctaccccaaacttcactgtctttagaacaatcctgttccatccaacagccattayrtgtgacatgtagccaagagaattargaagtgactggtgggcatgactaggtgaactctgcggcctgccaggcrcttacactcttcatgaatgcaggtccctcaggaggcagggcagcaggcatcacagaacagttcttcccactggcaatagggctctcgcctgccctgtgaagagccttccagttctcaggagtgcagattgcactgatgtgaccaccccctgagaagcagagagcctgcatcttgtgtgttccttcagtgataatgtattattccacctttttcatgaccttcctctcagcccctcttgggttttgttccccttcaccccagcggaaatcttttctttttaaattgcttcccgtctgttttgtcccactctttgyttaacaagtcagaatgaagaaaagtattcttccaactctttycctctttattctaaagaaaagatgagcatcaattagctgcagctatgtgatgaacacgcaggaaagaaaaatttaccctttgtgtcttccgggatcccaatttcttctgtctttaagagaactgagagttcatcacagctccctatgaaaacttctattgtaaattgcttcagaaaattcctggttttatgcctgttagtcacttacttaggaaaagtgctttaaaaaactgcttagctcctagatggctaaattgctaaattacctatatcaatcacgagttatttagtctacctccttgcctctgagacagataagagtatttcttctttataatgacccccagaaaaaaaatctttcatccttataytcattgtttcatgcactcaaagtttataagttcttcttcagatataacccaaatcccttttactgaagcttaagaccttttatsttttttctgttcccagtggatatcataaagaaaaaaaaaaacagacactattcagcatctayttgttcagtcttctgcccgaagttcttcagggctcacaattccattcaacatccttccaagcatgtgatgactgctcttaaaatcccctttactacctgcccatcacctcccaaccacycctttacattcatctcttctttagctctctgaaatgcagtacttgcctcactcaacacctgcttcaagaacttaatcagcacattcaaaaattatcccaggtcttccagcaaaggcaaagctggatatatagctcctccctgtaattcactaattcttctataaaatgcacagagacaagacgaaggttttgaaagcccaaagaaccatttcttatttgccacaacaaacatttcacaggctttggccccactaagagacagagagcagtgccgtcgctgctcaagaacaaagatggtgagagagcaccggggctggactcaggagggttgagttctagaccaagctctgccactgacccttgtgaaccacacacatcccctgtcagcccctttccctaagcaggacatgacatgtatctgcctagattgctcctcagggctctcccaactctcacatcttgtggttctctgatcaagtgaagctctcttctcttccgtctcaaaatacataaactatgtccttggcgtgtctcccacacccaccttgtggccagtgctacctagaccagtgtttctcacactttttaaaattatcatcctaggccccgaaggagcctttttagatcttttttccctaatcaccctacccagtgaaaatttaataccacacatatactgtaccttggtagagtatgtatacctgtgtttaatacatggaaaaaaaaatcttttgctatccccaagaaccaattttcactctctttgggggcaatatcactcccactgaaaatgcatgacctaaatcagtgtcatagagtgtttcctgtagctgagtgatacagagttgagtgtccggagttgccacttccagctcccaccccattcacatgaatctcagcagtaacaatgggaatgaggcagacaatggacaatggtgttccaggaatggttagaatccactggaagagcagaaaccactagggtccctggcagggatggaggctccttccaaaactggcatcagcccagctcccctcccgctcccctgcaggccattccccttccccttaccttggcacgctggccaaatacgtcacgagtttccgcaggtcttcctgtcttattctgtcatgattgctgcgagcagggaaggtcaggatgggtccgcctcgcttatcacgaccccctgcaagaaggaggaagagaagagtgtttaagaaaaccagtcagaaaggaaagccacagaggaaaaagaaatctgtctgagtgctgggtgatcagacagaaatagggtatccagagaaatctggtcactgcttaggacaaggtggggggrtctagatgcaggtagcacatatgaccgtgggcaagtcttttggcttctctggtgcctcatctgtagaaggcagatgaaaacagtactgtgcacattacagggctgttgcaagaactgatgagttggcacatggggatgcacttggaaaagtaaagctctctacaaatgtgagatgataatgaaaatggtgataactgttcttattgagaaaacaagctggtggaaagtgctatgttctttggaaatttaacctctaatttacttctctttatagacctctgtgaggtgggagtgcttgtgatgagctgactactatggtgagaagacctcaaagcatccatcccaggatagcattactgggaagttttcagattcatagaaaraacattaagtattttttacacagccaaaaaaccacccctgcctgtctgcctgaggtgccacctgtcactcctgctagaggagcacatgaatcttatcagaaatcagaatgctcaaggtcttaatcactgcaaatgcatacrtacatactgagattacaagtgttttctaaacatcacatttaaaataactggaaggagtataccaaaatgacaatttctgttgctattagaaggccaggattttggatcgttgctttttctttcctctactttccaaataccctattcactatttattacatgattttaaaatgtattcattaatggacactatgcttaggaagtggaaccaagtttctcaggggcgttaaacaggaaaaaagttaagggtaactatgaccttacagggcactggccattacacaaagaaaaccactatgtcatgatcacagactcttcacgccacatctcaggtggccactggatataccccagagtaggaccacaaagggatctaatgaaagagagtggagaggtgcraacctcaccaatactggaaaacaaggatctcttacacagagggcagagtctcccagggatcccgcccaagtgtgagttcatgaataaggtttccttctggttaaggggtccagaagccacacagatagaggggaggcttgacaaaaaaatcaatccagaatacccttgaggaggaagtaaggaggctgcagagagaaaaggattacataagatcaggccactgtgagattcagccctgatgaaaaagtgtttcagcaccaccaccactgcccagcgcccccactcagggcagattcatacagattaactcagagttggacctttcayaccactagccctggttctttgacgtgataaccacccttgtctcatctgccttggaaatggtccccatctctccattgccttccacatgaggaaaaggaagcgagaaaattaaatggaaggtttcycaaaagctgggaggtcctccaacactctcaaccttcccctctatccttgacctcaccccaagcattgtcactctggcagtttgtttgcttgttttaccatagctgttgtttttttcctgaccttccttggacattatacaagtagagtcttggaaccacaaggaaccacagctccaactggcaaagggtggcttggagggctggctgacactgcccctcccaagctagaaccagggctggccttggagacatgagattcaggatcayggccggggagctttttagatggctggaagatagtcactttttctttcctctactttccaaacttcctattcaccatttattatatgattttaaagtgcattcactaatggacactatgctcaggaaacagaatcaagtttctgcttttttttttccctgtctgacactcctgagaaacttggttccacttcctaagcatagtgtccattaatgaatgagctttcaaatcatataataaatagtgaataggaagtttggaaggttcagatggaagggaaggaggagttrgaagagaaagcctggagaattctaattccccacatccagaagtgtagataaggagtcaagaggaggcagcaggatcaagccatgtggtattcagaaaggaagagacctttgaagattatagaaaaaaggagaggaatgagcctagaggaagagaatctttatgctgggaagggtagggacaacaacggagcaaggtctcagggaaggcataaggcgggggtccagcccacagcagatggggctgcccccctctctgaggcaggctgttgaactccamgagagaggaggaaatggagatacgtggtggagagggaagagttcagcctgcctgagggacatggttctttgggtggaacagtagacaagaggcagtccagggtcagggtaggcttagggtactgaggagagggaaatgaaaccatcactggagaacttctctcgagaatgacagtaggactrggtaggacatgagcttcagggttgctgacaggatactagggcacagcgaaagctctgtygaaagctttggccacagtatctgtgccaggctccaagctgagtgaaggcagagtggagctaatgcaccatatraatggggtatgcccagggagggtgggagatgttctattggatgatgagatcccagaaaagagggaaaggtgttgattttattcctctcatatccatcctctcccaaatgacaagaggatatcagaaaggtcaaagtaagggactaaaaccacagatagacacatcaagggtcaagatcttggacgtgcataatcatggtaggtaggtggaggactttcgtaccaaggaggctgagtagcaatgaagctataggatttgatcaataattgacatagatgctgaaattacagaggacaataagcagagatgaataataaggaccccatgataaagtcaatgtaacaatagatctgcaagatgttaatggatatgcatcacagacacataaatttttagggaatgaggttattctttagtttggaaaatgccagattaaaaaaaaaaaataaagttctttactgcaggacttcccagagccttaaaatgttaatgtattttaatggatattgtaattctccaagaaggagagctagaatgtccagcatttcccaaacttctttgagagtagaaccccgttttctttgtagaggatcatcctgtggaactgatcttggaaaacactttgagagatgcaggtccagggtacgaaagattgtgccacagcaacataaggttccctgggaacggtggaaaccaataaggaaaaccacattggtgggagatagggaggcagagaggaatcatgaggaggtggccaaaaggaaggcgtgtatgcacataaagacaataggatgaaatggaccccacatgagaaggctggataaaagggacaatgggtgctgtgacttctaagtagtacaaaggacatcagagaggccaaggggagctcgtgagctgtgaatgacagagcagaatggggcagtgctggataacaacggaggctcactgagggacagccccaaatcctgtctcacagacatgcacacgcccacatgcagaagcttctgggctgccctggattattcccaatgtacgttcccatggcagcatggctttccttttgcctggccaaggctgggcgctagcagaggagggcaggctcaattaacaaacagcctgtttctctgctcaccaccttccttgcagcgctttcttcttctcagaaagaaatccaactgttaaactgcattatttaattataggtttctttattttgttttatttttgcattttatcttttaaaagctcaggatgtaagagttggttggtttggtgttttttttttgttttttttttttttggttttgggggtttttttgttttgttttgtttttgttttttgcttttttaatgcagccagtcattatcttcccagtttattcagtgtccttcccagacacggaagggcaatgttccctaagcccagaagtttctggcaccacaagcgcaggtgcagttgaataaggcttaccccargctgttcggcttacgctggcaaatgggggagagctatgctcccagcccccttcgtcctactcagggaattttctacctgcctcattcctgactgccttcctggccacgttgcttctatgagctccattaggacaagcccctaccacttgagaaggtttttttctgaggctctgcccagggctctgactgaatttacatgggaaaaaataaaccatgaacatcaagcaagggtctccatgtcagagtgtattgtgcatgcatatgccccaaactgatgtggaataggatgattctcagaggaatacattagatccaggaaggtctcctggaggaggtaaagtagaaactgactctggaaggagaggaaaggctcaacttggcagaagttatggagaaggcactgcagagggaaagaagtgtcaggcacaagagaaatgggagtattggcaggatatccaggggacaggaagaacatcaggttaactaaggaccataaaaagaaggaagaaaagataagattgggctcccagagggctgtgggccacatccttgggagcccaggctacggggatcagcagaaatcagaggcctggcactgctcagtggcctctaggatttctgcacaaggtcttcccatatgcttagcaagaaatcagaatccaagtttctaaaggttttaaaggttgtgttacctatgcctctccccatacccaaatcactgctgcgtaatcctgccaaggagttgttctgcctgttcaacatcttcagtggcagggggctcattaccttataagatatactagcccctaatgggaagaggcagctgccaggtcactctcatctaacagcaatggcaataataaattactattgctactactgctaacaataattacaataatatagaatgcatttagtcattacaaagtcttctgcacactcccattgcatgcctgccctcacctcccacacctacactctgaatcatcaggctctcgccttttctccgatgaggtgggagacaactgctgcttaacttcccctttcctttatcctcttcccgcctcctcttctctctattttggctgtcgcccaacagccagaccaacagtgcctgtggcatgaacctctgctctacaggactggactagctcttgctctgtgactccactgctactccttgtagataaccaaaatcacccagaaataaaggtttggtccatgtggtataagcacgtggcatgtttctcaaaatacaatctttcgctactaacactgtctatcccagcctctgcctcagaccctaccagaaattctgatcccggaggcctagagtggagccctgsaacaggcacccagagtgattctggcataccttattgtttgagaacaactgccttaggggctctggccagtctttggcttcaattatatcaggggtcaccggactttttcttaaagggtcagagagtaaatatttcaggctcatgggccaaatggtctctgcaatagctactcaactctgttgttacagcgagaaggcagccatcaacacaatctgtagtaggttgaataatagcccacaaacatatcatggcaaagactttgcaaatatgattaagttaaccatcttgagatagggcaattattctagattatctaggtgggccctaaatgtagtcacaggtatccttaaaagagagaggcagagaaagatttgacacagatgcaagaggagaaggcaatttgaccctggaggtagagatggaaatgatgcagccacaagccaaggaatgtcagcagccattggaagctgggagaggaaaggaaccaattttctcttagaaactctggaagcacagccctgctgacccctagatttcagccccatgaaacggatttctggcttccagaactgtgcaataatgastttctgttgttgcaagccactaagctcatggaaatttgttgcaccatcaatgggaaactaatacactccataaacaaatacacattgctgtgtaccaataaaactttatttataaaaactggtggatggcccaccagctacagattgcttaccccagagtgagacattaagaggtctttgtgcacaagatgtatgggagagagaagtcagatataaatatttggaagtcattattcagaaaaaaacaaaaactaaacatctaaacatgaaccctcacttgagttccctttgccaggacagaaagataaggaggaagcaaaaactcctttaaaaatctcccgtccctgatccatgcagaaatgaactcarataaaacctccaggaatgtgccaagtgcacagattctccagttggagcaactctcacagggccaggccagggggctgaggttggrtgggaagctcagggaatgtccctttggttctgggtgtcctttagaacactcagctggggccagagccctcctttctccctccccatctgcctcaggagaaagaaagcagctgccccaagcataacttccccacccctacttctcccctactaacacacaagtgaatctgaacacatgtgcayacacacaacttctctaggtcctttacaaaagaaagtcccacaaatactcaccagacacgaaggccacyttttcctttaggataggaaggacatcagaagctttcaaaccatcattccgaaaagaccctgtgggacaacaaaccagaaggaatcagggtgagaggagccagctggctgaatcgcaaggtcccatcctcagtctcccaatcccatcatcagccggcaagtcctgccttgtccaggtcctacagcccagcccgatggaccaggagagggtctgcaacagaagggatacttccacatcatgccagccataggggtgatcagggctgcaaccccctagtccttctcaaggagaggacaatccaagtcaccctccccacatggagaaacctccatgcagtgggggcaaaaaaaaaaaaaaaaaaaaaaaacagccctgttgctattgagcaacttgaagccgggggacttttaaaaaatcatgttcgtacctctagtgcctagcacagtgtcttgaacatactcagcactcaggaaatatctgttgaattagttaattgatatcaagatggattacaaagtcctaaagaatccttcttgcctttcctctggcacaacaactattagtctttwttttacaaacaaggaaagtaaaccacaaaactcctacagatggaagcaaagttgatgacaatactcctctccccacctcttcctcctcccctcaatgtcatcatyattggtccacaatagacaggagatggggagatacaaatctcctgggaaggaaatgcactacccactaccttgtttaacttgttctctttctaaatcttgcttctcatttagaaagtcctttctatgttctagttgagttcctgttagggggctggaggcagaatcttggggctcacaaagaatggaaactaaagatgtgcctggaggaacagtagcctcaggaggcaaaggacaatccagcccagtgtgagatttgtgggaagtcaggacccagcttccacatacacaaaccccaggctagaccattgcatccctatcatttaacctaagaaccccacagggactctcagggagagccacccacacttacagcgattcgagctataactggggtctctgttatgtgtcgccattagggacatgacacaaatagacctcagaaggcgagcggttgtatgtcagctcagagagcagaaccagataccatggataccccctctggtgcctttctccacttggcttacacccttagggtccaaatttgacaattgacagaggaaaacaacatgctgggcaggacaatcccactcaatccttcaatctctaaacattgactgtttcaagaaacccatccgggaattttggcaataaaattctgggccaggcgtaagatcactggcctagggaagtgaagtgggccaactgcacactcaaccaaggaggaagagagatgtgtgctcacaatgccagtttctatgatcagaggtcataccctaaacctaaaacaaatttcytaagtgtctctgaccattttgcctatttcttctctttcatttttcaccaaatgaagactgcaagtctttttattcatcagtcgtttctctttactagctgacagagaaccagctacaaggctcactttgagaagaccttgagcaataggaaaacaaagtaacaccataaaaaagaatactcgaatttcaaagcctataagcactattttgaactttctatcctgtttctacagatatttatgctctaattttatcttttccacagaaaaacaattaaatttcactaatagaggctaattaggatcaatataaattattacagaatttacaaatagatatataaagtattttttttcatcytcatgcaatgaggagacatttcagcttccttggcaatctattaggctttatctgttagacaaggatcaaggatctttaactaatacatgacttgtttgtgaacaatgatgcttctgtatcaaaatacatgattttcctttgtgaaatatatctttctatacattaattttaaaacgctttcctctatatcaccatgcactccactaatttctatagaaaaaaatgtaatataaaagttaaatttcagtcctgtcttctttcagattatttacaagttcaaaaatagcaaggcccaaactaatgagatttactatacaaaaagagtccacataactctcttttctcctaaactcttttcctatttttttctactgctgtccctcttgtcctctactgtgttgcagtacacaagagggtcctagttctaaatagccataagatcttaaggaagggtttcaaatttgctataatggaagcaaagggttccccatcctatctcctctctactcccatccttggagaggaagaggaagctccaagtctcatccatcacacccactcattgtgccccacctcttcyttctccccaccagggcccaggacctgagagaaggtgtgcagcttgtccatgcagcttgcagtcatgggctccagtaaatgtcaataccttgggttgggctgttctaggattcmtagggcttctacttcccaggccagggtcctccctgaccctgtagaggccactgctgggcctggttgtgtgtccacaagtaaacctaaagtgtccacatttacaaaatccaaactaggggacaatcatttccaattacaactaaaattttcacattataaaaggatttgctccagagtctcttcaaataaagttcccctagtgatttgaatcagtttttcacttgccaaaaattaaattacatataacttttgaacaatatatgtattatgtaaagccaagtagagctaattagcccagcagctcagaaattggtgaccttgcatataaaacctatttgcactgactaaagatactatgtatcatatcaattcccccagggcccttgtgaaaccagctgttggaatatataataaaggagaagttcattgaatgctaactcaaacaggaccaatgaaatagcaacatgttttcactatcgggtacgtgtcttggtagactcacggtaaatgttcaataaatatttgatgaaagaataaatgaatcaatgaaatgttgacccttcctaaaatgacttatacaaggtcagtgacttcatttgtcacaccaagcactggcaatctgagtagatgccctccagggtactactcagctctaatactctgagactttctaaaccttctcttcatatttgttggcctttaagatcctcaggttatcagatcaatatgctttaaaaggaagtactgggaataaattccctaacaagattcattgcaccttgggaagataaaacatttcactggcttcctggcccatttgtcccccagaatcagtttacagatactcaggggcagatcaccccattttgcaggtagcccaaaatgccaaaatgggagaatagtgatggaagaacttcaatgaggcttaatctcttgaagaaggcaagcttccattgccattgttatttctggtatatttggtagaactattagaaaataaactctagatcacacttgtgcaacctgtggtctacaggcctcatgcagcccaggacagctttgaatgcagcccaacacaaacttgtaaactttcttaaaacattatgagatttttttgcaattttttttttttttagctcttcagctgtcattagtattagtgtattttctgtgtggtccaagacaattctttttctttcaatgtggcccagggaagccaaaagactagacactcctgctytagaccaatcatagacctgtttccatctaaaaaaaaaaaatcctggaaggcctgagaagacattaaaaaaaaaacccctaagcccttggagttgctgcaggaaaaaaaaaaaacaaaatcagggatggcaccttcatggacctgacccaacgtgggtggtgggtgttgtgcctcttcttaaggacaaaggcatgcttcactggcattcagtgctaatcccaccccatttgtgtcctgctgctgtcagaattacaagcctgctgttccgttaattagcaaagttgaaatgctccacatctattaaggaagtacaaattacccctgccatctccccaggatcctccagcatgggtcttctccaagccccacttttgcttctccttgctccaaacgtgttatgcttacattgcttctagtcatcatttcccatgttggaaaatgccagtcagcctcactgtggcttccagcctctgtgtgaccttacacggcaatggtaaaactggcccttgagccccccagccctgtctgtggttttgtgggtctagagtagcagtatattccccagggcacctgggtgccttgtgttccatactaacctccttcagaaagcattcctgatttcaacaagtgaagaaacaaacaacagagtgggcgtttatagagcattggaggttcaagctgccagagtatccatggattgctctttgtttccttttggttctcagtcacacccctttaatgtgcacctatttagaagttactatgtaagtgttctaatgttgcttcaagtgggcctgagccctgtttctgcacatttccctgtgctcaggtttctgccttctctttctacttcacccgtgtggtgtccagtatagaagccttactcaaaatggcactgagtcactgagaggctgcataaaagagatctggcttacaattgagaggtgcaggagctcatttggctggaccctagttaggttgtaattttgaaattttcctattcctaaggtcattatttcattaattctatattgaccacttactatgggccaggccatatgtcgggcttcagtgacagtaagacaaataagaaatggatcctgctctccaagggggcttccaagcagagaaagacgggtttccaaataggacaattaactgttatcagagacaggacaccacctgtacaaaatgcaaggagactaaaaaaaaaaaaaagagcttcttaaagatgagtcctaaagccttggtacccaaggtaataagcatcacatacacctagaaccttgctggaaatgcaaaatctcaagttccaccctagacttacagagtcagagcctacattttaacaagaaccccaggtgaggccaggcatggtaggtcacatytataataccagcactttgggaggctaaggcaggcagacaacttgagcccaggagtttgagaccagcataggcaacatgacaaaaccctatctatacaaaaaatacaacaaaaattagccaggcatggtggcacgcatctgtagtcccagccactcgggaggctgaggtgggaggattgattgagccagggaggtcgaggctgcagtgagctgtgatcatgccacttcactccagcccgggtgactgagaaagaccctgtctcaacagcccccaccacacacacaaaaaaacccagctgatccatacgcacattacactttgggaagttgtgtactaaagtatgtctttccattccagagttgcctcagaggcagaagatggagaaaagcatgctgtagcctggcctaaacaggacccctaaaatctcatctaacactactcatcacccctstggcccctaccatgggaagacccctctccactgcccagagattccagagattcagccattaccctataatcatctattattcaaattcagctttggaataaaaaagctayctgggaggtagataaattccccctccagggcattaagagtggatcacatcttactttttggtggcagkagtgtttatgaataacacctgtccaaactgctcagaattttggtagcttaaaccattccttcatgtatcagatgttttaatttcaccacaaatcttccttcctaccctcagagccctaccttctctaactactttcggtagcataaatactgtcaccaagatgccatctctaagatagccctaaaggacagagaagccagtctgcttatgcctctttatcccacstgcacccccactcacaggtacaaagccctgaacactggggaaatgctggtcaggaaacagaaaggaggggtgcgcccacctggggagctstgcatctgagaacacagtgcccatctcaggcaattctctcccttggaggggaaacccaatttctgctgagtttccagcctaataaaatacmgagtgtccatttcccccaataccaggaagctaccagactggataaaaaaccagtgaagactctgagattctgataaaaaccttcccacccttcccccaatctgaccatcctgtatccactatatcttaattactggtgccatcatccacggagctaaccaaacagaaacctgggaagcaccctagactcctccccctcctccatcacacatattgatttggctacttggttctgttgatcctacctcttaaatctctctctaatgtgtcatttcctctgtgctgtttccctggcctccccatcaagctgagctgtctccagttgtactttataatctatcactcctgaatggcatttatgtgttttcgtttactccccattaactgatcctgatgccttgagggtagggaccatgtagtattccttgttctactccagaacctcacacagggcctgtcacaaaaaagagtcaagaaatactgaaactgaccacgcacaggcacagagaagacagagaatggcaagttgagatgatccatcaggtcagtctccacagagaagatgatcttcaaattagattgtaaataacagaagaggcaagggatggtgggaagcagtacatgccaaggcagagagggaggggcaaacaaactgtacgtcatggatgaaggggttttactcaatgaacagaaaagcagagttagggggtgatgaaaaggagtgcatggaggagggtgggctctgtggtctgactcccaacagggtggacacctggggaggcatcggcaaagatgccactgcaagtgccttcggagactccgagagccaggtctgtgctacatacagcaaggggcagagctgggtggaatctggctggtcccagaagaaggctgtggctcctgaacagggcttggcccagcaggctctgatcccaacctccaggtcacattctgctttatctttgaggatacggggaggttgggacttggcccctgctgaggttagtggtagaatagggggtaggggcactggaactttgtctcttttgatcttctccctaagtccaaggagaggcaggaagcatgtytgtgggtaacctcctgggatctgctgggacagtagcaggctgacagtttgtgtaagaccccatgaaagtgcaatgtgaaactgaatcataaaggaaagagacttaaagtcctggtctcttctgtgtagaaaatgggtggagcccttaggagaagacactgttagtcaaactggagttagtagagaacctattagaagcaagatcttcattcccttcattctcccttctttcatcccctcctttcctatgttaacacaagagaaaaagagagaggtggcaagagtgggagaaaacataaggtaaaggggtaagagcaagagataaagagctagagagaaagatacacacacacacacatacacacacacacacacagaaagagagagagaaagaaatagaggtgaatgttcctgtctcctctttatagacactaaggagctattaaggaaactgttgaaaaatgccgccagtgactataaatatgttccttagagttctccttaaaacagctaccaccggccggtctcagtagctcacacctgtaatcccagcactttgggaggcccaagtgggcagatcacgaggtcaggtgttcgagaccagcctggccaacacaatgaaaccctgtctctactaaaaatacaaatattagccagttgtggtggtgtgagcctgtaaacctcactactcgggaggctgaggcaggagaagtgcttgaacccgggaggcagaggttgcagtgaacagagatcacgccactgcactccggcctgggagacagagggagactccatctcaaaacaaaacaaaacaaaaaaaaaacctaccaccaagacaggaagtgtgtgcttagagaaaggaataaacctggcagagagagagagagagaggctgggcagctctatgtcagcaaccaaacacacagcacagtgtggagacccacatgcctctccccaacctgaaaatctacctgtgcgcagtggggccaaccccccacagtcttccttcatcgctgtcacccacaaacatcaaatggaccaaggagcatccccctccttaggtggcaggtgtgcaggagggatggtgcagcagagttctcctccttgaccatgggatttctaagcaaaggacacccaggagcctctgctaacctgatttcaacacaaaaaggggaaaaaaatgttcttcttttggcaattgctaaatactgagcttttctaagcaaactgaccaggtctcctgtaacctgagacaacaaccagggacttggctgataactaggtcgggcagcctttacactggagaaaagcaatgtctaccttctctcaactctgatatgcatttgaagtatatttccataaatgaccatcctctgccctgcactatagtragctggacagcttccttagggtgcctgccctaactgctcaatcaccatctgggctggactcacttstctgcctcagtatatcactggcatgtacctccctgttctgccattgtccaccactgcatctggctccctcgctagactctaagctcattgatggcaggggctgagtacttctctcaatgactttagtgcttggtacacagctggcacttaatgggtgacccagaggcagagtttctcacatcccaagtgtcatgacaccttctacgtaaaaagtgtttagtaactgccatgtctcttcctcccatgatgcttctttgtgcttatttctaccttcatgttcatctttctccctctctcacataaactctaattgaggccaatttcaatatgaactttctaaagtcaatattagctataaagacctggctaatgggctacctttgaggaatggaaatttgtaacactttctactgctaaattagctccattaaagatcactaataattagcactttaaacatatgggtaacgcctctctaagcccagctaatgagcaaccatttctgtttattcttcacaagatttaatattagtttgagttgagacctcagctgcaatacacacaggcttactcactcttcctcccgccctccctctccagaaaagttgacatcttgagtatagcacagacacaagaaaatggccacttcagaagtgattctatccacccactgtgtttgttttgaaactgattcctttctaactcaccaggttacctaaagtgctcatacatcacaggtagtggtgatagkggtagatttattgtcttttttgttactttaagcactgctgttggatgggtcctcaaagtaacagagaacattagcttgtcagtgattattatgatccaactgttgaacattagctgtgtatttgctattataatatatttggagagagttacaaaggcgccgaggggcagaaggtgtgtgctgtgcaagttcagacacagaaaagctttgctccttgggaccctcatctcagtccccctcccttttccccagcacaaatatcaataatattaatacttaatttaatcagggcataaagactagttaaacatgaaattgctgacttgaaaagtcagtttggggctctgtgattatggaaggcactctggcaggtatctaaatatgaaattgtccagcacctcttggatgcttctcccctcaaccacctctccaacccccatatgggtggcagtaaagtagcaatggctgaccacagagtttagggcrgaggaccctcacaggcagctcctggagcagaccctctcacccaagcctagagtttcttcccactcccacttgctctctttctgattctacaaccatgccactcctgctccagtgtcctcaccatgaccatcaatgagcaatgtcacaggaatacactggcacagactgggcacagttccaccacatacatggaacaaccaggaccaaagtaacaaccaggtttgcagaactgcaggtacggtctgacagctgagaagggacacatccaaaggtcattttactgaacaaactagcaaactaaagcaccctctccccactgccaggacatgtatgccgctgtccttggtcctgaactagtgtgacgttgctacttggagtggctgctgtccatgctgtcttaggatatgccaaccaaaagagaaagaggcagagatgaaagagatgttaagatatatcatggagataaagaaatgtgaagaagcattggagggatatacatacagagagattacagaagagaggtttttttggtattgttttcaagttattgtggtaaccaagaagcaaaggtctgcgtacgtacccgtacacgcacacacacacacatacacagatcccatggaaatgagatagcatgaaccctatatgtcccctgatacaatgttcaggtatctagataaattggctaaccatatctgatggattagccatggaaagattcctggagttttaagcaatttttgagtccctatttaagttattgccttggatatccaaacatatacaattcaattcagtaaatatttattgagcacctatatgtgtcaggcaaagttacaattactgtgggtacaaaagtaaacaatatagaggtcctgaccttaagggacttttaatttaaggaaagagtcagactaaccaacatgtaatttcaatatcatgcaagaaatataatatagaggtacacatgggggacaaatattcagataatccaaaagmgatactaaaactccagctctaaggaagtctctaaaatgtgaaaaagcagtaagaagagaagaggtaatggattatgggatcattayctaggtcctagattggacaagacaggtgatgagtctctggtgggtctaggagaagagaggagactaactaagacacaatgggattttcccaagacctagaccctatccataataacaaagagatgagttaatgtttgctggagataaacaacaaagcttcccctgtggacctagcataaccagggcccagcataagctagaaaatttgccatgattgggaaaacatttgactcataatgtctgctatttctttagaaagaagcataayaatgttaagtgctaaataggaaagaaggggtgatctgaatatctcatgaagccaaaatccttctccagaattctggagggtagactgggtaatcctcaactctactcaccagaggacagactaagttatacttttcacctgacaaactgaagcaggcctataaaccctgcctcaaaatgtatgtgatggggraaagccatgaacctcatgaaactgtacacaaaccattgcatatctgtccatatgtgtccatttttctgagagacaatctttaagtccagttgtcaacagattttcaacgggatctatgacaccctaaatcgttgagaaccaatagcctagggcagtcatagtgagagtctacaagttatcttgggttcaaaccactagatcctattttctaggctctgcctccctcacagcacactttatgacactcacggtttagctgaaacccaataccatggttgggctggcagagaaaaaaatgaaatgatttgattccttagctgagataaatggaaactgtggcagatggtagaaggtgaaggctgtctgaaagatcctgtgctgtaagaataagctttattagaggtggttctctctcattatggagctactaagagctggaagaactgaggttagttgaacacaaaatgagttttgtagacaccaaggcagtacatttccagtaagccttccaaacttatgacacccccgccattggagggatgacaacttgaccccaggcccttcctcgattcatgacactgtgtcaaggttagagccagcagaaagggtctgcaaacatgtttaacaagatctgctggagcctggataatggcaggataaggtttctggagtgttcctagtgaggctggcaccataggacacacctggccattacttgctcatcatgctgtcttctacttaagacagcaagctctcccaggacaagcatgtcttgaggggaaggtcacagccctgagtcaagcacagactttggacagaagtctgactcccagctccagtatttattagctgtgtgcccttagacagcttaatctctctgggtctctgttccttcatatgagataagaatacctacacttcataggctgttgtaatgattaagggaggaaaattgaaaaaccagacacctagctgatactaagtaaacataatgctcactcttctctgttcatcttgatatctctttcatggggcctgacacctggtagatgttcaataataagtactgaatatatgaatgagtgagcaagtgaatgagtaagtgaacggagtaaactcagaaaacggcagctaaaaaaatgcctccccagcttcccactgcataccagtaagctacactgctcacacccatctgtgtgggtcctctgaatttttattgtttccctctgctacccaatctgggctattcggcgagtactacaactactcctgctcccctacccaggtgccccagatgtaaaagaaagcctcctgttcccaaaggaagaccagctgcycagctgattgtgcatttgtccctcctcctgtggccagggggctatggtcaggggcatctccatgaccatagctgccagcagctgccagcagttggcaggccttgttccttcttttcccaactcctcttccccctgcccttatgagactgggttctacataaagatctacaggtcaaggtggcatttctgagaagcatgcctactgaaaacacatcctgatagcgaggccaccatctgagatgaagaagccaccacatctacctagtaggcagccttcagagccctgtggagagaggtctggggagagtaagtgacctgtgagtctttttcttagttggccttgagttgtcaggctgtagtaagtagggggagttcacagagaaacaaaagctagagaggttatgttacccttaacacacagagctaggtgtgaaggcacaggaaagtggtgaatacaaatccaagtgagttggatcctaaaatctgcttgctacatgtagaataaatgtccccaggttgcttagattctcagttccatgctctctgaaacgattttctcaccaactccccagcactcataatcctctcccagtaatcttagcagaagacctctaggaggctgggatatctggtcccctgctctttcagctccctggaaaagaggagtccttgccatgactagggagccatgagattgtcttgtccatggataaatgtgcatgtgaactcagaacatagcctatatgctaagattagaataattttaagttagggagtaaagagatttatratagctttatatatttcaaaaaatcagaaacaacctcaaatgttcaacctcagggatgtggttaaataaaccatatctactcaatgcattcattaaataygcattaaatattatacaagtataatgccttgggaaattttccggtatattgttaagtgtgaaaaagattataaaatagttatgyacamccatgtctcaattgtgcayacagtgtctgtgtttgtgtgtgtataaaaaccatatatatatacatatatatatgtacacagcagttatctctgaaaagttggattacagattttgttaatgtttaactttttttctatgtcagatttttcttatttattcttgaaataattggaaaagagcaaattccctcttttgtatattgatccttcatatatagaatatctgtaaaatattcatacacttaaaaagtttaataattaggttgtggttatgataacaagtcaaatagcattttaagagcaaccttatttaaagttcaggacaactgtgttacacagctgttcactctgcaatgtgatcctgtggcaaataagaaatggctaccactcatcacagatgaaattgtcttatgactaaaagaactgaagtccaaatgagctgtaaaagaaaactccatttttcattagggataattttccatgtatgcaaatagggtttatccctttgaaatgcaagatataaaagaagattcaaataaaataaaattcaaataaaatcacatgtttttggattaaaaagctaaacattatagtggatatctgttgaatgaatctcttagtaccccctatgtgccaaagggattttcaactagatttttacctataaaaacaaatagataaaaataattaaactttttttaaaaaagataaataatgggttgggcttgccctaccagatatgaaagtatattttttaaactcaaattattaaaaggtggagcagacacaagaattaacatacaatcaatggagcctgaaacatagccctaatacagatctggcatattttaaaatctaatggatgataaggaaataatctaaaacaatggaggaaagataaagtagtcaataaatggcactggaaaaactgaatatttggaaaagaaaaatccagttaatcctgacaacttcataccatacaccaaaataaaataaattttagagagattagagcccaaacctttaaaatgacattttttaaaaaaccttaagagaaaacatgcatggtcatttaactgatccctgaataagaaagagctctcaaggcacaaaagcatttaaagaaatcagaaaaatattgatggttttgtttctgtagaatttaaactatatgtcagattataaacaaaatttaaaaggcaaatgacaagctaggaaacgtgtatcaaatacgatagagaaaaaattactgctccctatttgaaaaatgcgcaaagaatataaatatacatttcaaaaaggagggaaaatggataataaacataagaaaaagcagtccacttaattagtaataaagaaaatgcaaactaaacaatgagatgttttaaaaatccattaaatttgcaaagattttgagaaggcaataatcatcaatgctagcaaggttcagcattaattacctcttcctgcctataaccccattagtgcaagtaaaattgcttcaaccttttcagaaagcaatttggtaatacgaataataataataatacagtgatctagtgatatcccttctgcatgtctatgtgaaggaactaaggaaaaaggaggacagatatttgcaaacaaggggtttcatgcaatactttttaatgtggccccaaattgcaaatatcctaagtatccaacagaaaggggatagttaagataaacttgaaataggtataaattaaatacaaatcagccattacaatttgtatttctgagtaatttttaatttcatggaagaatgctcgcaacatgtaaagtagaaattaggatactaatgatacacacactatataggttaggctaaatcatatcagattgctgagactcaacttttttttttttaaccttctgaaatagtgatttgatgtgatcccaaatatggacataatgtatttctggggtgtgagattatggggatatttcattttttttttacacttttctatagttttcaaactttctacaacaaatatgtattaaaatcaatgttgtaaaagtatataaagaccatgtgaaaaaaatatcccaaacttaaaactgtatgaatccacttctctggtttctcttttctagatttttataatcctctgccgctttggtctcttaaatgcccatgccttgcctcatttttgtctgttattctatttatttgcatgttctgaatttgctgtttgaggttaatccccagaataagaaagagaactctagaaaggctctgacctcagctgtcaatccctcttcctccaggaagccttcccaaaaaggcacaagagtcatgcagtttctatccccagagatggccctatgcttttcagtcaatagaggtaccacagaaggggaagcaagtagcctcctctccacttgtgttgccaccactcctctaaaatcgagaggcagaagagagccccgagaagcactgggaaaggacawgtcaccaagaggtatgagtcctcatcatgcagcratgaagactccaacaaacatccaactagaatataaagcacaatgagacactaggctggggtaactgggattacttctcaccagtgtgctgttggagggaggctgctgctgccctctcctaagcccatgggcctgtaccttttacctgtgagcccaccatagggccactgaattcactgatacaattaatgtgtagagctaataagatccccaatgaacattctgtttcttttctacaggctatggacatatttctgtatttgttcacatattgtactataaaatgattcatattactatttcaattttgagtcatttttcttatagcaataaagttatctcttgctttaaaatgccctaatcaacatctggaaggttcatcaatgtccacctcaaaaaagtgtaacttagcatcactattccttagtttttccatctgcaaaatgtaagtaacatctcataaggctattatgagaattagctgagactatgtgtgtgccttgtgactggtagatgtccagtaagtgctaggtgatggagtgaatgaatcaatgaagtgtctgaactgtgtgattgatttgccactgggctcagctgtacaaacctgggaacagccaaactgcagaaaccattcacaattcaagacacaattatccacatgctgtcagctcctgaaattgtagacataataacttagaggaaatgtgctgcctccagagagcatgctttgcaaattcagactacagcaaaggtgagaacattatagttcccacaggaaaaaaaattattcccttcaactctaaaattttagaattctgcgtttgtgcaaatggaagcagtagtcaaaatctattaatttccagctttgtggctgtaggattaaaatctttccatcaaaatctatatgtaaatttggaagcattcaccatccaactggggcccaggcatctacagagcaactgagtcatggttgtgggattgttccatgccaataacattgctgatgggggaaagaacactggactaggaatccgaagacctcagttccctttgtgtttttttcttctttctcccctttctggcctccattttcaaaaccagtaaaataaacgagccagataagatgacggctgaggttgtcacttccccagctgttccattgcctaaatctgctttgctgtagaagagataatggcctgcaaaaagttgaagaaaggagcatcccagaggagaaatgagaaccttagggataagaaccatgctggggaaataccatatttagtgaattgcaaaatgtatcattagtttatgtgccattaaaaaagaaaaaactgctgccaattaaactattacacaccataagctataagatgcatcctgatttcagagatggcaaaatgtagaaggaaaaagagcatcttagaatcaataaatatgggaactagtatttactgagtatttgttatattctaggcactgagctaagtgctttatacataytatttcatttaactctaaaacaaccctgtgaaataaatgcaagtataggaaagactagcattttatagaggaaaaactgagatacagagagcgtttacataatctgcttaaggtcatttaactagtacagagaagaggtaagatttgaacctacaactctttcactccaaactccatcttcttaaccctttactctctgaagaaacactggagcatctgataccaaatgaaaatgagttatttcatggtggtaagactgaaacaytaaaactgtcagaacatattaaaggaacttattaggatgaaatactttgaactaaagggaaccctggagatgatgtaatacaagcatatactttatagrcaaggaaactgaagcccagagggatgatgtgatttgcccaaggtggcatagccagttagtgcaaaagttaagattctagaattttgctaggtcatgagatcaagtttgcaagtctagaattttcagattctattcattcctttcttttcaagttctaggcattttcctatctctaccctataatttcttagtggtttctcyaaaaccacataggcaaattcctttagcatttcaggatacagttccttcaggcctgagatgcagagctactctcagagaggtcagggtgggtggacacaacagttagacatggatttttttttttttttttttttttttgagacagagtgagtcttgctctgttgcccaggctagagtgcagtggcgagatctcggcttcaagcaattctcatgcctcagcctccccagtcccactagctgggatcataggcacacaccaccaccacccagctgattttttgtatttttaatagagatggggttttgccatgttgcccaggctggtctctaactcctgagctcagacaatctgcccaccttggcctcccaaagtgctgggattacaggtgtgagccactgcacctggcccagacatgagttctaatctctctagttctgagaacccagcatgcttaatttctcagttccttgtggactcataagtaaaataaggctaataacaccaaactcatagagagacaatgtacatmaagtccctataaataatcaattgcagctattatagccatgactgttgaaggagtttagggcttttactatccccttatttttcttaactattggttatgatgatgatgatgatgattattattattattattattgagacagagtctcactctgtcacccaggctggagtgcactgatgtgatcatggctcactgcagccttgatctcctggtctcaagcaatcctcccacatcaacctcccgagtagctggtactacaggcatgtaccaccacacccaactaattttttaaattttttatagagatgggacctccctatgttgcccagattggttttgaattcctgcattcaagtgatcatcctgctacagcctcccaaagtgcttagattacatgcatgagccactgtacctggctggctcttggttctatatgaattaatctattttgcattttctaatctgaagtgcattttcttggctggagacagtggaagcaggagaacagggcttcttcatctccctctgtaacagaccatcttccccaagcagagagctaaaaccctgctctatcacaactgttcacaagctcactttaattgctagstttagttgagctatctgcccttcctttaactttgttatatacaaaaaagtatatacaagctctttaaaaatcaagattcttgaagaagtccctttcctttcataattcatcctgcttgtcttaaagggaaggccaatctctttccaaggcatgggcagccctccagacttacagcatttgaagctcaaggtcaaagcaatttatgttcaaccttccagccattagaggctgagtgccagtacaggaaaagccccttcytaccattttagggacctttgtgcttctagttacatatgtgcgtgttagaagacaatgtgtaataataaygctgcaggctgccaggagaaagcgcaggtcctcaagcggtgaggtggaaagtaccaaagaagctgcatggccaggatgtgggctgacttagtagttctactttccattttaaggacactgaactggsggggaaagcgtgtacccagtctcactgttaacaatgtctgtggaaagcccagctggtaaagccagcaggcagaccaagttacccctgccccactsgtgatcacttacctcacagaacacaatcaagcatcacatgagcccacttttcagctcctgccttcccaaggcctgcttactgttgttttgttcttgctgctttcgtgggactttgtggtagatgcttgctaccatttattaagggttacttcctaagtgcaggctcctaagtgctttgcatatctatattgcttaattctctcaattaccctaaggggtacatattgtttcccacattttatggatgaaaaactgaggatcagagaaagcaaatratgcacccaaggtcatagagctaggaaaggataaagtcaggatttgaatatgggtctatcctattccaaagcctgtgcatgaagcctcatacatatagatctgtctcatctagctcccaagtcaccctggataggacatatccagaacttcaatctctttagggttaggacatagccatgtttggtgcagcctcaaacacgctgtttgatgtgcctgggatgaatccccagcccccgagtttcgggacagttacaagacagagagttacaggacagaggtttctacctcagtttcctgctgagccctataattagcaacttacagctagcactgtgctctgaaaccccacctgtctatttagggccttgcccatcccttgccatacccctttcctggcaggggaaggagggaaggatgtctatgtgccgctagtcactgcctgggggcctgccaggaatggagtgatggcccagtaatgtggaaccacagactagcctgatcccgaatgtctcccccaacttgcaaactctggtgactctcccttgcaggactcctcaccttggatgatgatgctgacctgagggaaacttcttgtttgttgtgatgttccagtggatcccatgtatttcactgctgctgcttgcctcttccagctagcccaatagtcccttcactctcagccagacattctaccaaccccttggaaagtgccaacgccaatgttctgaggtgggaaatcagtcttcttcatgtaggcaagtgacaaaaacaatccacagaagactgtctgaggcattttagacaataataagtgactaaatggaaatgaagagtcccatgaaattccccatcccattgactgttaatgatgtggtaattataaacacaacagcaaatattattaccaatttcaagtgttgactaaaaccagctggtacactcagcaaagcactctagtcctggaaagtcctggaaactcatgtaatgctataagtctaacttagatgaaatcttagtctaactgtgggaatgaagctgtatttctcaacatgcaacactacccagaaaaccctatgcaataagcacaagaagtcgtctctggtgacctggactgacctatatccatagtggtgactatttccaccaatccatataaggttggtacagagattggccagatgcttaccaagctcattctctcttctgaagcacacgactgtyacatttcccaaccgcccytgcagytaggaacagttgtatgactgagctctggtcaatggaaggtgagcagaagtatcatatgccacttccaggactggctcataaaatcatcccacatgtatgtcctccacattctctcttctcatctatcctcggatggctgggtgcaaagtgttcagtggaggactctgaggccctatgagcaaagctactgaatagaaagggtaagtcctgggttgtcatcaaccaggaacatctgtaggagactatgacaagagcaagaaataatcttctattacgtgatctctgatacttactggttattacagccatcaacctatgctgaccaataagcagggaacactctcttattaatatcagggtggcaaactgtggagactgaagaaattgctttctatctctacctcaaaatcttatgtcaggtgttaatgtattttataaagaatacacatggtttctttaaaagcaacmagaatatgtcagtgatctaggtacaaaaacggcaggagaactcaaagagaaacagaataatgagcacaggggaggggaaaacttggaagaatttagataccagctgccagggatttgacaggtcctccattcttctccctaagagttcctccactctcacacctcttacaaacacacgtgaaagtatcaggtaaattttagagagcgatatgaacataaggtactatactgttattgttctgattcccaaatctaaatatttgaccttgtttttcaaccagttgcatctccaacctccagtaggtgtttccattaaatggtacccaaagttcaaaactctcccgctatcttctactctgtgtctctagcatttcagggaggggaagaatcatttgcttcataccatatgccaggcccattatagtaactgcctcattaaatcctctcatattatttcatgagatagatattattgtctgcatttcatagatgtgaaaactgaggctcatagaagtcaaatgatttgcccaaggtcacacgactgtcaagtaggagctgcgagagcgattttcatttgtgtaaaatatcacacctgattggagtgctccctaaaacagttatctacacctggtggtgtgctagagcctgcttgttctggtttctgagaactaattgtaattttcagaatttttgccagctcgttgttaaacaggttggtagcttgaaatctgctatgataggagtatttacacaatagaaatcagcaaatgttacaaacaccacaaccagggcttttattcttccctggaaacattrccagcacgtcactgactatgccttcctatttggaccagtatggcaaggcaacactatgtcctgaygctgttttgttggaatttcaggaccaataataaggaaataattcctggattgcagactttgcaaacaaaaacttgaaacagtaaaagcaaatgttacaagacacaagggaatgaggaagaagtatgtctcccttaacacagctcaaccttctgacagttccatgaggagttctcctaataagctgataagaaataatttggaaagaaaatactagttttaggtggggaggcagttaaattctggagcagtgcggaggacagctttggaaagaaagaccttagagatttagtttttaaactaagagatgggggaggcatcacaggtcccttgaggtaaattctaaaacagggattattttaaaaaaagaaaaacgtgcagttagcacattaatgcagcagcacagataatccaaagctgaagataaaatcacatgatgaattccaaagccaaagataaatgactggaatttttttctttgatctacacaacatttaacttcttgaatcaaagtgcatcttaattagatgagtatgcaccaatccaatatctggagaaaggagcatagaagcttatggagtggttacaggcagtaagcctgcattcatttctttttcttttaaagtaaacactccacatgtggagaataatccccatgtgaaaaataaagaaattagtgttttaatttgtagcccacagcagtttgttcctaaacctggctgatcatcccatttggtttagaagatttttaaaagtagaaaatttggtatctacatttatatttagattcaatgagtctaaagaattgtgtttgccagagctgaacagactcataaaagcataatgaacagactcataaaagcataagagcaaaacaataattgtggcaattaaagggtcctatgaagaaacctatgtaaggttgactggccagagaacagaaaaatacttagaacagagatctacaggggattcccatttttgaagaggttgcaattacagtggcccttcagtatacacagaagtttggttccaggacctccgcgtataccaaaacccaagaatacatactcatgtcctgcagttgaggaccctatggaactcacatatttgaaaagacagccctccatatacaagagcttcacatcctgcaaatattgtattttcaatttgcatttggttgaaaaaatccatgtataagtggacccacgcaattcaaacccgtgttgctcacatagatctagcaggactctgagtgtaaggtagaaaggctaattgccatttgttagctacctttggagggcaattacttaatgtctctgagtctcagaatcctcaactgtaaaatgggaagactcctgaattggtaggttactggaagacagaaagcacctatcacaattcctggcatagaggaggtcagtgttagttattgccctattattattatttttctttatcactcggctttgggaacattattccaagcaatacgtataaagccatggaagctgctgcctgggtccctccaacctctctcttccagcagcagcccatggcaggctccagcagtcccctgaggacaatagaagatgctaatcacagcaccagtagtcagaaaacaagatatcagctttagcctggctctgccctcaactcactacatgacctgaaacccagcctcctggttcccttggtcttaatttccatccccaccaaatgggcacaatcaaatagaacctgtcttggtcagaagtgctaatgaagagcccaggagaatgggttaatgagaaggctgactctcagctcagggataacgagccagactatcactgtccctgggagctttccctccctggtcagggagaatgttggcaccccaaactgctgcactgagtttcagctaattggaagcttgatgaccgatgacaccaggtttctgggaaacaaatgatctctctatcctcaaagttctgcagtgaggaggaaggaggagtgggaacttccccagagtactgcaaccaaggttcctgggggcagcacataaaacattaatggaacttgagcaaccaccagaactgtcagggaggaaaggaaacaagaaagctgcgagtggagagtgctgacggcccagcctgccagctggcacgacacactgcaaatgagatgcasacagccagaagggcagcaggatagcctcagaggaccacagcagcattgagagctccagagactctakaagattctcaggaattaagggaatcacattttgtactctccagaggggaagaggtgtgtcttgaagaaaaggtgatgaagcaaaagtatggtggaagggcccccattgtatctgttgtaagaaataatcacagaagggacaagcaaataccacamatggagcaggcaggctggaagggtggatagagagccccacagaaggtgaaggaaaagagaccaggaggaggaggaggagggagggttcaaagaaaattaggttacccgacttctcattaaaaaactagggtaggctgcacggtggctcaaacctgtaatcccagcactttgggaggcctagccaggcagatcacttgagcccatgagtttgagaccagcctgggcaatgtggtgaaacacccatttctacaaagaatacaaaaattagctgggcatggtggcacgcacctatagtcccagctacttgggagggtgaggtgggaaaatcgcttgagcctgggaggttgaggctgcagtgacctgtgatcgcaccactgcaatccagccttggtgacacagtgagacccagtctcaaaaaaacaaaacaaacaaaaaaactaaagtgaagtggctgccacttctctacacaaagagggaactttccagatcttcatgctgatgtttttcctaatgtaaaatttccaaatcacttccatgtagatgaaacatgccaagcacataaaatttcatacttgcaacctgagctagctctgaagctgctgtgctttcccctgcaagtgaagggaggtaggagacaggaagaagtgggactgattagatgtgacaagaagtgcttcccactccgccccagcatctggcccagcctggccccatcacagggctccagctggccccagactgctgagtgcatgagcctcgttttcagcagctgctggtcagggctccaagggccaaacctagctagagacatagatgtggcccaagtaaaagccacttctcccccaagacaggaaccactcccttagctgcatttatagacttaatttataagtcctcaaaagttaaacattctcaaaaagcaaacactcccaggtctatcacttgtttatgctcagtgtcctccattagattaggagcacccagggggaggtctacacatctgccttcccacaaggagctctaggaggatggagatcacatccatcaacctgtacagaccacagcatagccaccatacaccaagactttataaatgttttttgacgagaacagcattttaaatcctttttttttccaaaggattctatttcaggaagggaaaatttctgaatactagtgatgttttcttatttcctaaaaaagaaaacacacacaaagctccagtcctccaggggaagtgccaagacaytggagtgaccaggagctaagccagatggagtcaaggacagccattgttcctcctgcaaggaagggatggcctgcaccatgcagcatctccaccagcttctgagcccaagttcagccgggacttcccagacttcagaatcctacattaggatttggcagagagtcacggaaagctctaccataatggcttaaacaagtaaggtgcttatttgtcttaagtaagaggttggacctggcattccagagctgcctcartggtggctgttgtcttatacgtggcctttgtctcttggtcacaagatggctgcagaatctcctggcatcatatccccattctagggaggaaggagggtgaaaagcaaatagctttttctttggatggctttacctttatttaggaagagaagatcacccattggcttgtgcctgtatatcaatagtcaaaattgtgtcacatcttccttagtgccaagggaagctgggaagttaagtatttcactctctatccttgataataaaggaaggaaagaggtttttggaatagatattaagtacactaacctgcattatctatgccatacatacggattcacaaatcaaaaggacacttacaccaccctcccaagagggatggtgtagggtggctcttaatttctgctctctcaatgtgaaaagctgtgaaaaaaatataccccagacttagaaaagcctctcaggctcccagatgtaacccctcccatgtaacatgctgagtcacttttgcatgcmttctctcatgcattgttcaccacaattctctaaggcatgaactacagaatgaaagtttctgtccccctgccccaaatttatatgttgaaattctaagtrcgacgtgatggtatttaaagataggcctttgggagataattaggtcctaagggcaaagccctcatgaatgggactagtgttctttaaaaaagaccccagagagcccatttgcccctgctgccatgacacacagaaggcattattcatgaggaacatgccctcgccagacactgaatctgcaggcaccttgatcctggatttcccagccttcagaactatgagaaataaaggtttgttgtttgtaagccacccagtttatggtattttgttataacagcccaaatgaactaagacagcagagacgatttattccacatttataagttgagggagaggctcagaaagaagttacttaccaaatattccacggcttactagtggtagcaccaggttaggaacccagttttctactgtcaacccagtacttttttcattacaccactgaccatcttctcacactgcatacctgagttttgcagccactgctgcagccacccaccttcctgtttatgatgctagtttcccatttcaaaatttagacatatgcagaagaggatcggtcatggggaatctggcaaataccagagaaggttgaaaaaccttttcaggaacctcttactcttgccaaaagaacatgcatcttggtaggatgctctatcaaaactcacccacaagaggtactaaaaaaccaaatccaataatagatgatgccttccagtggccatcttgtmtatcttgcctcactccacccacctcaaacagctgaaacagatcttgacattctctaaagcttctacaattacccatctgatgtgtgttgctgtacaggctcatattgctcaggctagccacatacccctccaatggagcacttagatcgctgcatggtaattgcccggccactgttctgacttctgcacaagatcctttactctttaagaaaaaaggattgcatctaattcagtattattttctcagcatttagcatggtgattggcatatgtaacttcttaataaaaattatttgaataaatgaatgcaaaacatcaatccttcttgttacatttcttttttccctctccagagtataaaaggaaactagcttgtcactctcctgtgggtgcccaatttaggactccacagatcccagggaggacaaaatgtgggctgttcaacacaaatccagaaactctttaggatgcaagagtccaaggagccagaggtytaaggcattgggaaagatctttctgcatttctggggtggtgtggagtgtgtgagaagttgaggagaatgggctctggagccctggcagggagaattcttggtgcaaataaagcagaggaaagggaaatgggaagaagcctagactggaagcagcaagagtgaatgtcaggcatgcactgcagtatcaatgctccaacctgtgtctcccactcaggaactcagttcagcagtgaaacaggcagcctggcctcggcttcaaagtctccctatctctagcctttcaggcctttccttagcctccttaggtctgcagcatgccttactttgatccctggtacctgtcccatccttgctcctgactctctcctagcactgaccgatcacacaatctgggcctctggcttcctggtacttccagattctggctgaggccccatgatccattcccagcctctgctctggatccctcattcctgcccagtatagtccgcagccactgttgatggaagaaaacaatgcaggagccaaaggagcttctagagcagcgattcctaacctctctagagtcagtgacccctttcagaatctgatgaaagccacagacttttgtcttcgtaaattgcatgtatacatacatgcacaaaatttccatgcaattataggagctgaatggacctccaaaaaagctcactcatgaacccagaataagaactccttatcaagaggatgtcatgaacttttgtttgagggatgttgccctccctgggagaagcccctggtagctcagccaggcagctcccagcttatcctcccctcagggaagcatttgcaacagtgagaacacaaattgtctctttgagccctcccacctcagaagcctttaatgaaaacaatattgagcacttactgtgcggcaagctgtggaaaggcaaaggacttgacacgcattttctggaaatctaatacaataaacttaagttgctattatcccaatttcagatgagaaaaatcaggcttaaagaagttaagaaacttgactgtgttgcacaaatcatgagttatggagtgcagaatcaaacccagtgttgtccaaggtccatgtctgcttttctcagcaccacactccagagacttcccaaggttagatgacctctaggagtaagcaagggaaagttcctcttgccatccaaaatctacccttctttccccatttagcacgaagcttttaattcctcgatcagaaatctagctaaaaagagaagtaatacctcattgttatatgtctgtctctctgggtctgtataaatgtggtattgttttttaaaaatcatacagtgcctggagaattgcatatgggtccagagaatgaatccatggaagtcatttgaatcactaagtgtgcaccataagagagctgtgggtagcattctggtggaaaccatcggagagcagctgaaggtggggacagaaaagaacatgcagggggcatgtttggagatatgacgaggacaattacctggcagatagaaggaacatttctagataaactgcattgcaagaaaaacagataggaaggctcctgataaatccctccctatgcacagcagtatagggtctgtggtcagggcagaggacaagccctgcctgtcacgtccctgctaaagggctggagcaagtggcagccccttggaaacagcattagaatggtctatctttacaagatgtccacaagagacactgaggttgggctggagggtgaaccaggcagagaacgtgtgggaaagttcttgcccacaaccggaaaagtgttctagctagaaggatcaaggctgaggatgaaggcaagatgtggtttggtagaatctgggatctacgagacaagataaaatgaaaacaggataaactaagaagaaggagaagactgtgttctgggtgtttgtttataagtagcacacaaggcttgcttccagaggccagaagcaagggcttgattagcaagagggctgctcttgaataatgcacctgcagaaagtaagcatcttctccccagcatcatggatgttcaggaaaccaaataaaaacttacaatatagaatacagagacaaagtttaacatgytaggagtctggagttaccatgttattcaaagacagaattayataaggcaaatctagtcaagaaaatcattatggatgtatgcaaagggtaaacgacagggtttgcaatctttttaaatgaaaaaaaaatccaaaatgtccaacactaagagagtagtgaaataaatgatggtagcatagcataattgttgggtgtgtagggtctgaaatcagaatgcttaggttaaatcccaactctaccactcaagaattgtgtgacttttagaaaattacttaaattatttaagcctccatttcctcatctgtaaatgagcataatgatagcacctgcctcctagtattattacttagtacagggcttgatatattcctagataactgtagaacaagaaatcactcaataaacattcgctattagtagtactgccattatcaagatgcagccataagacagaatactattgtgtcattaaaagtaatttccagaaatgtaacaacattgaaagatgttcatgaacaatgtgtttaggttttaaaaaggttataaagtgtgtacgctttatttttgtcatatatatgtgtgtatgtatttagatgatcaagaaaacaaaatgaagatttagaaataagtagccaagaagaataggaaactacttttgccctcagaaatgaagaaaagaaagaccaacttcaatgcagccaaaaaaagctctaagggaaatgtgttcctgaggaatttctttgatatgagcttataaaaaattcctggctgtcactgctgcccctcctccaccctgcccttctctcttcttctgtctgtgatccaggatctgagcctctccaatctaggaaatggcagcagcagtccccattattattatattatctgtaataacagcagtaagacttctcatgggaagagcacctcactttttttcagagccctcacatacccaactggcctttaaaacaacctcagcagtgaacctgaaaaagaccccacctgcagcttgtctgagactaagatagacaacctaataagggccaggaattaaatgataaatcagggatgcttgctttggccacaataatcagaggggatcatgtacattgtgcaaacatcactgaggggcaattctaggggttctcaattaagacaagtggggtcacggaaaacaccctaatcctttcccatttattcccattattcagagtggacagttggggaaagagttccaagccctgaggacaaagtcggtgatgaaagatccctggtgttccccctttccctctgtgaatttcttccttctcccaaagcaaaagagcgcttttgacaagaaccaaaacaattatagaagtgcactagagtgcaggtgagtttgatgcaagcgtctgaaattagatttctggcaggtaggcaggcctttgcagacttcagcagctgtccttttgtgcagaaacatggacaaagcaccccatgttcagctgctaaactcagctcctcattgttatccaaacaatggagtcaagaggtagatgagagtggaagcaaagataggctcttgtggagccaattctatgcccatagaatccaggggcatggttcagtgaggttctctatttcaagaccttccccttttagggcaggttggataagacaggtgattctacatggcccttgaggaggaggggaaaaagatttcttccctcctctcaccctgacagcacacgggagcctcaggacgaagtgccacaaatgtggacatgctttattatggctcttagaaagtcagacccagctcctcaggaccctttccccaccagtaacaaagtacttgtacatgctccatcctttgatccttccaacacaggagctggcaacctatcagtttagcaaaggcagcatcccaagaggtaggtctcataggaggtcttaagaaaggtaagttcatctgtggaaggaggaatgaggccttgtgaggtctggcaagcccccatcagcttggctaacctccaggagagaagttcattaatgaggggctatagtaaaaatgtctttgcaccctctgaaagagtgtatgtggtttctccctcttcattacttcttttccccaaatctctgctagtagtaataagccaactttgcaaacagattccaaaggtatttggggccacagacacttgtaccaggcctataatatttgcaacaattacatataaatgttctcatacttgtcattctcccatcccccctatacctaccatcactgccttctcttcctaaaactcaggtctaccagctcagagtcctcaaataggtgtccttagcaaacatacttcatttctcctcagcatgcaacccttttctcatggaacagcagataagggcccacccagaaagggaacagggccaagctgaaatctgagaaaccacacggatccaagggctctggcagtacctggcatacaaggagcactgggagagggctcagtgcccttgggttgagctgcaccaggagatmcaccttcaaatactaactcagatactaacttcccctgtcttagtagggcaagccatttatgctttcagtaacatgaaaatggagttttagctatagttaataatccatagcaagtgtttacatggaagttattcatttccatcctcacctgggggaatgtttaatccttgtaggaagaaataagattgaactcttctgactacagaatttcattccatgcagtaggtagttctatcactaccaccaagaaactgaagcctcgggaggctcgtaacttgtctatcatcacagaactagtaaagatgacagagccagaactaagacccaggtatgcttgacaccaaagcctcctaaccctggagttccttccgtctcctccagacctaccagaatcctgcccatggttcactcactattcagatcatgtcacaggaagagacttttggggacaagtccagcccacatcgatcgctccctcttctgctcttttattatactcattgtctggagcactccacctagcaactaattttttggaaaccttctcttgctctctaattgcttcataggtgttctcttggcttcctaaccagtctctgtccccagatggtttcttccctcagttctcccaccataccagggttactgtaagcactcagtgaatatctgttgagcaactagtttgagagatacagatgcaaagcctagttggaacactctttttggagtacagaatttcataagtcagaatcctccctaattctacctttttagttcctttcacaagttaaaaatgatacttataaagagttcttaaaaaaatagggaaatgcttatgataaaatgtcaagctaaaagagactggatgcaaaaatagatatactttgtgagctcaaactatgtaaaattgcaaaaaatattagggaaaatatattaaagaaaaaagtgaaacaaagactcgagggcatataccaaaggttaaagaggggtcatcactggcaggttggactctgaaagatggctattttttcatttagttttgtgtctttcttttggaaatgccataagttgtagtttaaagaaattccagaatgaacattaaatttgattgtatatgtagaaaggagtatagtaggagtgaacttggaaatagggaagtgttaagtggttcattaaattaggagaaaatattaaaagagtacatctttcagggtccacccagaaaaacaaaaatcatactaagaattaaaaacatactagattcaattcaggaaatagcttatccagatgacaggagagctaaaaagagagtaagaatgtagaaaaagcccagagatgaccaggaaccagggtcataccatggaagctggaaccaggacagctgagcctcatttcttcacccataaaaatgtgggagtgagagaggctgaggaaggatactccagttccccgctttctttccactcttcaatctcccaacagggctttccgctggctaaactctgccagcagccaactttcatggagcctgggaaatgcagtctacaggggttggcaccctgcaaaatggcaggacagaagttgggatggatctgaaggcaaacaggcccaggaccaacaggaagcaagtaaacattagatcaaatatcagatagattctaggtcaggtcaataaagaatagaagtacatatgctgacaatttttggggaatgtaagttttatgcatatgtaattaactcaaggcaaacaatgcctagtttaatagttaactcatggtatcagtgtattactttgctagggcttccataacaaaacaccccacagactgtagcttaaacaacagcaatttattttacatggttttagaaactagaagtccaagattaaaaggtgtcagcaggtttggtttcttctgaggcctctggtttgcagatggccggcctcttgctgtgtccttctacagcctctcctctgtgcacacacatccatggtatctctttgtaggtacaatatccccttttttatttttatttttgtgggtacatagtaggtgcatattatttacagggtatgtgagatgtttggatacaggcatgtaacgtgaaataagcacatcacggagaatggggtatccatcctctcaagcatttatccttcgagttacaaataattcaattatattctttattttaaaatgtacaattgagttattattgactatagtcaccccattgtactatcaaatagcagttgttattcattctaattttttgtatccattaaccattcccacctccccgctcccttcaaccccctactacctttcccagcctctagtaaccatccttgtactctctatgttcatgagtttaattgttttgatttttagatcccataaataagtgagaacatgggatatttgtctttctgtgcctggtttatttcacttaacataatggcctccagttccatccatgttgttgcaaatgactaggacaccaatcatatcagattagggctcactctaatcacctgtttaaaggcctcttctctaaatatagttacattttgaggtactgggggttagggcttcaacatatgaattttaggtgggacaaaattcagcctataccaaccagtgtctcccaaactttcctgataacagtagtcccctagggggtcacttgttgaacacacaggttcccaggcccttcacctggagatatggtttgatctgcccagacctagtgttgtagattaaaaatggccacaaattgttccctagtcctcccattaaaagacagagtctaattcccattcccttggatctagattggctgtggtggcttcattgaccaatggaatggagtaaaagagacattctgggactcctaaagccttacagcctctgcccagtgcccctgaaacattcacatttggaaaagcctaccaccaaataggaagtctggctaccctgagactaccatgctgtgaggaagcccaagctagccatgtagggagactatacagagagagaaaaacaaagaaagaaaaatagccagcccaactgttcctgcccaggcatcagatatggtattaaaaaaaccatcttagacattccagccccagcagacacaatgtagggggagaaaaagaaggcagcttgtgatattgtggaaatattaatatatgtggtctttgtcctacctcctgacatacagctcctaaaacctttggaatctctcaagtgatagtgtcttttgtgtgctaacaagatgactggtggctgggggcccctaggcagcttcaggatgggggctggccactggaaagaccaaagcatgattagaaggttgggactttcagccccatcctgcaacttcaggagtggggcagggagagggaataaaggttaagttgatcatcaataaccagtgatttagtcagtcgtgcctatacaatgaagactccataaaaagcccaaaaggactgcctcagggagcttctggacagtggaacatgtggaggttccttaagggtggcacacccagaaatgacatagaaactatttcccacatgccttgccctgtgcatctcttccatctggctgtttctctgtatccttttagtatcttttataataaactggtaaaccatgtctccctgagttacctgaggcactccagcaaattaactgaatctgaagaggggatcatgtgaaccccaatttttagctggttggccagaagcacaggtcacaacctggggctgatgattggtatctgaagttggggacacttagggactaagcccttaatctgtggaatccaatgctgcctccaggtagataatgtcagaattgaatttaattatagggcacccagttggtgtctgctgaagaactgattggctgctggtggggagaaatccccacacctttttctgtgttgcatggtttgtttgagactaggaaaaacattttcattttcctatctctactgtaactacagacagaactaaagccccctacatatggccctaatacacctttcccacccattccaactgttagagccatctcagctaaggtaccaagcattgtggagcaaagataagtcatcttcactgtgctctgcctgaattcttgcggtgcaaaattatgagcataataaaatggtggttgtttatgccaccatgtcttggggtcagaaatagataaatgaaacgcctggctagtgttctggcagtcttcagtggcaatctggtcaaaccccaggctcaattaagattgtgctccaatgcccacagatgaatgcagaaatagtgatggtgggaagggggaaggtagggtcttgaggataaatgatggtgctcagacatataactccactggggagaacatcagaggccctagaagggttcaggggagcagtggggggccagccatacgaagctccctgcttgtttcagcttctgggctttcacactattctttgcctatccgaatgtcctctgttctttccttcccttctcttcttcatcctagtcctttgctgtctttcagccctgttcaagagttgcttcctgcagtaagtgggatctgacctgcttctaattagtctcatttcctacattcttcagtgcctatatacagaaaatggagaaataattgtcgcttggtaaagtactttgtgaactgtgaagctctgtttaaaagttcattctataaattctcgcttctatgttgcttttttttttttttttttgacagagtcttgctctgttgccaggctggagtgcagtggcgcaatcttagctcactgcaacctctgcctcctgggttcaagtgattctcctgcctcagcctcttgagcagctgggattacaggcgcatgccaccacacccagctaatttttgtattttttagtagagatgggttttcaccctgttggccaggagggtctcaatctcctgacattgtgatccacctgcctcggcctcccaaggtgctaggattataggcatgagccaccgcacctggcctaatattttgtattattagtagagacagggtttcaccatgttggccaggctggtcttgaacgcctgacctcaggtgatccacccgcctcggcttcccaaagtgctaggattacaggcatgagccaccttgcttggccctctatgttgctttttacacactcttgcatatatgacacctccagagtcaagaattgatggtcagagagaggggtatttccacttgctgccttcatgtccctttttcaaaactcctggaatccattgcatgttctgaggtatgagctgacatcacacacaacagcaacacttgcagacttcgatgtttacaagtactttattagtgtctcagaacactctccactccataccaamactaactggcatgttcaatcttccctggaacatgtggtacatagtgagaagaggtggatagcttccactgctggaagaccttagatgttaaatgttgggaracagttctccacggtctctgacatttctgcacatcttataagcgagaccctgatagcttttgttccagattatctttccaaggatgttcatatagtgaacagacttggaagacagagatattgtttccctctgaggcaaagggcagatttgtttactgacaagtataagaaagataatgcctccgccccaggacaaagcagatttgtttgtagcctcttgtaaaaactggaatttcctaagctcaaagttcctcaactataatgcaaacccacagcacgcgcagcatctacctgggcccctctgcattgctactgtgggacttgggggtaagaagtacgaatacaaatatgctaaagttcatgctgcctgctttgctgtgagtcattaagtcctttgtctctgatccaggagtctcataacttctgccagcatccatgaaactgtggcaggctaacttgttagctagcaggtagggtaaatctcagaccttgacactttacagttctygacatcaggtaatagagtatacatgcctcccctctgaaacacctgctccagcccctctcattctccctatccaaagtacttccttctatcatactcttaattacaagacccactgcttgtgctggcacattacaagagacgctgaagataaatgtaattaagtgagtaatctgggtgctagacaccaatttctrtcagaaccagccatgctgaggggataatgatattaatgatagcagcttttgctctgaagggaaatcttttcaggaatgtccttttccctacagagcttctctcctccaccacccttgcgcacccctcatgactattttcttgctgtctggaatgttcacatcctctaatccaatatctctactgcagaatctaaattatctgaggaccttttaaaacatgcagactcctcccccaaccccagacctactgaatagagtctctggtggtgaggcctagcaatctgcatttttwaaaaagtgccccaggtgattcttgcgtacgtttaagtttgttctaaatgctgggggctcaactctagctgcacataaaaacataatgcctggctgcagcctgaagagtctcaataattgttctagagtagggcccacacgtgggttttttgtttgcttgtatgttgttggtttgcttcatttctggggttttttaaaatgtttccctaggagattccatttgcagtcagggttgaggacttccagtttatctaccctactgggacagtaaccaggtgaaaatgcacatattgaggacttttccctaatattcctttgctcaaacatcctaattgcccttcaacaaagccatttagtcttcctccttcaaatatgaatcttaaaatctctccccacctggtaactctctaataatcacttacaacagaaatctacccccacattgtagacttaattggcctgttccctttcttttatttcaccttggcactctaattaatccatttatagttcatctatccatcaatccatgtgcaccttgctaaagatactttcagaaacaactgggtttctcctggctgattactctgccattcatggcctctctcctctctgcccctccccacagcacccaaatctccaggggaatagaaacttaggtgaagatggcctttcataccagaggcttagggacttctgccaatagagactgaacagctgctgaagatccttgcctcaccttcctgacatatgccctgtgtttggatggtgtattagtctgttctcacacagccaataaagacatacccaggccagatatggtggctcacacctgtaatcccagcactttgggaggccaaggcaggtgggtcacctgaggtcaggagttccagaccagcctggctaaaatggcgaaacccccgcctctactaaaaacacaaaaattagctgggcgtggtggtgggcacctgtaatcccagctactcaagaggctgaagcaggagaatcacttgaaaccaggatgaagagtttgcagcgagctgagatcaagccactgcactccagcctgggcgacagagtgagtctctttctcaaaaaaagaaaagataaaaaacaaagatagttcaatctacatgtccaggtcctaattactgtgtctttcagcaagatatcccacccgcaccaaggtgagctctgagcaatgctgccaagtcattaagatcccccttcaaaataaatcacctgcataattcagcatcattcccatcttctacccctcctcccaactggcaaacaagtgtcccatcacccctgtcaaaaaccctgctcaggaggaattggatacactcaggcttggaggactgatgaggcctcaggagcaaaacatcttaagtcaaaggaacgagttactttaatggttgaaatttggactgtgttgaactgaaaggaatgattccctaggggaactgtgagagggtttttactcctagggaaagaggaacatgtttattggccttagctccctgctgatgaacacataaactagggaagttgtagatttcagtatttcatccagtaaataactggacacctgcttaggacaggttctggttgggcactgcatggattcagtagtatatatgacaaggtctcacctctggaacttaccataaaaggcaatcacactttaagatttttaaaatagcatctgttacacatttgctaagcattgcttctaatcatctttaacttattcactcatttaatccctactacaaccccatggagtttgctgctgctattaccctatttacatttgggaatgctgaggaacagagaagggaaataacagaaccaggactgaactcaggaagcctggcttgagaatccatgtacctaaccactggggtaaatgtcttcaagagacgcctgacacacaatatccaggagtgctatgctcctcaagggcggccccttctgaggctgcattattctaagggcattgctgttcctcagaggagtcctgtatcctctctctaccaactttccctcaaggtcttatgaagatactccactgaaaacatcctttttctctgatgaagaaaccatggtaaaaaagctgggccctgaaaccaggtaacctgattccagctcaccatgaaagtgtgactctaacaatgcctctgccactcctaacctgattcagagggcaattcccttgacccaggggcagataccacaggtcttcctccatctcccagcaactggcaccacccagcacctgcctgttgcactgaacctgcttacaatccaggtaaaaacaagtataccagtggccttgacaatgaaaggggaggggcactaccaccctctcagtgctaggctgacaaatgacccttgagtggccttggtctacctcagatcctcttctccctctccccacctactttgcaggtttatgaggcagctccccagagcaaggcagaggacaactggtgccatctatgcaccaggttcgcctgagctgaaggcatctcatggtgagactctgaccagaggaacaggaaggaacaaactctggagcaactactgctcacgacagagtcagcaccagacagacctgccaaggaaggcgagtcctcaaccttggaggatcacagtggatacaatccagcacagaagccccacaatcacagctttaattagagctccgagagaaagacaaaggtagcagggaagagaggaagcccaaggtggtcccttttctaactaggaagggacagaaattcaagctgcctagaataaacatggggcccaagaacaagctttggcccgaagcttgacataagttttggtagcttgttgcatttgttagaggttaggtgcagtggctcacgcctgtaatcccagcaatttgggaggccaagacgggcagatggtttgtgctcaggagttcgagaccagcctggccaacatggcgaaaccctgtctctactaaaaatacaaaaattagccaggtgcagtggcatgaacatgtagtcccagctacttgggaggctgaggtaggagaatcacttgagcccaggaagtggaggttgcagtgagccaagatcacgccattgcactccagcttgggcaacaggagtgaaatcctatctcaaaagcaaaacaaaacaaacaaacaaacctccataaatggggaaattaagatggttgctagctatactgaactggctcctcctattcatcatttaaatgcattcatacagatccacccttcaaaatccctgcttccaggctcatccccacctatctgcccatgtctaagacatactattactatatacaaatcactatttgttcatttttttaattcaacaatcatttattgggtgcccagtatgtgccagatgataagaatacaaaatttggctggaagatacatagttccagccttctgggtatctctggtctattgcggtaaatgaataaaagaaccggaatataaacataagtgctacaatttagatctacatcacacaattatagaagtgagggcaggagggtcaggaaaggcttcaaaggggagttgaaaattgacctgtgtcttcaggaatgtgcagttttatttcagcagtagggagagaatatgataggagaggttgtaggcattgctgtcttgcagggctagaacacaggggaagaggctggggatcaaggtagagctaggctaacgagttgggaatttattccacagacttactacacaagcactgagaagcttaacccaaaggaatgacataagatttgcattttagaattataatacctaatgcttatgtaatacttacattcttctaagctcttcaaccatattaattcatcccatccttacaacaacattatgaggtagtattacaattaatctcactttacagatgaagacataagggcacagagtgacttgctcaaggtcacagagctactaagtggtggaggcagattaaaatccagatccatgtgactctagagccaaagtgctcacactatgctctttccagcctccatgcctgtgttcggtttgtctagattggaacaaccttcttccttttctgagaactccaccccatttttaagcagcagctcacctgtcacttccaatatttcttcaacatataattgccccttcttctgtccccacagcaccatatgtatggtgattatggcattcattactacattctgatttgtttgtatctctcttgacctataggattctgaaggagcaggtccatcttttaagtcctcagtccttctccaacacatttcctggaacaaagacatttttaaagctatacaagattaatgaacactttaaaacaaaaatgccctcggtactagtttgctaggactgccataacaaaatatcacagactgggtggcttaaaccatagcaatttatttggttgctctggaggctggaagtccaagatcaaggtcgagcagggttggcttcctctgatgctcctccctttggcctgcagatacagatggctgccttcttgttgcctcctcacacagttgtccctctgtgtcccatggtgtctgatatagtttggatgtttgtccccacccaaatcttatgttgaaatgcaatccccagtattggagacagggcctggtgggaagtttttgggccatgggggaggatccttcatggcttggtgctgaccttgcaatagttagttctcatgagatctggttactgtaaagtgtagcacctccccagcctcttgctcccactctcaccatgagagatgcctgttccctcttcaccttccaccatgattggaagcttcctgagacctcaccagaagcagatgctagcactgtgcttcctatacagcctgcagaaccatgagccaattaaacctcctttcttataaattaaccagcaattataaaattgcccagtaattaattaaattatagcaatgcaagaacagcttaacacagtctctctccatgtgccctaatcaatcttctcttcttataaggccatcagtcagattgggttagggcccactctaacggcatcattttaacttaatcacctcttgaaagccttatttctacagtcacattctgagggactgggatttaggactgcaacatatgaatttgggaagggcacaattcagttcacaacaccctatatatataatatacaaatactcaatattttgaactttccagctcctcttccccaacactttatttttctttttatgtgttttcagtatgaaaatctttaatgaggaagaacagatgtgaagatgcggttttggtcagcatagataaggagcacttggaacccaggcataaagcacatctttcaggtctggaggctgatagtgagatggttaaagaggcactagatgaagccagatgggtctggggcaccagatctctcaatctcctgagtctttttcttggttaatactccctgcctgtggcaaggagactctggggaggcccccaatgatcctctctccttgagtatatactggctttgtagcttgcttcttaatcagtataataaggcaaaggtgatgggagatcacttctgtggctaggctatgtgcgactgtggcttccatcttgccagaggattctctttcttgctggctttgatgaaacaagctaccatgttggagaggcccacataacaaagaccagagatcagcctctgcaacaagaaactgagaccctcagccccaaaacccttgaggaactgccaacaaccatgtaagtcaagtcagctttttccacgtaggtcttcacataagactccaaccctggacgatatcttgattgcagcctcctaagagaccatgaagcaggggacccagaaagctgtgtctaaattcctgaaccacagaaattgtcagacaataaatgtgtgttatttcaagccgttaagttttggagcaatttgttacacagcaataaataactaatacacttcccaaaaagtcctctctctaacctccaaatatttrctgccctattgttttaatttctgaccaactaatgtcttccagcatccacgtttgtatttaattcccttcggataattttatcttgtatataattttcatcagcttgattttgcctactgcaaaagaatagagtcactataaaggcacgccagggacactaacatggaaatatccaaactcaggttggtaacaagatgtttatccctgatctgctacaagatccctgtaccctgtacctaaaacacatgggaatactcactctaccacttgacttggcttctcttttctgtttcctccttccccatcagagaagagatgctgtgctcctgtccctcctaggaaccactttccactacaaacagtgttgcacagcacattcatatctatcctaggcctttctgccttccttctttcctcccaattccttccaaacgactgcagcaaaagattcctctccctcccctccacgttctcctccctgctttgttctattttagagccaaaaataatgctaatcatggcagataagtgcaagattggtgccagggatttacacctgcatcaggaaaaagggagagccatgcatttcgtagtaaattagagctaataatgaaccaaagccagcaacttttaaagcctttaaaagcaccccaaaacctyacctcctcatcctctaatttaatttaacctgcttctgatcatgagcagctttccagaaaaaaatgtaataggactcttgcttggtgtggtttttgctatgattattaaaataatgttgctctctcctttatgtttttttcattgtaacttatgatatgagttattttgggtctagcctgggaatgttaaccatcacgcataaatgtggatttttagaaaagcacaagtgcagtctccattgcccaggctggagtgcagtggtgagatcttggcttactgcaatctctgtcgcccaggttcaagtgattctcatataacagcctcccgagtagctaggattacaggtgcacaccatcacgcctggctaatttttttttttttttttttttttttgtatttttagtagagatggggttttgccatgttggccaggctggtctcaagctcctgagctcaagtgatctgctcacctcagcctcccgaagggctaggagtacaggtgtgagccacccctagaaaagcacaagagtagttctgatacctgacttattaatggatttttagatataacacacttgtaagttggggtcagatacatacagagtgaggacagtgttgttcattacaggaagtggggtgagagacagagatgaataaacgtgggcaaggggccatggagaactcggaggaaggagagcagagagagaagtgggctgtgtgggaaaagagagccagggcaggggcatgggagggcaacctttactgagtagctaatatgtgagggtcactgagctagagatttctcatgttgctgtagtgaatcctcatgagtccaacgagggaggtcctcttctgccatttaagagatggctgcttcttagagagtgtatacgacctgctgaaggtcacacagctgataagtggtgggccaagattccaacttgggtctctctgaagatctggcaaggaccttcttgccagttccctgtgcaccttcttttcttttcccttctttttctaggttagggaagagggagaggagtcgcttattctacctttcttgatgaaagctgggggaaggcaacactaaagcacatggcagaggaactctggggaaccagaaagtttttatttcctaatggaaagctctatagccttcaaggtaggagctggaggatggagacaacaggtctagaactgctcaggagcactagaaagagaaaaaccaggcactcgtgccaaaagttgctacagcctcctttggcaggtgagaaacaaaatagccccagtggggaagggcaaaggcaaggtcagcagctgagaagagccacagtgatgaaaccaagaaaggttgaacatacccccaccacamaagcagttaccccaggctcaagctcagcattgttctgatcaaagtttgtgtcaatgattatggttagtggacaactgatgaaaaggaagctatacaactatgtatctcgggcattcattcctttaaaatgtttgctcaggaagaattatagtagtccccccttatccacagttacactttctgcgatttcagttactggcagccagcctcggtccgaaactaggtgagtacagtacaataaaatacattagagtaagagagaccatatttgcataacttttattgcagaatagccatgcaccgcataacaacgttttggtaaatgacagaccatatatatgatggtggtcccataagattatgatggagctgaaaaactcctaccacctagtgacatcatagctgctataacattgtagcacaacacacacattactcacgtatgtggtgatgctggtgtaaagaaacctgcactcccagttgtctaaaagtataacacatacaattatgtacaatgcatatttgataataataaataacaatgttacttgtttatatatttgctaaaaaaactggttcatatatttgtttaaaaagttaactgtaaaacagtctaagcaggtctttcaggaagtattctagatggaagcattgttaccataggagacaacagctccatgtgtgttattgcccctgaagaccttccagtgagacaagatgtggaggtagaagacagtgatattgatgattctgaccctgtgtaggcctaggctaatatgtttgtgtatttatttgttaaaaaaaaagttttaaaagttttaaaaatttttttaaagaaaaaagcttacagaataagaatataaaaatatttttgcagagccatacacctattcgtgttttaagttgtgttattacaaaagtatctataaagtaaaaagaattacaataacctaaggttaaacaaaacatttattaatttttttttttagagacagggttttgctctgtcacccagcaggctggaatgccatagtgtgatcatagctcactgtagccttgaactcctgggctcaagcaatcctcccacttcagcctctcaagtagctggggctacaggtgtgtgcccccatacccagctaattttttaaaaaaatgtttatagagactgggtcgttatgttgcccaggctggtctgaaactcctggcctcaagcgatcctcccctctagacctccaaagctctagaactatagacatgagccactgcatctagctaataaaaatatttaaataaatttaatgtagcctaagtgtacagtgttcataaagtctggtagtgtacagtaatgtggtaggccttcacattcactcaccactgactcacccaaagtaaattccagtcctgcaagttgcatttatggtaagtgtactatacaggtgtactattattaatcttataccatatttttactgtatcttttctatgtctagataggtttagatacatgaatatttatcattgtgttacgattgcctacagtatctggtacagtaacatgctacacaggtctgtagccaaggaatgatrggctataccatacagcctaggtgtatagtagtctgtaccatctagatttgtgtaagtacattctacgaggtttgtacaatgaaattgccttatgacacatttctcagaacataaccctgttcactaagtggcacatgactataattcttataattgttgtatttttaaattagttattgttaatctcttatggtggctaatttataaattaaactttattataggtatgaatatagaggataaaacagtatatgtagggtttggtactatccacggtttcaggcatccactgaagttcttggaaagtatcacccgcagaaaaggggaactactatattttccttttagcacttgcttagtgttccttaaacatgacccttttagtaaagaggtatgttgtagatacaacaagagggctatgaaacatgtgttcatcttttatctcaggtaggcatttgggtgccactgcttggacctataaatccaggtagaacccgggtttctgccctttgaaagagcagcccaggtggcactgatgcaagttgtccagatcacactttctaaaacacttgcatggaccaagtagctatggtaaagtccacctattacccagagatccatggattagattggggctgatttccaagagatggggcttaggaaactgggaaaactgcagaggataaaaagaaacttctgggctactggccactaaaatacagcgatctttagcatggtaggaaccatccctccccagcacakcacaatcatcttgtcaatgactccttatgacccctaccaaagcttctgactcatttgggaccccccaactccctaatattcctccaaattagctgccattcttgatgcttttactagactatagccagtccaggattttacaagacaccaaaaatgtatcaccatgtgggtaatctgcatggatattactgagcctgaaaaatgatcacttcaccaactactactgcagggcttcctcagggtgggttccctgggaactccagtcatcctggtccatcttctccaggtgatcctaatataatccaggctaagtcactgttctaggaggtaaaaaacaactgaaaagacttgctgttttaggaagattgatttggggagctaaaaaggagtaatgccaggttaccctggatatttattgtgtttaaaatgcaacagagggctttgcctgagtccacacttgccaagcaatagtcttgcccggagtgtttgagaaatggcaggcctgttcttagagacaacacacgcagagttctccatcctgcacagagctgagtcctcagactcccaggccctgtgaaaaggaagggacagagaataaagaaaccccattaccatacttgccccaggcagtgatgcccaccaggcatcctgtccacctctaagaagagatagactgccctctctctcttagtcttcttagtgtgcctcttctcaggaaaggtcaggtgatccttgctaagtgctttgagcccttgggacccaatgggcctctctgccctgggagtctgacaggaaatcaatctgctgtctcctttgcattgcgaatagtgtggatacccatcaggtaagaggtaatctccaagttccctcccaacaccaacagtctgtaattccttttagccaagacctaaggatgcctatttaacatgaagcaaggagagaactaatctacagttagaaaatacatctcccaaatttccttgaaaacaggagatagcagtgctatgaacaaaccagacaagcagagcacctaactgaaccttgctttgcatcaaaagaaactgagatcagactggaaaaatgacttaaacacaaggtgatacagttgatggttaagcttgagttggagccrggactcctagcttctcctgcttgtctccctccacagtttgggtcagccaacttcggcttgacagtgcataccctgacttttggcacgagcagctgctttatcctcttcacagtatttggttccaattgatatcccaaagtgtcaaaatccctgagtacacaccagtcaacggtgaggactgagaccatggccacagttgggtggcagagagaagccaatccaggattttacaagacaccaaaaacgtatcaccatgtgggtaatctgcgtggatattactgagcctgaaaatgatcacttcaacaactactactgcggggcttcctcagggtgggttccctgggaactccagtcatcccgttccatcttctccaggtgatcctaacataatccaggccaagtcactgttctaggaggtaaaaaacaactgaaaagacttgctgttttaggaagattgatctggggaagctaaaaaagagtaatgccagaccagagaggctggtcagggggctttgcaggcacctacacaaaaggtaaaaaggcagggatgggtggaaaggaagagatgcagacaagaggttataaaggggggctactgggtctaaaacctaagatgaaagagccccagaagagagaaaatcatgaaaaaactcaaaattttaggtcttgagaaagaggggcaatgtatcttgaaggagaggctgagtttaattttagacatgttaaagaagatattcacatagagtctcagagaggacagctagagaatagaggctgaaatctaaaagagaggacagctagagaatagaggctgaaatctaaaagatttgagcaaggcaaccacgtctgtgctgggcctggagaacaggcctggacacttggctgtacacacttccacatcctggagagcaggcctggaccctgggcagcgcacatctccacatcctggagaacagacctggacacttggctgtacacatttccccatcctggagatcaggcctggacactcggcagcgcgcacctccacatcctggagagcaggcctggaccctcggcagcgcacatctccgcatcctggagaacaggcctggacacttggctgtacacatttccccatcctggagatcaggcctggacactcggcagcacgcacctccgcatcctggagagcaggcctggaccctcggcagcgcgcatctccgcatcctggagagtaggcctggacacttcgcagcgcacatctccgcatcctggagagcaggcctggaccctcggcagcgcgcatctccgcatcctggagagcaggcctgggccctaggcagtgcacacagcgctaggtgcctggtacctccaggcatgcgtctcccattcctaatattccttccgcatcttgagtgcagagaacttggtctgttgatattccatgtgcctcaccatacataacacagggcacgtggcaagtacagaaccaaagcctctcctggatgcacacgtgggctgggctgtgcctgccagctgcagggccctacaaatcacctcatcctccacattaattttttatgacaatagaagtcaagctggcccagggatatgggacactggtcctgccagctgccactttggaaggacaacacaaagtcctcacatggactgaccaggcattaaagaaagccccactaggacttaaattctgctactgttttctcaattctgaagatggtgaytagcttacggaaaccgagctatcctcaaacatcttctcctgccaaggattataagagctgaaatcaagagagaaagagctctgacagacacagctttccttcctctgggaaagctctccttctctggatatgctccattgacaaggggcctggacagtcctgctctgtagggggagaggagttggcagaggctcagctccaggccacatgcatgggggcctgaggggaatcctgcacttatgccctcctcctgggagacagatgcgattaaggacttctgggcaccttgccaaatggcctaacatcctggggatggaggagtggcccaggtgctcgaagaagggagcttggcttgggagtttctagtagaaaggcccaaacctgagggcagattggcagcaactgacaagctagtgagccttgtgtataaaatgctatactttttttcctttttttaagacagagtcttgctctgtcgcccaggctggagtgcagtgacatgatcttggctcactgcaacctctgcctcccgggttcaagagattctcctgcctcagcctcccaagtagcttggactacaggcacacaccaccagggccaggcattttttgtatttttaatagagatgggattttgccatgttgaccaggctggtcttaaactcccaacctcaagtgatccatccacctcagcctcccaaagtgctgggattacaggcatgagctaccatgcctggcccaaatgctatacttttaaaagtacccacctctctgctgcagaaagcccatggaagtaccaggaattttttgataatgataaatagtggggcattttgtatgtcatggtaacaataacaagttttatatattttcttccaaagctcctggagtgaatctcatcccagtctatcctgatggggatttctgaggccttgccctgatctttctaggtagccctgacacatggccattcaaaagcacagggacggtggctcatgcctgtaatcccagcagttagggaggccgaggtgggcggatcacgaggtcaggagctcgagaccatcccggccaacatggtgaaaccccatctctactaaaaatacaaaaattaaccaggcgtggtggcacatgcctgtaatcccagctactcgggaggctgaggcagaagaatcgcttgaaccagggagtcagaggttgcagtgagccaagatcacgccattgcaccccagcctggtgacagagcgagactctgtctcaaaaataataattaaaaaaagcacaggaaaccttggtccctttcctctcactcccccttctcccaattatcactaggccagcaggccaaggcaaaagacaaacaaagtagaggaaacttcaatacaatgatttgttgactctctacattcccctctcctctatctcccaagtaacttcagattaacctcagcatcacttctgcaaggcctaagaaagagttagtgtttattcccaattctgtctgtcctttgttcactacatccagtctggaacacccaggtccataatctagccataggccactacataggctctgttctcccaagctttctctttttattttttctttatcaaacttattttaaccattataaaagcaatacatgttcatcaaattttgaaaaatcagcatagaaaagaaaatgacctaatgtctcaattccaccccattctccatatattaaccatatttttaatttacttccttctagtctacttgctgtgaatttttcttccsaccatccccaccccccaatcaccaatctgaaccagacattctggttccttggctctttcactaactagttgtgtgaccttaggccagttattatttaatctcctgaagcctaatttcctggctagaatgatgatgcaggctgattgcagcagctctgttcattcctattatatctgttttccaatgaactctttcactgagattaatagtcagattggtcaatgaggaaataggacccaatttataaaaatctacataaagcacaacttttaaaaaatacagccattgagtcccaggagatgggtcattaaaagcctggaatggtcttaccccattacttcctgtggacagcagagccacaacacacagggagcacagcattgagagggttgagaataatcacaaagccaccctttactgtgcacctacacaggcccaggaactctctatgttccaggggcgcccctggcaaattttcttctcctattctcaacgaacttgcaatacaaaattctgattgctagggtacagataagaaaagctaggcttagtaggttcaaagccttgcccaagacttcagagctagaaggctcagggcctggccttgtgtatccaaatcttacacccatgtcctaaacagtgactagattctctgtgcatcatttctggctattccatccagtactttggcagaatttcttgttatctggagcagactttctggctggttttcttaaactctctccctcttcctccttgtacatttatcctactgggataagccctgctcacaacaatcatgacagagtaagacaggaagaccttaggaactcacggcctatttggccagcaagccaaggtaaggcgaaggggaatggggtaggggtgagatgggctgattcaggagtctgaatgagaggccttgagctcatgctactcttggaattgattttagttattatcacccattgttgaatgaatgactcctcaactcaatcatgcaaaatgaatacacttattttatggataaggaaaataagattcaaagaagtcaagtaacctacccaaagccatgtagccagtcagaactaagactgaactggctgaatccaggtctgtccacctcccaaacccctgcatttccattcctccaagatgcctttctcaccaaatatccaataacctatggaagtagttcaagatctgcggagagagagcttaagatacccatcaaagcctttcccaggaccccaggaggatgattttattcagggactctgaaggcaactgcttgcagttattaaaccacctgctgagaatccaaattctaatttgatctccacaggcaggaattcctcagggaacatgtagttcaaacttaagggaggatcagaaaaacagaagtccttctgtggtaggttgtttataagatagccaaatcaagtccttctatccttatgtgcccactcctttacaatgtgactgccttttttcccaccaagaggtagggtctattttgctaccccctcagtctgaactagcccatgacttgctttgaccaatccagtagagcagaagagatgctgtgtgacttctaggcctcaacttcaagaggtgttgcagcttccgctctcgttctctttcaacacttctgccatcacgtaaagaaactcagtctggtcttctagtggataagatatcacaaaaagatgaacagagagagttattcagctgacaaccagcaccaattgccagacttgtcagtaaagccatcttagaccatccagccccagtcaagctgccaaatgactgcagctacatgagtgactccaggtaagaccagcagaaaaactgcccagctgatgccaacccaagtagctaagccagtaagcaaatagttgtttcaatccactaaaccttggagcctaatttcccaaatccttacatagcattactccatcacttctgagaacaggggtagcataaagaatgtagaaatgggccaggtgaggttgctcatgcctgtaatcccaacactttgtgaggtcaaggcaggcagatcacttgaggccaggagttcaagaccagcctggctaacataatgaaaccctgtctctactaaaaaaatacaagaaattagctgggcatggtggcacacacttataatcccagctacttgggaggctgaggcatgagaatcttttgaacgacactccagcctgggtgacaaagcgagaccatgtctcaaaaaaaaaaaaaaaaaaaaaaaaaaaaaaaaaaaaaagaatgtggaagtggaaggagtttataaagtatgtcttaggcaagcagctcatgttgtttgtgccctgagactctgcaggcttcaaaaaaccccaagtctggagccagacagcactaagaagtcttgattgcataaagaagaatcaagcccaagggcccataaatgtgagagaggtttagagcttgcttttattgatctacaacttctctgtgtgtactcaagaggaaaacgtcttctctcatatatcaacctgttggtcacagccaacaactctctgttgccttttaaaagaattccaaactccttaacctgacatttaggggctctaaatgatctaaattcaggtctggggttctaatcccaatactgccacttattcaccagccatgtgacgctggataagacacttcacatctctgagcctcagtttcttaataagtaaaactgggattttgcatgcatagatcatgcagttgttatgaaaactaagatgacataaagtgaccagtactatacctggcacacagtggatgttgtaaagttccttcccaatggttcaacacccttcatcacactcagagaagagagattccttcagagaaaagtttgtgagatgccaggaaggcgctaaaggttccttggggtaaagccacatcttgaagccttgatgtggttgtaaggaatcagagtgatggactgggtccccrtcttatttgtttttctttttttaccacacgtcccaagtacatctatagctaactaaagctttaccacggtattttctgaggaaagaactctgaaatgctcttggttgagtttcaaccaagccagccctcttctccaccttagattctcatatccaacaatgggcatctgcctcttgtattcagaacactgatcctacactcggactgatcttacttccttctctagtttccttcgtggaaaaataccctgttaccctaatttccatagttctactccagcaagtcactactcccacgttcaggacaactgagagtcccagagagaactgtcccctctctcttcccctgactactcccctattgcccactgttgataataactccttscctgtgtctctctcacaaacacatacagtcacattctatagtgaaacaggaaattgaactaatagaactacatctccatcagagaccaatcaatgccattgattggmacaacatttcactggacatgaggcgccagggasacaggggatcctccttccctccccctaaactacacacactgcccctctgtcaatccccgggattccactgcaccagtagttgcaaattacccacaagtatcaagccctatgcagctagagcccacagctgaagagaagccaaagctaccaaaacatcaaccactggctcaggattaaagagagataggcagttccattcctgtgagcccttaccctgtagggagatcctccctgacccagtaagccaaatccaccccatcccyaccctattatcaaaccacagagagccaacaagcttagtaaaatgcagtggtttccattctttaagcatggactctccatagtcactccaccattcccctccaaatcacagcactgacccctcagaaagggaaaggaaatcatttatgtgcctcaatgtgcaaagccttccaccactatgtgttcatcattcattcctagaacatccctgaaggtaaggcattattatttccagtttacatgagtgaacagaggctcacagagccccagataacacagtcaataaacaggatttagatcaaggtcctgtgactcaaatcccatgtctttccactcaagagtcaacacttagagttgtgctctcttagtatatactctaaatatacttgcctgtgtttgggtgtttgtctaatcatgtgcctttgtcactggttcctatagctcccagaatagtgccatgtgcttggaggtagtgttgacaatgaagacacatggagatgccttccaaatcactcccagtgtcctcttccttgagaggccgattgagatctaatccaaacctgaggcatgtggctgtagttaccacatttggtgccttttctacaatatttaacataatttaacaggagttaaaactatgatgcaaagacatgagaggaagcagacggaaagttgaccaagagataagcagagagggtagagtcacctcttctatgagcttcatttgggaaagaaastggtatcactgagcctctccccagggagattcccctagtttaacttggctgagccactgatccaggccctcccaatgactctcaccagcattctggggactcccttaaagccaaggtaaacatgactcaaaccagcagaagccaatattgcttgctctatgagaactttctcatagtttatctaacccaggttgccagagcttggacaaagtagacaatcagttgccaatggcaaccaaaccccatcacttccaacttcattttgattggcttagagggatggaagtcaaggagggtccaggagcaagtggcctttatatctaatgcattcacttaacaatcatcttgctttatacgcataactcttcaactttttaaacggcttttcagtatcatttcatcttctcttattctcactgtaattcttgaggtgaatgatgatctcctcaggcagacaggaactccctgcagttgttttgtacctctccaccaacctcagtacttttggaaaccaaaaaccttttcagcaaagaaagagcaggaatatgatcttcccaacacaaagtcacagaatcactcagccttagagatgggtgggtccttagcagctccctaactatacaactctcatctgagggcaggggtgcactccaaaccagtgctgtgcagtagaacttcctgtgatgatggaaatgcacatatctgctctgtccaattgagaactgtactggaaagagaagatgtgtgcattttgatcacttgaaatgtagctaatatgactgagaaattgaatttttaattttattttaactaattttaatgttaacagctacatgtgactattggctactctatgggagaacacactctatggcatcccaaccagactttgctgcaatggtaatttactacctcaatttgatagtgtccacaaagagagtcatgcaattttatacagagaatacctgttatctgtgctgaaagaattacgtgataaaaacaccttttgcctacagtttgaatgttgatcacttcaataacaaaatgcttacaaactcttacagactgagcagattagaaacagagaagccactaaaaaccatctagctcaacccctttatttcacagatgggaaaacaggtttgctgtatctttctcctcgggtcataccttacagatcctgtgttctctagggagtccagtgctcttccatacargtaaacattgctcccagtgtttctgacaactttctgaattattctctacctctaggtatcccagggtaagagcgaagctagggagaaggaattagaactgtcaccaccatgactagcaaccagagtctcctgcttaacaggagccaatttcataggagccacaggtcagcagtaaagtgcagggatctaagggagccctgggcccagtcgctcaggcagagccctgcaaggacacagggtttactcttggtccacccccactccatctttacctgtccagtcacctatttggaaagtccccaaatttattattataatatcattattattattattttgagatggagtcttgctctgttgcccaggctggagtgcagtggtgtgatcgtggctcactgcaacctctgcctcccagattcaaatgattctcctgtctcagtctcacaagtagctgggattacaggcacataccaccaggactggctaattttgtattttttcttttaagtagagacggggttttaccatgttggctaggctggtctcaaactcctggcctccagtgacccacctgcctcagcctcccaaagtgctgggattacaggtatgagccaccacgccgggccctccaaatttagatgttcaaaaaaacatctgtttcctctcacattggctcagagcagcggtgtcagtttaaatttggggcttctaggcaaaactgatttccagaggaatccctttccctttgttatatgctgaacggactcctggagagagggagtccccataggtgtgggtcctggaaataaagatttttaagttagggagagacataatataattttcttataaaaagaaaaaacatatttactttctctgctttttaaagctggaaattaagaaaatgtgaaaaaaataatttttatgagtattatttgagctatctggtggtcctgcttctgaaggagaarcatctatgaaacatcactcatgaagcacttaatgaacaccatctttccagtcactacactaggcactgcactatctcataggggagacaaccttcatctgttcaatatttgttaagcccccactaaacaaagtcgctatcttcataaaacttacattccagtaatgggaggcttacaaaaatcatgtgtacaaaacaacaatattacttgagataatacaagtcccacaaagaacatagaagtagtgggatggggtgtgacgctgggatggtagagtgggggacaggctactctagctagggtggttaagaaaggccactttgaggagatggcatttgagggagggcctgaatgctggggagcaggcagatgggaggatgagcgggggaagaagacaccccaggcagaggagccacttgtgcaaaggccctgagatgaggacaagcatggtatgtttgagggtcaggaggcttgtaaggctgaagtgaagtgaacaagcaggaagtggtaggaagagaggtttgagaaagaggccatggttcagggagagcacatgagaaagagatcatgtgaggccttacaggccgaggtaggtacagtgcgaaagcacttggaaggggtgggcattaagcccaagagacatgatccaatgtatgaatataaatatatacaatggtggataaaatatttacaatacaggaagaatgagtgcaaggcaggccattacaaagtacaggagctatgctaataaagaaatctatactgtagggaggggctcgagaaagtctaagcctcttagggcatggcattccaggctacaacagaagacgcaaagaaggagcagtgtgaaatgacatgtgtgaaacatgacgacatgttggaggggaccacatgtggttgctatggaggtggataggtacaagccatgcatgggaaccatgcatacatcagccttggtaattgaacgtaatttgttctcaatcttgtctcttaaaaatattggtacccaggccccacaacagacaaattagataaaaacatctgagggtgggagggcagacactggcatattgaaaagctttctaagagatgctaatgcacagccagggctaataagtggtactgtaggcaataatttgaagggccctaaaaaattttagacaagcagcaacatttatttctcataacaaatttgtttttctaaagattatattttataattcagtaaagtataatatgttcaagcagtgatgacaaattaattacttgtgttttcatttaaaactctgaacaatgttacaaaaggaataacaagtttccattcctcctgacctctggctcctcagtttacgagaaacctagaaactctgaacagaagaaaccttcagcaatgagagctgatagattttatagccagaaggatactgcagagagcccccctcattttacaaatataaggagaggcccagaggggtactatgatcgggacaaagatgcctggggttagcaccgaaggtagagctggactccaaaggtagagctctctccacaaaaccatgctgcttcttgcatgtgacttaaataacaaaagccgtcctaatgtctagacttggacattttctacaatattaattagatagtgaaagatcacttaattttagaagaaataaaatataaatataaaacaggaaagggataggaaaaaagaagtccaaactaatcaaatacagtttttagcaaatataactttatttttcaggttatccccttagttaataacctctatagttactgctccttctgatgttttattttgatatttccatagatttctgtaaactgagagtttattcaatgtatgacaagttttctataggtgcataattcttgttcaaggcatatatttcaaaatgtagacccacatctttctccagtttccagaaaatagagagtttgaagcaacagacacagaagagtgggtttgctcccatgctgcagaaggcatttgcaggacagaattcccagctctattctagaatcaaacatctgaggattttttgagtctatatttggaaatgccattccaaccctgaaggcttgaaatgtgctgcttaaaggtgtgccaggaaaatatggcagcagcaccatctgcatttatactgccaccttttagccctggatccaagatttatacagcaacaatggtcaactattcggctcttctccatttcttcatgaagtctttactttcccctggcagtgcacagagattttatatgccgcctaaattaatctgaaacagaggtaaaggatgtctcagccaaggtcactgtccaatctggatgcagtgatagctataaaaactgactgtgtacagttaagtgtgtgagttctgcagtaaatccaaaacacaatgcttcttgctactctgaatgaccacagaaaaggttagattcaagctggactgtgagctatgaaagctacaacagccctcagcaggggacagatgttgcaactgagtcaacagtgacttggccaaggcttggtcatgcagaggtgaaagcaaatatccaggmattaaacatcagtcaggtggcccaggagcaagatgacatacagggaagtttggaaggagaaggagagaacttggaagttggctcagagcaagcctgtagtgagaactatgagcaaggtctatggtaaagagccactcagctcagtgtcctgttgtaatatttatacatttattcttctacctttatagcctttcttctttcttctttatgcagatccatgttagaacctattatgtgttcaacctattatgtgtccagcaaaacatgtattttcatgtcactgacagatttaggctaaagaaatgcatgccataatgcagcattagatggggacattttttcttcaaactgctttcacattacttgcaacgtgatttgtcaaaataaataccttaggacctcgtctctgtaagacttcacatactctacatgtggtggttcccttatatcttcaaaacttctggaaacacaaaagctggcacaagtgtcattatcatggaatccatggctccttccctctgtgcaactgaccagccatctgttggaaagtcgtgcgcagttgcctgcctttcatggatgcttccattgcctgttcaacatactcactctccaggcttgccaagagtgtcttctggaccctggggctgatgctcacatgaaaccttctagccaatgtgcactttcaggcactcatactaggataccaagagaatagagtgctcttttaaaaaaaaaatccttctcatatttcaaacatcatcttatctatgaagtaagtgttgtgaatatggctaaagggatttcaggtgtcttgcctttgttccctgtgtggtcctggtgaggatgcygcagtttcagagacagcagtagtaaacattgggaattcagagtgctagaaggaggtactggtgtcatctccatcatgggcctcctctcactcatgaagaagtacttaatgtcaacagacacttcacttcctacacatgaagatgcattcagtcatccttgtctcctttagatatgcatatatcgttagatggcatttagaagtcatgtttactcttctcacttggaataacctacagtgaggaaggggctgcactgtgcaaggaggagcttccattttgctaaggaggaaaaggataagactgtagttagtgcttctctaggttctagacaatcttctgcattgtatataaatcggataatggcccctgtacagggcaaagcactattccagctctgagggcctcacctcaggactaagaccaggtgttttgactttgcctcagagcagggatttgtgatttaaatacattatggaaacatgccactggagccaaaacaaactataatattccgagttcagataaattttaaactcttacctttcagcgaggagacattgctttttttctttgtgaatctcaagttgaggggccaaaagaagttgagttccaagttccttccaactcccacaccttcacactggctctcactcctgcctctcctgaccacattaaggcagtgagctctttcttttataatatccacaggctccagcaagcatctattccacctagactttcaatgcctcattaggaagactgggacctgtcttctaacctgtggagcaaaattcaacaagaagcagcccacaatgaaggcactgaatttttcctgcccccaaccccctcttaggaaactggctgcctgtcacacaagtagacataacatttgagagctgtacctggctctgtatgtgactcaaaatcatctggcaccatgggcagttctacattgaacattgttctctgcttcattttctgggatgatttagaggaggtacaatacaagtcccagtatttaaaccccaaactgtaagtactttattttgtgatgaagtaaaacaatttctcaatccaaaaggtakctatctttcaacccctttctgagttactttctgggccttcagcctatgggagactcctcagaaatgcagagaccctcaagcagtaatcatacttatggctctgatcttcaaaaacaccttggagctagaggaaggagacaattgggggtgatcctataaggctttgatgtggatgcccacaggcctggagaatgaatgatctgggagatatgcaaatagttcttgcttctttctgggagcaaagtctggcccacaggacagagtccataataacacgagacatttttagtaacatacaggaggccacaraagattcacatgtttctgtactatagatgcaaatctgttttcaccttgacctactgggataaggagtaaattgagaaacaaagaaaaagtagtgctaaggcaggagaacaaccttgaaggcaggggtagagggggagaagcgatctcagatcatgttattaagttcagcttatagttcacttctgtttccattattgtgacataatttactccctcccaaaagaatttctagagccatccaaaagcattaacaataatatattgtgttgagtcctggtaaccagtcctaattcctcgcaatgattgcaaatacaagcattcaccacaaaatgttaataactgctctgtaaatatctggagtggcaaatttactcacatatcagctttgtcctgtatgtacattacttttttgggggagggatggaggtatgacttttctatcatggtaaaatagatagcatatattattgaccatttaatccatgtttaagtgtacagttcagtggcattcagtccattcacattttcacattgttgtgcaaccatcaccaccagccatctctagaacttcatcatctcaaactgaaaccttcattacttttcacacagtatgtgagcctccctcaaaccccaaaggattaagactccccctatcttccttctcagtccttggagaactacaggatacaatattatacagcattttaaggtttacaaaatatttttcctcaatgctcacataaactttgtaagccttctgtacatgggagaagaccaagaatccaagaaggggacagacttgctcagacagggcactgaccatgcagggatccagagaaggctcccagtgtgcatcccattatccctcaccacctccgacaccaaggaggagaaagaaggtgttggagtggtacctaaggaaatcctccaaaggccaggctgtctcttaccccaccctctgcctgatgtgactccatctgacagatagtcagagctgcctgatggcccagaaaaaaaaaagaccattttcttacacatcattcattgcaaaaaaccaattgggtcatttcacacttcctttccttctcttctcttttcactcacataaaagcaaacccacatcccatccacttttcacaaaagcaccacagtacactccccatcacccttctctctgcacagacctcttttattcctgatcattctaaccagattccttcttcataaaaacgtgaacattcaagagatcccatctgatgtgatttctccctcctgcacattgcagggatggcttggcccatggcttcccatcatcctgaggctgccctgagtgcttgatgggcccctccatccaggccggcatggaagacatggtctgcttttctgtgtatcctctgttcctcttacaagaacacccgtcattggatttagggtccaccctaatctagtatgacttcatcttaactaattatatctgcaaagaccctatttccaagtaaggtcacattctaagatttcagatagatatgaactttcaagggacatttattcaactcagtacacccaccttccttcaccaaggtatgtcaaattcaatttcttattttctttgggtttcgttttcgttttttcatctagcacctgctccatctcaatcctgctcatcatcactgctatgctggaaacccttctgagaatcctgcttccatctccccccatacccatcagtacctctagtcctcactttacaacgggtatatgaacaccggattaagaaggaaatgatgctaaattgtccagagagagttcattatttcaagcattcatctctccccatttacccaagaaatagcatgtgttcatctcacattttgccctggactggagggtctaacagttcctaccctcaggtattacgcatcagagaaatgggctactgcacagctagaggagcagagaaggcaaaatgtaaccagttaactttaaaagagatagaaagtttaaaaaaaaaaaaaaagccagccaggtgcagtggctcatgcctgtaatcccagcactttgggaggccaaggctagtggatcactggagctcatgagttcaagaccagccttggcaacagggcaaaaccccatctctacaaaaaatacaaaaaatgggtcaggcgtggtggcacatgcttatagtcccagctacttggggggctgaggtaggagggtcacttgagcccagaagctcaaagctgtggtgatctgagattgcaccactgcactccagcttgagtgacaaactaagaccctgtctcaaaaacaaacaaacaaaaacgaaagaaagaaaagaaaaagccatgtgggccaagggttagggaggtgtggcataagccaagtactcaaggaggaactgaatttgagcagatggagggaggtgagctcagaagacatggggaaaaatctggggaaaggcatagaggtacaaataagcctggaatttttaggggactatgagaagaccccatctgactagatggtgggtttcactgcagagggcaggctttatcagtgataaggttgtaaaggcaattgtttgtagatgtatacctgatcctatagggccctgagtccaggccaacaggacccgttaaggggttctaagcaactggggagtttgactaagaggtgttcagggaagccagatctggttgggtgtgcatcatggactagggggagtagggggatggcaaggaagacctggatggaagcccagttaagaagacaggctccagagccagagctttatttctccactgtcagtggccttgcaaaagccaagtgaatccccatccattgccgtaatcttccgtcagactctgcaatcaatatagccatcctgacatggcttggcgggtggtggggggaggagggtaccctggctggcctccagcccttctttcccattaacatgatgagttgcagagggcatgtcagggattgctttcagtgaattctaggaatggagatccctttgcataaaaatccccaaacaggcaaagagaaactcaacagtgttttgcaaatcaccacatgaatgcctcttggggacaatggcctctccagagaggacagaatcaccatctcagctcagatccggcttctactgatgcactagcctaggactggtgctggcatctgagaggtaatgaagaaacgctcagctcaggcatcactttataccagaggccatcagataagcaattatcatctcctcagtagactgggagcttcctgggagaagtgggctatctcttccacaatgttcccatctaggtccttctagtcaccaggcagaagcccagaggaggctgtaaacacactcccatctactccaccctcctcattcagccacaaacatccctgcttcaggagcagagggtggggtggaggtgacacaaagcaggcagaaacaaaccctgagtgtgaygggtagaataatttctgaagtttacaaggcacacctgtgagcctctctgcgtagaccagtctatcctaggagaaagatgggcaggaaaaggggagccctgaggagcagaagaagagctgactctgatgtttcctttctccttaacagtgctctgtactccatcacaggaggttcccacaggtcccagacccacagccactgcacctggagcaacaggactcaggaaggagctgggaccaggggcattcgcaggggaaaggggcagaggtggaattttctgaatgcagttaagacaaaagggaagaaaagacacactctcctcttctcctctgctgcactggaaactcaagctttatcagaaataccacacaggacagcagtccacaaggaaaaggaccctcctgcagatggttttcctttttttagtgatcagtgtaacttgaaagacataacttctaccccccttatttcggaaagggatgcaaacaaatgatctatttgtactaaaactaaactccctctgcgtgtaacttcttaaaggtatttatacattgaatctgactcacacttttgatgtggaaaagttttattaacataactacttatcccagcctactcccattgggattcatggctcttgcccaaaagacatttcgggtatttctatgttaccttaaatcctggcagtgattggtgtttcataacaagcacattcacagattccacgacaaactcctagctgtctttgggttacaattaggaagtgaaattggaagtgagaagcagccctgtctacacgaacaaagagccccagactgagggtctggagattcaggaccctattccaccactgcctgtgtggtccagtcacttgcctcctcagggtccttgtctgtagaatgacattgctggcctagcacagtccttagttgtcttccagctctgacttcctgtgattataacagaagtttaaaaatatctctagagagataaatctcacaatattatgtagtcatgaaaagactgaactaatggcatctaatatctctgggttctgaaagtctgtgactctattatatacaatggtttttaaatgtgcagagattaagaaacataaacacaaaacagaagagtctctttaaaaagctattttaaaagaacagacattaaagagcctaaaatagccattctgtgtacatatagagcaaatgggtgaacaaaatcaaaattatgcaacgtctagggtggcaaaggcttgtagtgactgggactctttcctgatgaaaataaggcatgacaattgggacattatgccacagtcctaactccatgtcattgttttatcttttgtcattgggcacagggaaaacacaggaccccaacacatggatggcattatgcgaaaaagattaattctctcttgacaagtgcactgctttgtcctgagctcaatggcagatcctggggcagcagcgaagcatctcaagatacttaagaacttaggacttcggctaagttggagtcttgctggttaataggacatggattcactcaagtcaaaacacaggttcaaagtggggcataatacacagcagacagatgagattcattacaaaatactcagctaacatggcggggaacaggaatgagcaagacttgaggtcaggtgatcaagcattaataaagtttgtcaggccccaagtttaagtagagactattagaggtaaactaagtatcccaaggactgggaatagatgttgagtgctaatatacagaaggtattcaactgcacttgttcaccaaatggaaacttacaaaagaagctgttgctccaatgaggtttgtttgctgaacaatgtttctcatttatggcagccaagactttcgggtcagccccaggagagagaagcagaggtggagggaaactccctgaacttaaaggtgcctagaccaggtccaagtcccctaagaggagggattccacttcatataccaccctgaatctggctgatggaaggaagctgtattctctggatgaatgagggcttggccagagagttgatgttctccatagtttaagctggatggggcccttggatgggtgtccatctatctaaggagaccctgtcttatcagcatcccagacccagatgaatcttagaaatcctgaaagatttcaggttgccagaagcggctggacacaaacaaaaggcccttcacagagtaattaaaataagcaagaaggtaaaggctctgtgtgtctaattctgcactcagctgagggagatgtgatggatgaaccccaagaaatgggcatsagccaagcctgtttccagaaaagcctttcccttattgtgagaactggtattagacaaagtaataatcattttcagttgaatcttgtgaaaaactgaatttaacctgaaagtaggtattgcatttctttaaattccatttcatatggttccactccatatccatcttctaatggagaggatggtttcttaactgtcttgtttgtgaactgtctgtgtgttcatactatgattctattaaagttattttacttggagaaggatatttaaacctagtctgtggggcagtggatctggaaatgttctagacctctgatcctgtcctggcctttcttagtcacccctgcctgtgccaagagataagccacttacttagtacaatcaaactcaaggtagtatcaactacttggtggcacctctgatttaagacaaaggtgacattgtgatgctgtgaggaaagaatggtattttcaataaatgtcttcaagtctactgatgacaaaacaggagaaaaaaaatctcttttttctggctggaaccatggagggtgcagaagagaagaagaagaaggttcctttggtgttttagacatgaagtccttgcccatgcctatgtcctgaatggtaatggccaggttttcttctagggtttttatggttttaggtccaaggtttaagtctttaatccatcttgaattaatttttgtataaggtgtaaggaagggatccagtttcagctttctacatatggctagccagttttcccagcaccatttattaaatagggaatcctttccccattgcttgtttttctcaagtttgtcaaaggtcagatagttgtatatatgtggcgttatttctgacgtctgttctgttccattgatctatatctctgttttggtaccagtaccatgctgttttggttactgtagccttgtagtatagtttgaagtcaggtagcatgatgcctccagctttgttcttttggcttaggattgacttggcgatgcgggctcttttttggttccatatgaactttaaagtagttttttccaattctgtgaagaaagtcattggtagcttgatgggatggcattgaatctataaattaccttgggcagtatggccattttcacgatattgattcttcctacccatgagcatggaatgttcttccatttgcttgtatcctcttttatttcattgagcagtgatttgtagttctccttgaagaggtccttcaagtcccttgtaagttggattcctaagtattttattctctttgaagcaattgtgaatgggagttcactcatgatttggctctctgtttgtctgttattcgtgtataagaatgcttgtgatttttgtacattgattttgtatcctgagactttgctgaagttgcttatcagcttaaggagattttgggctgagacaatggggttttctagatatacaatcatgtcatctgcaaacagggacaatttgacttcctgtttttgtaattgaataccctttatttccttctcctgcctaattgccctggccagaacttccaacactatgttgaatagaagtggtgagagagggcatccctgtcttgtgccaattttcaaagggaatgtctaaaacaccaaaagcaatggcaacaaaagccaaaattgacaaatgggatctaattaaactaaagagcttctgcacagcaaaagaaactaccatcagagtgaacaggcaacctacaaaatgaagagaaaatttttgcaacctactcatctgacaaagggcaaatatccagaatctacaatgaactcaaacaagtttacaagaaaaaaacaaacaaccccatcaaaaagtgggcaaaggatatgaacagacacttctcaaaagaagacatttatgcagccaaaagacacatgaaaaaatgctcatcatcactggccatcagagaaatgcaaatcaaaaccacaatgagataacatctcacaccagttagaatggcaatcattaaaaagtcaggaaacaacaggtgctggagaggatgtggagaaataggaacacttttacactgttggtgggactgtaaactagttcaaccattgttgaagtcagtgtggcgattcctcagggatctagaactagaaataccatttgacccagccatcccattactgggtatatacccaaaggattataaatcatgctgctataaagacacatgcacacgtatgtttattgcggcactattcacaatagcaaagacttggaaccaacccaaatgtccaacaatgacagactggattaagaaaatgtggcacatatacaccatggaatactatgcagccataaaaaatgatgagttcatgtcctttgtagggacatggatgaaattggaaatcatcattctcagtaaactatcgcaaggacaaaaaacgaaacaccgcatgttctcactcatagatgggaattgaacaatgagaacacatggacacaggaaggggaacatcacactctggggactgttgtggggtggggggaggggggagggatagcattaggagatatacctaatgctaaatgatgagttaatgggtgcagcacaycrgcatggcacatgtgtacatatgtaactaaccggcacattgtgcacatgtaccctaaaacttaaagtataataataataaaaaaataaaaattaaaattaaaaaatttaaaaattaaaaaagaattaaaaaaaattaaaaaaagaagaaggttcctgctgtgccagaaacctttaagaaaaagtgaaggaatttcacagagctgaagatcaagcacctgagaaagaagtttgcacaaaggtgcttcaaaaggcaaggaggaagcttatctatgaaaaagcaaagcacagccaggtgcagtggctcacacttgtaatcccagcactttgagaggccgaggcgggtggatcacgaggtcaggagttcaagacaagcttggccaagatggtgaaaccccgtctcaatgaaaaacaaacaaacaaacaaacaaaaactacaaaaattagccagccacagtagcaggagcctgtaatcccagctactcaggatgctgaggcaggagaatcgcttgaacccgggcagcagaggttgcagtgagcctcgattgcaccactgcactccagcctgggcaacagagagaggctctgtctcaaaaaaaaaaaaaaaaaagaaagaaagaaagaaagaaaagaaaagaaaagaaaagaaaagaaaaagaaaaagaaaaagaaaagcactgtaacaaggaatataggcagatgtacagaactgaaattcgaatggccaggatggcaagaaaagctggcaacttctatgtacctgcagaacccaaattggcatttgtcatcaggatcagaggtatcaatagtgtgagcccaaaggtccgaaaggtgttgcagcttcttcgccttcgtcaaatcttcaatggaacctttgtgaagcttaacaagacttcaattaatatgctgaggactgtagaaccatatattgcakaggggtacccaaatctgaagtcagtaaatgaactaatctacaagcgtggttatggcaaaatcaataagaagcgaattgctttgacagataacactttgattgttcgatctcttgcatcatctgcaggaaggatctgattcatgagatctataatgttggaaaacgcttcaaagaagcaaataacttcctgtggccctttaaattatcttctccatgagacagaatgaagaaaaagaccatccattttgtagaaggtggagatgctggcaacagggaggaccagatcaacaggcttattagaatgaactaaggtgtctaccatgattatttttctaagctggtcagttaataaacagtacctgctmtcaaattgaatacaaaatagtaataataacctctctttctcaccgtacactaaaagcatttccaaatgaattactgatccaaatgtgagaagtaaaacaataaagctttcagtaggaaatatttacagtagacaaaaatttcttaaacaggacacaaaaagtactaaatataaaagaaaaaataataaactggaccacaataaagttaataacatatgttcatttcatgaaaatgcatcataaggagtgtaaagagacaagacacagactggaagaaaatattcataatacatatattccacaaaggactcatattcagaatgcataaagaactcttacaactcaataagaaaaaggcagataattcaatagcaaagatgaggcaaaagacatgaagattcaccttacaaaagaggatatccaaatggcgaataaacatatgaaaatgttctagacttcattagccatcaaggaaatgcaaaaaacaaaaacataacgcccacaatgtgacactaccacatacctagcagaaaagccaaaatggaaaagacaaataataccaaatattggcaaaggtatgaaacaatgggaagtgttctatctgctggtgaagatataaatcattataactgctttggaaaactttttggcagtgtttattaaagctaaacatactcataccccattccttggtatttccccttaggtatatactccacaaaactgggtgtatatattcgtcaatagatatgtacgagagtatccatagcggctttattcataatagcaccaagctggaaacaacccaaataccttgtacagtaagatggataaattgtggcatatttatacaatatagaaataaattgctatacacaacatggattaatctcacatacataacattgaacaaaagaggacagacacaaaacagtgtgtattttaggattctacatataccaagtttcaaaacaggcaaactaatctatgatgctgggagttgccacagagattacccttgagaggaggagctagtcaacagaaagggaccctgcaggggctaatgttctagggtgctcataatgttattgatctgtgtgctgattactcaagtgtgttcactgggtaaaaatccgtggagctgtacacttagaatttgtgcactcttctgtacacttgctatacttcagtgaaaagtttataacatgaaaatataaacacaaactacatttaaggaataaagtccatgtaggaaaataaaaaatccatgaaaactgctttgcaaactcaaatctataaatgacagcaaaatggatagcttctaattatcccgattattctcttcaaaatgagaatttgttgtggggtggggaggagggatagcattaggagatatacctaatgtaaatgacgagttaatgggtgcagcacaccagcatggcacatgtatacatatgtaacaaacctgcacgttgtgcacatgtaccctagaacttaaagtataataataatttaaaaaacttgaacattccttaagaaaaaaaaagaaaatttgctttttaatttatttagtatctatgtcccactttcaaaaataatttgaagccatggtcttatttgttgaacaaatacacataaggggctttttagttttcattggaagcttttagggcatcaaagttgttcaattttgtttggtttacttttacttttttccccatgttaatatacaggtttataaaaatacaatttttcttggctaacaccctctaatgaagattaacaaccctaatatttacataaccagcaagcaaattaagctgagcaagacacagtccacccaatcaggatctttggaaggcttcagccagtggctgtagttcaggtctaacagcttggcattcattggaaagggaagattgggagcaattatttcaataagccaagccaagaaacacagctatgctattcagggaaaagargaggcyacagagaccaagtctacttctagcaaaacggaacccggctggctagtaaaagctgatgtttccctactctgccgtgtgtattggctttcacctcttctggaggaaagcttttgcagaggacagatggttctcttacatttgtataatgccttattattttcagagtttcctagataccaatagcatctgaatctcatactcaccttacaatgaaaatagagaaggttagtattatccccttttcattggtgaaagaactgagactcagacaactaagagactctttaaaacgacatggctggcaagttccatagcatggatagaacatatttgtcatgtgctctgtcctttgtaccatggggtctcttggcttctctccaagccacttaagagaatgagatcccacttccaaaacttggaaaaaaattaagctaggattattagacactgggcagcaggcaagctggaagctgtgccacagtcaaaggaaaggacagcattcaccttcaagatcatgcattgtggaggcactggggggtacagggagataggtaggtgccaagactcctacttgtagcaatggtttcaatgcctgagtctgactctactacaaaaggtcatcagcaatggtagactcatctgggcagactttgctacagacagggaactgacacctgtggttatgagacatacaagttctgaaatccattcatgaacatagtcagtttggattctgctagggttgcatgccgccaatagtaaacagcataaagagcactggctttggagtctgccagacctggctttcagtcccagctctatttttcactcaatgtgtgccccagaacacttatctgctctgagtttcagtttttttagtcataaaataataatgataaaatatacccatcagaattattgtgaaaattaacataataataatataaagttattggcatatagtaggcagtaaatacatttttgttcctttctcttctccccaactaaaaaatgatggattttctgtgagcttttaaaacacatgaaaggaatagtttctatcttccttgctagccagaatgaaataaaaacataaatcatttaaattcataccttccaggtaatcatatatgaatatataataaccttctcaggtggcctaatttaagaacctttacctattttttttttcctttttcacctgaaagtaatctgattaactcagcgcatgcttcatttcctggaatagaaattgcaataatcttctccttaatttcaataattgattaacatgacaaaaacatgtcacctatagtcagactctagcacccacaatattctctagaactgatgttttgatgttgccaaatgctgcctgaaagaaaagcatctgatttccaggttaactctagatgttcccctgggcaaattccacaggttacacagaaacactaagagaaggggtttcatacctggctgcctatgatcttccttttaaaaagcaaatacagtgttttcaaaatctacaggtgatcttccatgagaaagttttgctgtttcctcaaactccatgaagattcctctcataaactggtgccccttcccagttatcctatttctgtccataagcacatgttcttagaatctcagaaacaagaaactgaaagagwtttccattaaagccatctgatctagtactaaaaacaaaaaatgcattaatcatcccactgaacccctgatggcctgctactgactaaacacaaccagtagaggggagccgactacatccctgctgcattgttcccattgttggtcaagtccttctatacatctgggtgggatgtttcttgttccatccttcccactttcattaatcccagctctgcattctagagcaataggggacagacaaatctcacccttcttcctcactaaaggccccacaacacggaaggcacccattatgtgtgtacacaggttttacgctctgaatcaaacattcaatccaaaaaacatctgaggatcaactgtgtgcctcacactgttttaggtgctaagacaggacatgtaaataacatacagcatctatatgcaaaaagctcacaacagtcccttagaatttctggatatgacctggcttctagaccaaccaccctctccctcttccagatacactttggcctagtgatgcttcttttaaaatgtgattctcagaatatgggagaaaaactggatggatgagtctgtggattatttcctagtctgatattgtactacagttgtgcaagatgttaacagtgggggatgctggatgaagggcacacaggacttccatgtatgtttctttgcaacttcctatgaaggtataattatttcaaaataatttttttctaatggatggagatgccactaacacaagctactgacaggacaattcaaaacctaataaaaggcccaaactaggataggtccacctactcaaatacttcttgaaataacacggaggcaaacagacagcaagaactgtcagataaaagtccacactctgtctctccctaggaggcagagtatcttccataagcacttgcttatagaagatgctccatgatctgaatctgcagggccttctcctcattcgtattctggaatgtctggatgggcagagcctattgcctgtgctccctctcacctggaggggctgcatggggtggggagttataaaccattaggctttggagtccaacacacctggctttaaaatgtaggcccaccactcactagctgtgataacctggggaccttacttgctcttttcaagcctcgcaaaacaaagatggtgatgagcgctattatctcacatagttttgtaaaaggagacaataaaataatttatataaagcacatggtatagttccagcatccacaaataactcaataaatatttgttgttttagagcctcactcatggataagttctaggtttccaggatttactaacccccacctctttttttttcttttctttttttttttttttttttttttttgagacagagtcgctctattgcccaggctggagtgcagaggtgcaatctcagctcactgcaacctctgcctcccaggcgcaagcgattctcctgcctcagcctcctgagtagctaggattacaggcatgcaccaccatactggctaatttttgtatttttagtagagatggggtttcaccatgttgaccagactggtctcaaactcctggcctcaagtgatctgcctgcctcggcctcccaaagtgctgggattacaggcgtgagacactgagcctggcccttactccctttttaacatccgatagaacatctgccctttccccaccttctagtacctctctagcctgccaggatgtctcaaatttccagtccagtgcttctcctcgagccatttgcagtgaaggctcagtttgatttttttttctgcttttattctaatctgttatagactagtactttagtaaactayaatgaaaatgaattaccagcaaagtacaattttaaaaacaaaagttccaattttttaatttttagattcaacagacataaaattactctggcaaattgctataaagtttctaaatgcttcctttctatttctgtgctcctcattactgactgacaacaaatggttggcagagcagttccatggaccacactttagggagcacttctccattacctcccttctccaagcctgtaggaaccttactttcagtgaaacacaactgagggcttaagatctctgtgttttggatattggttttaattgccaaggaggattgtatgctctctgagtgccagggtcatgcccactgtgctcagaaccagatgcctcatgagggcccaattcctgctgataatctaagcactcaaacaggcatattatttacttttacctttccatgatttcaccttgatggtgcacccttgaaaacctgcctaaagagaacactttgtcccttcaacatccctccctgtttgcctgcattccatctatttctgtgtgtgtcttttttaccacctgcttcatctccatttaactgaaacgtaccagatatagtcacagtttcttccacagagggagaagacaggacaaatctcagaaaatcccattcatcagaaaagctggcttctggctcaccagataaacatttaaggaaatggagtggttacattaatttacttcctggggatactgttagcctcatctctgtgtctctctaatgctgggcacatactagctgctcagtagacgtttatgtgaagtgggcacagagtagcagctgctgcagtgactgcaagtcacacctttggtcatgtcactcagaagaagaggggcagtgagtggcactgccacaggaagaagcctcagatgtcactgagaccagtggctgtctaccctgacagaacaatgaaatcactcagggaactctgatacaatactcactcctacawctcagacccagagactttttaatgtcattgatctggggtgaagcttgggcatcagcgtttttcaggttccataggcaattccaacgtgtggctagggtgaaaactcactgatttagaacactctcccatccacacaggtacgtagcagagttccttaaatgtttgttgagtagatgaatgagggagtcactggatcagtagatcgataaagggaggaggataggtctggagcaaatgcgaacatggccttaaccctgtctcctcagatccctcacctccagctgctgggcatcttttcccaaggtccagccttaagctctagccaggaagcatcctcttgcccataagagaagggcttgctcctcccctcaaacactggtccctaggaaagcactgacttagtccaccctcacctttttcaagcaggaaactcctgggctttcttgaacacacacccagaaggctccacaaataccactggcctcaacttctacagagtaagaacactctatctcatytatttcatgtttatttaatggctgcttggattgttttcctggaagccttcagtccagggtgccatctcaaactacagacttccagacgacagaggcccaagaacactgtaaaaagtgactcgtttatgaaagtctagtaaatggatgctgctgtggtaatgctgcagagagacaagagggaaggggaggatgagaaatggcaaccagaaggaggaagaggaggaggatgaggaagaggaagaggatgaggaagaggaggaggatgaggaagaggaggaggatgaggaagaggaggagaaggaagacgaggaagaggaggaggatgaggaataggaggaggaggatgatgaggaagaggaggaggacgaggaagaggagaaggaggacaatgaggaagaggaggaggacgaggatgatggtgacaatgacaaggaagtggtgtgcatacctggaaggggagatgctagctgcccactgtgggcaggcacagatgcacagatgacacagaagatcaggcagtacccactaccccttcctaaggagcagggaaaaatttagctaagctcagacttctctgctgggaatgygtgcctggggctgccccaggttctgatctctggctgctctttagttgctgatgctgctatttttagctgaacagtggccccttcccagcctcctctccaacctctagttccaggatctcagaggagcagctggacttgtcattctccctctggatcctggacttcctactccatgaagctacaactgagtcaatttgggatgctatttgggaatgtttggaaggagatgaacatagggtagctagggagtcagttgtgaaatccaacacttatttttcaggccagaaaaagraaaaaggtacatatgttaggtccaaggagaacactccctctggccccaaaagagacactccttagatcccccccttactgcccatctaatagcttccaattgttcagattatcctgttctaaaatgaaaactggcttttttwaaatttatttatttaggatatatgccccactttcaaacagaatttgacgccagtcttatttattgaacaaatatacattagagcctttttagtctttattggaagcttttaggacaccaaaattgttaaatttcacttggtttacctttgtttgtcctgcctgtctatgtatagatggcattccatcactagcattaatmggtattttctggtatgtttctctctctccatttaaaggggaaaaagaaacacacactatttgggcacccttgtttcctagcactctgtgaggctctattagtagttttcttcatgcaattcttacaacccatgaactaagttaagggacccacccagggccacacagctcgcaagttgcagagctgggattcaaatccaggactttgtgacttcaaagctcacagacgtccatcttccccagaaaacaagcctcatactcctgtcatcaaaaagagcaatctgttcccaaccctaaagccccattagactggtacttcccattgggctcaataaaccatgtggattgcctgaaccaccagtttccagaaaatagagagggaaacrcatccaccatccacatgacagtgagatatgaagaaatatgtgccttttcttgctagatcagcttttttggtggctgcggaaagaaaggaggggaggcacccagccaagagaggtgaattatggataatcccagagtctgcaataacatttccccttcccagaagcacctcttaactgcaagaattccaataaaatgattcattcattaatcatccaatagattttcactgaacacctactatgtgcctagtactagaaactgtattaggtgctgagggtagaaaagtgaaaaaaaaaagccatcacagtttctgtccttataaagctagtagctatagggaaacaatgctggggttcagaggcatttgtggggtgatagcatcccctgacacactaccttaaatttagcactgaggcacttttgtgggaggaggaggagaaggaggagtaaaggaaaccaaactcgttgctatgcaacagtgatgatttattcttagagcagggagagcagcggcatggtgcagggagtgggtggggggtggagatggaaagaggggaggctggaggagtacagagtgggaggaaaagtggtataagcaagcatcgaggctacacacacaggcctctccccacggagccgctcacaaatggacactccacagaatcattctctccagagctaggcagaatactgtagggacagccccaggaaccactgaaaaaccctggttcttaggtctgaaattaaccttcaggtactgtaaccaggcctgcaatgaataccaaaaagggacaaaagctgaacataacaatctttactcccaccagggaagtaggactcacacacatagttgaccaacaagtatttattaagcaccttctccatgttcattcaacattgtgcaggatgctgtggggatagagacagccctcaagctgaaggagcccatgtgttggctgggtacagagacagacacctgcctgaaacgcaggactgagtgctggacctggctcagccacttacctgcttggggaagcctgtggcaagtcgctccacatctctggacctcaggcatccgctstctaagttgagagacataaacaaagcttagccctatgtctctgacactgtacatgccacaggatctcagtaagagcagaggtgagtatcacctggggtacttgggaagggctgcatggagaaggaggaattgagaatggaggggagagggagataaatgtttcctgagggcctattatgtatttttacctaatgataaagaatagtttccccattttcagagttgaaaaggccaaagcctcagagagtgacttgctcaaaaccacacagcagagctgggattcaaacccagatcctcccagccccaaagcctgagcacttcccactggcccacactgcttctctgagatgctgagatttaataggaaaaaggggtgcaaggaacactggttgaggcaacacaggcagagatactgacaggctgaaaaatagccaggattaacaagggcagattcctggggcaaagacaggctgtgactgaaaggaaggtgagracgcagaaagaatgagaaccaggcagtcactaaccaacacccttcattgtgccaagtgctatggaaaagacaatttgcaaccaaggagataaaatgtgaaaattaacaattagtgaaaacctacaaaaagtgccaaatgagatgtacaaaaataaatcatagtacagtttaaatggggattctgtggaagaaggagtttggatctgagccttaaaggattcagggggaggacaggtgaggagaggatgagagaggtaagggcatttggaaaaggaaaaatctcacccacatgagaaaaagcagaaaatatgctccaaggaagatcactttgcttagaagacagagctggtgggaaacagtataaaaaagtggggttgggcgaggctagggagttgtggctgacagagtgaggattctaatcttcgaccagggctatgaaaaccatcagctgttccagtgaggaaagacatggtgaaaagaggagttgaagtaaaagaaacctgcagggttcagaaagccagggaaggagctattaggcatgggatgaagagagtctgaattagggatggcattggaggtggccaggaaggaccggttccctgggtatttcaaggacaaacagacaagtcctggtgactggggggctgaagaaggcggaatcaaagttaacccaagcttcaaggcaagaacatgatggtatcacattcagaactagagaagcccaacaaaaaatttgcggagaaggtggtaatgaggtagattatttccattctatgcatttttaagattcttctaagatatccaaatgaaataatcatgaatcataaactcaagaaaaggaaacctgaggctggggaaggggaggtgaagtcacccatgacccagggtgagaccagccctcccctactccctgtgccccccccgggagggcaaggctgctgctttgggagttggaaactgtatgctctggtgaaagaagtcacagggagaatgggaatggactctcagggccaacacttaattattcccatcagtagagcaagtgaagctttcaaacagggtgaagccacttccctgtccaggcaagaattccttctgtgctctagtgaggggtcatctagcctttgccatgggcagggaatcacaggagacctcacccagcatcttgctatagagacaggggataagattttggattcagagagacctgggtaagaatctcacttgttccatctggggcaccttgaactgaattccatcctcaagataaggtctgacagagacagagaagagctctataaatgcagctcatggcccctaaaatatcacttctattcgcttgtcagtggcagttgaaattctaccattagagatttatttctctagcttaatatgtttcttttaaactacacattctcctgtgaggcataacttagtgagttgttaccagccgtaagtacaagagtatgtattcatttatcagatgcctgggggagccagggttttaatgctttggagaggaggagaggggcattctggaggtggaatcattggccatatttgggtaggctactgaagttagtcaacgattgaccggactggcaaagggacctagaaagcaagtttcacagcttcactggggatcagtcctaatcatcagataaaagaagtcacaagagagataactctgctggtggaactaccatatgacaatatgggccctttagggtacaatatgaaagatagggggcaggacctctccagagagcacggcaaagcgcaacagaaaagccacttctatctcccgtgaaggcagagttagagagatcaaggtgtaccaggagaaaggaggtctgaaaccaggaagccctttcagatgatacaaaatccccccttgttgctcacctaagctttcattctgcaccaacccagtcctgaaactgttatttcaaagatgaccatgatctcctcacatccaatcccccacagttctatctcactctccaatccttgagtgtagtgccctctccttccttgcaacccttgacaagggaacccccaggtgctctggtttttctaccatgtatctgaccactcttgcattccctctcactgtgccctaaggctctgcctctctcctctctgtacaaaccctccttgtccctaacaagagagggactgctgcccagcagttctcagcaaagcagaaagtagtggtttagaagagtctatactgtgcagggcctagtacatagctagtacacaataaactgcaggaggaataaagaaatgaatgcattaaaacactaatccaagtgtgactcaagaggatcatgccataggaagccacaaaagatgtagtattttgttctgtttctgtggaagcttcacttacttaacatatacacccaaactttgacacatgagcacccacccattcagcatgttttctctggagaacaacttaaagagagtgttgtcaacatcagaatccctttgcctcctcattactctggtcttttgcatccaaggagatatggttctcacaaaggaccatgtaaccaagagaaaaaagaaaggatctgggccctatagatggaacctgagaggagagctcttctctaccacaaaaggacttttatccctgggctagcttccccagcctcctgctgcaagtcctcccatatgctccccggtccccactcttgcaccatttatctttgcagtgagctttttctgtggcctcacatctgtattatatgcgccatgatacatacatatgtaaacaatatcagagaacaccatctcaacttttgggctccctcacactaatagccttccttttccccccagcagaagtgtcatggagatgaataccatggtctcctccaacaagctgggagctctctgaggaccaaagccatagttaggagttaccccctctgtactcaccatgtcccttcagtggtccaggggaatactctgccatacaggccccctagttcatgctgatgactgatctatgaagaccaaaaggcccgggaattccacagaaaggaggaggagaatacataaggaaaggtggagggagagaatatgggagaagggaagaacttcagtgaatcctctggcctcagtggctttcttgtatcctgcctcagtcactcttttcatctttgaccctggcattgatcattgagatttgctctttgatctgcttgtctgtctctgcccattgagtgtgaagcattgctatttgtcagatattctgagcaccagaacccatgcaagaaagttgtcaaggcaacagaacctctttggtataaatactggtgggtgataccactggtggagtagagcacagagagcctcccctccccctcttttagtcagagctaactgacttcaaagttgggggagtggaaaagagtaggtctctccaaagacatgctaaattgatgtctaatggtgatccagcagggagagaggattttgcagttctgattagctgctcaactcccactgagcccagaggtggcagtgaggggcaaagagaaagctgcaggagggtggtggaagtggcacaaattgtgggagatgcctgaaaccacagtgctaggatgtggcacccaggacaggctctgtgaaccttgagataccagcctgctgggggccactggggatccctgggaatgtccagggccttaagctccgactagggctgttctgacctcccttgttctctatacttcctcccagatccacaaaaacacatactttacagaagattcttagggtcaagcatccatatcccartgctgttcagagaaaactgtgcccttcacccctgccctcagaggacactattacattcagatggccatttcagccatctccctgcatccgacccacacccagagcaccatttttagccttttcccttctctagacctcagtagtcccatttctaaaaggagagagagctttcctcctcttcctccagcctccagtatttctggaaagggtaaaaataacataaaatttgcgtgtaaggactccttggagaaactcttttaagaagtagtcagttccagcagccctrctagtcaggaggcttgcatcctcaagttagtcccagccctcacacttggagagagagagggaacagcaaacaaggacaaggtggcattcattcatttccccttttcaaccacatccttacatcctctgcacaaatgctccattgctcccataatgagctgtccctcattagagccccaccctacacctttgctcaccccattgacacagcacatctcacactcactcatcctgccaggaccagcaggctcacagccttcccagccacacagccaactggactcttctccccactcttatggacttgccacctgcaacaatcacttaacacttacctcactctgctttttctcattaaccagtttttggcagccctacagcatctagaacagtgttgtacacgtaagtaaatatttgttttgaggtttcattttttaaatgcattgttcagcaaaaccggcgactccagtgtccaggtaacaagcacgtccctccagaatgagaatccagactccccatgtcctctgctatattcatcagcatagcctcttcctcctctcccaaacacaccattcctgctgtggcctcaaacattctttccaggtgcccaaactctcacagctgctctgccccatcaaccctgttccctaatcatccgggtctgctcagggcctcgctccccacctctggcatcactccgccctgtttccatcactagtgcctccataatttcctgtagtgcgaaaacaagaagtaactttaaagagcagtgtcaccagctttgtaacaaacactctggtacatgcacatccatgaccatcttttcccaggtcacactctgcactaggaatctgtgtcctggattaggattctaggatcttctggctgcctcaaacctctacccaaaatttctgggcctttaacagccactaggtttcctggcaagaaactggttattgtttctccctgtgaggagaccctaaaggccaacaaactctactctcctcccagaggttaagtagacaggcaggcccacctcactctaccacccaggctcccctagagccagcctatttgctacctggtaggccagtattcaaatcctgattccaatcaatgggggggggaccttggcaatttggtaaaattcagtcagcatgtaatgaacaagtgcctcctctcgttctaaaggatcaggggctctcatagcaaggtccccagaccagcagcatcagcatcacctgggaacttgtgagaagtataaattcttgggcccactgtagacctgctgaatcagaaacgctgaaggtagggcaaacaacttgtgttttaacaagtcctccagattattctgatgtgtgctcaagtttgagttccactgacttaggccctggggatataaaaaaaaaaatgaaaaacccataatctaaactatcagttcttagccctggctgcaattaaaataagctggggagcttttaaaataataccagtctgggccccatcccagaccaatttcattagaatttctaggtgtggggaagtcatcacaatgcaatatactgagtgcaaagactgtaacagggtatgcaggcaagtgagaagggatcctgcagtaaggagatgaggacaagcagctgcaccatctgtgcctccattttctcatctgtagaatggggaatgtaacagtcccttgaaggactattgagaattacataaaatgatatawggaaatgcccagtatatagcagatgcccagtgttcatcacttcccttctttctccagaatgggcccctggttgactctgagttgagcagctgggctgctgtgtttagaatgtcccctacactggtccctcatcaaggacccttccccaccaagaaagaaaacttcatgactgttcatagtttggggcaagagttctcttcagcagccatctccataatcccagcatcttgattcgctgtccttaaaaacaggctgggtcccttggaaccagactttccctataagacagctcacagtgcagaccccagacctctaacacccccacaccctttcaaagaacacctattttttaaattttattttccataagttatcggggtacaggtggtatttggttacatgtgtaagttctttagtggtgatttgtgagatcctggtgcacccatcacccaagcagtacaccctgcaccatatctataatcttttatcccttgcccccctcccactcttccccacaagcctccaaagtccactgtatcattcttatgcctttgtgtcctcatagcttagctcccacatatcagtgagaacacacgatgcttggttttccactcctgagttacttcacttagaataatagtctccaatctcatccaggtcattgcaaatgctgttaattcattcctttttagggctgagtagtattccatcatatgtatataccacattttctttatccactcattgattgatgggcatttgggttggttccacaattttgcaattgtgaactgtgctgctataaccatgcgtgtgcaagtatctttttcaagtaatgacttcttttcctctgggtagatacccagtagtggcattgctggatcaaatggtggttccacttttagttccttaaggaatctccacactattttccacagtggctgtactagtttacattcacaccagcagtgtagaagtgttccctgatcaccgcatccacgccaatgtctactgtttttttgttttcttattatggccattcttgcaggagtaaggtggtattgcactatggttttgatttgcatttccctgatcattagtgatgttgagcattttttcatatgtttgtcggccatttgtgtatcttcttttgagaatcgtctattcatgtccttaacccactttttgatgtaattgtttgtttttttcttactgatttgtctgagtccgttgtagattctggatattagtcctttgtcaaatgtataaattgtgaagattttctcccactcagtgggttgtctgtttactctgctgactgttccttttgccatgcaaaagctctttagtttaattaggtcccagatatttatctttgtttttattgcatttgcttttgggttttcggctatgaaatccttgcctaagccaatgtctagaagggtttttcaaatgctgtcttctagaatttttatagtttcaggtcttaagtctttaatccaccttgagttgatttttgtataaggtgagagatgaggatccagtttcattcttctacatgtgggtagtcaattataccagcaccatttgttgaaaagggtgtcctttccctactttatgtttttgtttgctttgtcaaagatcagttggttgtaagtatttgggtttatttctgggttctctattctgttccattggtctatgtgcctatttttatgccagtatcacgctgttttggtgactatagccttatagtatagtttgaaatcaggtagtgtgatacctccagatttaatctttttgcttagtcttgctttggctccatgggctctctttttggttccaaatgaattttagaattgatttttctaactgtgtgaggaacgatggtggtattttgatggggattgcattgaatttgtagcttgcttttggcagtatggtcattttcacaatattgattctacccatccatgagcatgggatgtgtttccatttgtttgtgtcatctatgatttctttcagcagtcaaagaacacctctttaaagcaacttgataaaggccattttagttatactaggaacatgttgtcctattccggctgccctgaaactctttttgcctgtggttccaggcaagcagacaggctcaggatgagatctctggactcaggtagccctccctgatgcaggatttgtcagtatccaaactccttctccaggaacatgtgaacgataggggacttggcaatagccccagattcctctagcgcctccctccccataaggcacaggagtgggtctgcaatcacaggcagtgccctgggtgggccctccacaatgccacagatcctgacctgtggcctcctgaattgaagacagaaatgagggctgtccttgttagctacctccggggctctgtgcttattctagcagacactaaacatttttgaacttctgaaaacagcctcgactgtcgttctaaatttaaaaacaagcaaactgtttcattacttaatagacaaaccttgtgttgtgtttttttgaggtgggggagagaggaaggttgttgttttgttttttaaactaaaatactgtcacccagcttgcccagatttgattccctcttccccagattttcccgaatggagttgggctgtttccaaaaaccaaattagtattcaaaaacagttctgaagttttaatcaccactaaggatatattttttttaatttttaaatttaaaaaataaaaagtaaccctgcaccatcagatcaattggctgttcccagaatgcagatccacagttggaacacaggcagcatccctggcatgagctgcctcaaggccgtgctgtgaggagagtaaccctcatctggaagtggtcagtgaggcagtcagtcatgctatcacctactaagtgcctcagaaaccaaattccagaggacagagaggaagatggatttgacttcagagaaaacagtgtaaatgccccagcaggaggaaccagaacaactcccaaagagacaggggctgccaggggagaatttgtgtcttcagaggttaaggtctggtctagttccctgcctctgacccacaaagctctcatgaaagaacttggaatgtgagacggggcaaaaatccctgccaaaacagccatgaaggagccagaaaaatgaaggtgccacaaagcttttccccaattctctgagttacaaggccctggttccttcccagacacaacaaagtcaccttctcctggcctcatcatcctcctcttccttccccaagtcctgccgtgtgtaaaagaagatctctgcccaggctgaccagaggagagtaaggtattttcttcctggctttgcacattcattcagccttgaaaagctcaggccaggaaagaagtccaggagtatgtgttgtgcggtgctgcagtgctcacttcccagtgatggaggctccctctcactaagtttcttctcctcccatcagtgttctcaccggctcgggttctaggctctgggcacttgaagtgatgattgagcttccctcacaaaccttaggaaaatgtggccccaaactaagcattactaatgcacagctttgctcatcaagacatgtccacctggggctccaacagggtagaggaggctggagggataggaaagtggttgtgtaattcaggcagcacccagtcatcagcactaatgatggaaagagatactgggttgttgaaatgatggataatcaatattccagaataatggatattgtttgttaggagacaacatgattcttggcagctgagttgtcttcttaaagatctacttgtaaaaaacagccacatgaaaagaagactgttccagatttaaaactgaccatataatacacatacggaaaaaaagtgagaactggctatgtggggaagacatggaggaagttagagctcagagggacttatgacatcatttcccccattttacagaggaggaactaaggtccagggaagcgaacagattgccttgtgtcacataattatttggtggaaaagccagaaatgggcctgggttgtctaaacagggcactgttcacttggccacagtagtccaagggcttcacctggaaaagaaccatcattctaagcatgtgatgctgacctcccggcagtggctgcttctgtaatcaccacaatttcccaacacacaagtcacctcatgtgttcctacaccctgatgtcacagctgccactgagagccctgagccaagtaccatgatgattcataaatcactgcccaattctttaaagtcacagcattgtctttgtcaacagcaccttatgtgattctaatcagtagctgccatcaatttcatcaagttcaagtacaatcttacttcttagtatttgggtggcccttttaatgtttttcaaaaactccttgatagcttatacctcactttatgttcaccagaccccatgggtcaaaggtagaggagtgactggaaggtctatttcatatactccttgaagaactgacctgtaagtaaacacagttggtaactggggctgagagactatagcagaggactcctgagtcacagactccagttctttccagagcaagttggaagcaggaaaaatatgctaaaattcacaagaagtttcaggggcaagaaccttaagaatattatctgttaaccttcagacatatagaagacactggggtctgtggcaaattactcagcatcacacttcagcaatctctcttccttttctttgctttttcattaaagcataacttgcacaaagtatacaaatcataagggtacagctgggtgaatttctgcatatgttatacactaatataatcaccagaccaagatttagaacatttacagctacccagaaggctccctcatgcccccttccagtcaagaatagctattattctgacctctgtcccacacattaggtttgtttggtcatataagtgggagaatacaatatgtattctcttatgtctggcttcctttcgcaatcttctaagatgcttctatactattagagtgccaatagtgcgctctttatcttttctgtataacattctgtggcgttgatatacaatgtatttatccattctactgttgttggaaacaacattttggttgtttccagtttgaggctgttatgaataaagctgatatgaacattcttgtacatgcttttgtttttgtttttagatggagttcaaatctattgggtatatccaggtgtagaattatgggttcatggggtgtgcataatagatatcatgaaaattctctttaaagtgctgtataaatatacactcccaccagcaaagtaagttccaggaactccatagtctcaacaaaacttgatattattggtaaatagtcatttttaaagtatcactggaaaagacggtaccccatgtatgtttccagataactgatgttagtctttaagcagtttttaaaaaaaatctaataattttacttcttgaaaatagtaaactacctaaccattgcagactacactgagaagttcagagagctctgaatatacatttaacatattcagagatatactaaatatctaaggatttcactctctcctccttcatgggtagatatcactaaggtatcagcagcccagagcacctccctctaatctctgtcctggaaaatattaaagacggcccaatcaggaactttaatttatacactaccataggtcaataagttctggtcacatgggctttccactagaaaggctatttctatgtcctgaatggtaaaagttgtccccaaaataggtaagtgagttgttattcatttcacttgcttttatgtggcttggcaaatgttaatcagttatcaaacaatacacatttataaagcacatattctgttaccgagctagacattctggaagttccttraaggggcagggctccagaacacatcacatggaatgttgtcatctgccttctttttctcactttacccatccaacccctttcacagatgaaatgaggttaaaacaaacttcactgatgaccttggctttagaggggaaagcaaggcccaaaagaggtttcctggggaatgaaaacagaagaagggagaacagccctgcccatagggccatggtgatagagtgaatgggtgattgaaggcgacgtgattattacaacctctggtcttctttacaacagaagaccaagctctatcttatcctttatccaacctccacccatcatgaacttccttctcccttgcctcttggtgccattgtccaggagattgaagtagagcatcacatcccacacctaaccaccaagtgcagtgcctaagacaagacatattccctgaccttacaaaacataccacccttaaagagtatgtctctagttgggtgggtaaagtgagaaggggctctgttctaaatgcagggtgcaaactggagtatgagtcactatggacaggcattgagctgatccttaaagcagacaggacttaaggcagagcagtgaagcagacgtagagagtgctctgccctctagcagagcaaaagacaacagtaggaagaacatgggacccttgggatctgtgaatagacagcacaagcctatctaagtggctttccatgccaccatgatgctggggcaccgttctgctaatgctcctgagtatgacggaccttcctcaaacaaaagctgcctgagcacaatgactgtgacttttaggaattttcttaggaacacccaaatatgagcatgctgaatacggctgtacgcagttttactcgtaagcctctatgccctcaatttcacaattcatagtttctgcttggctctctagatgtcaaatgcaaatgtctgagaacaactccatgattttctgggatggaaagctgcttctatccctgtgcagagatataaccaagccaacagggcagctaacacagaggaggggacagggaacaagcacacaatgtttagaccaatgagatgactctggaccacagaactcttcaggaccagttgaaaaggacacagtgagcatctgagaaggaggcaagtaggaagacctcggcaccataccacagtcacctgcatgaagttcttggattacaatgctcccctgcagaaggctcacttcttctccaaatagcttttggggcctaaatcaaggtttttcatggctctgtagtcttattccatcagaaaagaccttctacttctctacttcttgttacttggttgaaattttcattccattttcctgcttccctgtattgtcaactcagagggaacatttgccctctggatggggcagaagtataactaacacctttgaattgccaacaagtgaaatggcattgagctaagacttccattctcagcccaaaagtttatttgacctcaggcttctgtgtttgctatctcaatagtctctacggaaaatccatctttttcaggtccaaatatcttttaatatacaaaaagtagcaagtggagagaggggtgaggaatggccaccagacaaacaagcataacactggttgaaagcatcaatgtctcaatatcccagtcttctggttttctttgttcataaactgatcttattccactgataaatgtgactatagtaataattaataacttgagaaaagttagtgtgacacatcagtaagtgcttcttgagggtggggagttggccttagtcattgctagcacctaccatacacctgccacaaataaaagtacttaataaatattgagggaatacatgattgaagaaaggcaaaaactgagtaacttaaaacatattctacatgtcaaggacataaattcttaagggacacaaaataatgaagagatttcacctctaaaactgtggaataagcataaaaaagtaaatgaagcataagagaaagaaaaaaaataaggagacatggatcaaccaaaaagtataacacactggcaaaaagactgtgtgatagtaataactgctgtctcaattagctgaaggacttcaagtagaaatgaaattgtatagctttgcattactctagagggttgaactaaggtcaacaagcctaaattagacaaagtcagatttcaattacataaaataatttactaacaattagatctgaccaacaataaaattagctgtctcatggaatcatgagcactttgtcactgaagataagaatcaccatcactcagagatcatctagaggcaatttctgcctcaagtggaaagttagactaaatggactctaagatctcattcataactaagtttctactaatctaaaactctgtggtcaaaagtgggtaatatcaagcaaagcagacttcctgaaagagggaagtttggggtcagattgagaagggggtaacagagaatggtaaattagtctagtttagaaacacaggtacatattggagtgtagggtccagaaacctcagtaaggggaggaggattagaaaataatcactctgacagtataattggtctcagggacactttaaggtccagagatattattctcagaaacatctatttagaataaattggagccttcctaaactggtaggtaatcctaacctgaatcaaatttaaatgggaaaatcttatcagatatttgacaggttgaggcaatatggagargcaatagagtcgcaaattaaaggaagacaataacaaggcaagtctcacccacaaatctgcaaccaatttgaaatttatgaagggtgatctctgagctgccttgccacaaaagtacccatcctggcagcttggggctcctgtcattatcgaaccaggggtcattattttatgaatcccatattgtagttgagccagatagacaacagcaccttctttcatttcacttggataatggccagatacaagtcactttactatgacttagagtattgtgcccatctgttcacaattgatgggaataattgaggggtggaatgtgccaggcactcttggacaagctacagaagtgggctaggggctttcttggccatttgccatgtgacaatgattccctcatctgtgaacatatggagtagatgaaactgtcacttggagagcatggtacagcagagcttggaccatttcattttcacaagaaactgtacatgagttatagcaaggaaatagcttttacatcttgattacatcatgagaaattcttccaaacttgtgactgtgtaaattctcttaggagaatctggccttgtgccccaaatcagaaagaagttataattggatgtcatctatgtccaccatcttggatttaaaacatggaggcaaatcaccccaaaggagaagagtggccaggggatgtcctgagaccacacacaaacctccgttttccacctctcaagatgcaggagtggtggggagcaggaagaagcctcaaatatttgctcagactttgcaaaaatttcaatgattgaaagaaagaaatctgaccaacagtcgctgagaaaacagttgaggtaatattgggttacaggtatttcttaacataatattgaggaaaaaaataaaggaatcctactgaaaaatccttctgattgatatatatcttttcaagtttggaaaatttcactcatgattaatttttttttaatagagaamaaaaaacagaatcattaagttgaggactggtaaaagcaaggaaatctctcccaattcttggccagacattcacaaaaccatgattctctcctattcaacattttgtatttcaaggcaaacgatgaaggcaaaacagatgttcctaaaaggcaacctagagtcagaagagaatgttagtaggtaagctgtcgagatttgggggtatgaggtggtagagtcacctccttttcctccaaacctgcctcagagtcaggacgcaaaccaagacgcagcctctaactcatggaaccactcctgctcaaagcagaaacacctratcaggacagcccactcctaattaagcagagcatctgatggcctaactctgaatcatccaggctcttaacaacacctctttactcctcctaagtatttccctgccactcacaggggaatcaaaggcaaggagtagaagaaattgactccaagtcattttactttttgtgggccactgtgttgaaagcatttctaggaagggggattatactgtaagttaaaatgaggtgtttgtgtttcctctggacctcccttagactccctcaaatgtccaggaataaggaagagtgggcctggaagacagtgactgcctgcactgccaggcacggcaccagagccctccacccaccacatcacagcttcctctcatctgtgtgacagctcaaggtcaccagctcatggaggcttgctcattcactacaccatctctgaccttgggcttcctccttcccttcaaactctcctgtcatcatgataatcagtatctttgagtcatttcatgtgtagttgtctgttctcatgattagaaactaacatgaaagaacagagcaggaaacttgtaatccaaggtcctagattcaaggcttgttgctaggaagccatgggcaaatctcttcacctttttgagattcagtttcctcatctgtaaaagggcaatgataatccttgctttactgattcagaaggctattgtggattccaaatgagataacccatgtgaaacccttttgtaaattgtaaatcatcctatttctgttgctggtacagaggccatgtctcttccttatactccaggttctgaactagggttgtaccccactctgtaggctcagcaagatttggtttaaatgcactgaatgccttgtccctacaacgttaaacgcaaaccctctcccacgcattaccatatacaggtatacctcagaggtattgagggtttggttccagaccaccacaataaagtgagtcacatgaattttttgttttccgagtacatataaagttatgttcacactatgttgtagtctattaagtgtgcaatagcatgtctaaaaaacaatgtacatattttaattaaaaatatttcactgctaaaaaatgctaacagtcatctgaatcttcagcaattcattatctttttaccggtggagggtcttgcctcaatgtggatggctgccagaaatcaggatagtggttgctgaaggtgggagtgcctgtggcaatttattaaaataagacaacaatgatatttgccacattgattgactcttcctttcattaaagatttctctacagcatgtgatgcagtgtgatagcatttttcccacagtagaaattctttcaaaactggagtgaatcctctcaaaaccagctgctgctttatcaactaagtttacagaaatcttttgtcatttcaacaatgttcacagcatcttcaccagaagtcaattctatctcaagaaaccactttctttgctcatcataggaagcagctcctcatccattcaattttcatcatgagattgcaataattcagtcacatcttcaagctctacttctaattctagttttcttgctatgtcttccacatctgtggttacttctgccactgaagccttgaaccctttaaagtcatccatgagggctggaatcaacttcttccaaactcccattaatgttgatattttgacctcctcccacgaaccacaaatgttcttaaggcatctacaatgatgaatccttctcaggttttcaatttactttrcctagatgtatcagaggaatcactatctatggcagcaatagtcttatgaaatgtacttcttaaataataagacttgaaagtcaaaatcagtccttgatccataaactacagaaaggatgttgtgttagcaggcatgaaagcaacatttatctccttgtacatctccatcagagctctggggtgaccaggtgtattgtcaatgagcaagtaatattttgaaagggatctctttttctgagcagtgggtctcatcagtgggcttaaaatattcagtaagccatgctgtaaacagatgtactgtcatccaggctttcttggattcgggatttgggggaatggtaaatgagcattgggttcaacttaaagtcaccagctacattagctcctaacaagggagtcaagctgtcctttcaagccagacagtgacttctcttctctagcttcttccaatagaaggctatttcatctacattgaaaatctgttgtttggtgtagacttctacatcaattatcctctagataacttgcttcagtttttacatcagcacttgctgcttcatcttgcatttttatgttgtaaagactgcttctttccctcagtctcatgaaccaacctctgctagcttcaaacttttcttctgcagcttcctcccctctctcacctttcatagaattgaagagaattagtgctttgctgtggattaggctttggtttaaaggaatgttgttgctgacttgatcttctatccagatcgctagaactttatatcagcaataaagttgtttccccttcttatcatgtgtgtgttcactgaaatagcacctttaatttccgtcaagaatttttcctttgcattcacaacttggctaacagtctaacacaaggctttctgcctatcttgccttttttttttttttgagatggagtcttgctttgttgtccaggctggagtgcagtggcgcaatctcggctcactgcaacctccgcctcccatgttcaagcgattctcctgcctcagcccttgagtacctgggattacaggcacgtgccaccacgcctggctaatttttgtgctttttgtagagactgggtttcatcatgttggtcaggctggtctcaaactcctgatcttgtgatccactcacctcggcctcccaaagtgctgggattacaggcatgagccactgtgcccggctgctatcttagcctttaacatgccttcctcactaagcttcatcatttctagcttttgatttaccatgagggatgtatgactcttcctttcacttgaacacttagaggccactgtaggattatcaattggcctaatttcaatattattgcgtctcagggaataaagaggcctgagaagagagggagagatgagaaaacagctggtaggtggagcagttagaacacacacaattattaagtttgcagttttatatgggcatggtttgtggtgcccccaatcataatagtaacatcaaagatccctgatcacagataaccataatagatataataataatgaaacagtttgaaatattgtgaaaattaccaaaatgtgacatagagacacgaagtgagcacatgctattggataaacagtgttgatagacttgctcaatgcagggttgctacaaaacttcaatttgcaaaacatgcaatatctgtgaagtgcaataaagtaaagtgcaataaagtgaggaatgcctatacactcagaagtcaagctttcatgcatatcattataaaaatgcccaccaagaaggctcctgcagtctggctttgtgcacccctacatataagacaggagagcagatcaggacctcagagtgtgctgaaggacacaatcacagcagcagagtggaattgagcctccaccagcactgcagactgcactggtatatccagctccactgcccagaaagcaactatcttccatgacagccaggaattttttctctttctctttagcaccaccacctgcagaatttccatcacaaccaccgcagccaaactctctggcaccactcatctcaccatttggcaagtgcaaagcccaaaattctctcactgggacttgtttctagagtcataactaaaatctctgattgcccaacagagagcacctgggagaccaaaaggagaagaatgctatgtgacatctgaagccactaattgcccatcttccctgaagcaatgtgctgacagtatcctgtccttttttctgagtgtctgctaacaggtctgcctgtgattaggaggagcacttatactgctactaagtcactctgcaccttcaacagctgacacctataagcagctcctttgttttacagtaaagcaaattcaataattaatggccttatggagaattccaatccacagcctctttgaacagggctgcaaaagcatccccaaactgtaaaattgtttcttcaagtagaaataaatcaccacttcttgcattttatcatacaaccaggtgccatgggccccagagtcaacccttccctaatggtctgataaaggagataagaaatagctgagtgctcatgggtgacttgtgcaatattttacaaatatgagagagaaataaataacacagtactgtagacatggcaatgatatcctctgaaaaacttaaaatgccctctccactgccacccaatttctgtcatgttttaaatatctaactcaagcttgacttcttccatgaggtagcttttctctgattactccagcctagaaaaatttattcattcaatatttctttattgagcacctactgtataccagacattgtgctagattctggagatagaaaatataaacaatcaaaacctctatctggtggctacattctctagtctactaatagaagtactgtttatactcctgcatctttcacagatagcatctcctggaactcacattactcttcattttacaaaataattattaacatgtctttttaagtagccatttctgatttctttttttttttttttttttttttgagatggagtctcactctgttgcccaggctggactgcagtggcatgatcttggctcactgcaacatctgcctctcgggttcaagcaattctcatgcctcagcttcccaagcagctgggattacagggtgcaccaccacgcccagctaatttttgtattttttttagtacagatggggtttcaccatgttggccaggctggtctcaaactcctgacctcaagtgatccacctgccttggcctcccaaagtgctgggattacaggagcatttctgaattcttttatattctgctaagagaaggtgctgcataaatacacattgaatgaatagttagctaattatgtgaaaatatrkatatatatatatatatatatatatatatatttttagtattcctatctggattgtaagtttcttgaaaagtagggattcttctgttcacatttctgtatcttctagaccatcagcacagttctaggcacatggctcattctcagtacatacttagttaaattcagtaattctgctagaaatgggagttcctattctacatttataccattaatcgcactctagatttagaaaatgggaagtctaaggcaaaggaaaacaagatggtcagttctaagtgacagtcccctcaacatgctcgctaagctttctctctgaccaaagcactgtgtttttgagagaggaataaagtcatatttcatctgtggggatttacctaaaccacctgtggattgcaagaagaaaaccagaatggaattagagcagcaaggctgactttggacagcaagaccacccatagaaacatccatcatgtgacccacactggatctgcctgccaaaggaccatgaactcaggagtcagagccacctgccctgtcgggggaacggctacagcccaaaccagtccaggaaggcctgggtatcctcatcaccccatgtacccacactgctgtcttttgtttcagcctcttgaaatccatctcctagaatagccagttttgctctgataagccacaactaagaaagtcagtgaactggggctgacctctgtggggagatgggtcaatatcctctactaccttaggtgagattagatggattgatgttgttctcccaatccccaaggtgtgagcacaccattagcattggtaaagcatacccaagcagcagcccaggaatggcatcaggacatccgtgtatcacccccaaaggtattaacctgaatcagagcattctaagttctagacacacttgaaagctgtctcagggtttgccatctgaaaattcagagaacttaccctgaagccatcctccctactcctcaaattagaaagtgccccaggaccttcaaaatcaaccttaaataacaaaaaattagacaacattttctattccagacacaatgctagaccatgcttcagtcctacccgatctgaatgatctgatccctgctcatgttgggacagcctggaagtagtcctgcctcctcccccatccttgcgatctgagacagatcctgaggaagctgctcttggaagccagcaatggcatttagtcatgcaaagcaatgagctgacttcattttcctcaataaatatttcattgagattcagagaaataacagaaatcttactcatgagatttatgtttgtcttaatgattcacagcataatttgttgcaaattaaatatttattttaatatcttcttgggtctgaaaacttctgtccatttatcagtgagtctttgtaccatcagtcccctcacagatgtgaagacattgggaacagtctaattcttctctgaagtgggagtttttcctttccagctccctcttaatgaggagcctgcaccacatctgtgcaacagttgcactgtctctgacacatcccccagggccctgtcagtcagcttccactccctgttgcctctcgccttgcaggtctcaaatctacacacattcgtaaaaggcttacctgctcagctacctctcccacctctcccagccacagaatcccagagacactctctgtaaaacaaggtgggggttgagagaaggaagaaagctgggctctcattacagtatgatgaaaaggagaccggaattggaacaaagagctctgagttcaatgtcactactccatggacatacagtcttatgacagtcacttatctggccacgtcctacttgtaaaatggggatacatatactgctgaaagactcaagtgagatagatggtggacatgctttataaactgtaaagaatgacaactacctgccagagttgtgacaattaaatgagaagacggatttccagtgtttggaacaaatctggtatataataaatgttcaagtaagacatcgttataaaaatatgagaaattaaatatgtttactttttttagagtgcaatgactatttaggcctcactgcctggcatttacatgtggcctaagggaacatgtcccatgactcacatagagagatgcacagaagtcttaggaatctccagagcccacgtgagggacagagggcttctgtggatgcatggaagtgtctcctgcaactccacggaatgcttctgggggctggaaagttgtactttttaaatgttcacatgtatatctttgcagtctcctgcagaaaccctctctcccacagagatggcataatcctaastaagttgctaaaacttccctagatcctaagaaaagcattccctgtttacttcacagggagtatagtctaagccacacacccccatcggccccaagaacagccccctccaagtggcagccagagccatctgccatctgtagtccctctgtcctgtcccccagctgcgagtcccaccacgtagtctccctgaaatatggcccaggcacagatggaagtgtctccttcatctccacggaatgtttctgggggctggaaagtctgacagtcaccctgagggaaggcactctcctctgcctacctccatgccagccctcagggaggtttcctggatgatccctaagaggaggcaagatggatctgggaggagggaatgagtagattcccaagacagcttaaaacycaaagagattttacgttcaacattaattaaatgtcatttctaaaatttttaaatccctggcactgtgagaaagatttacaatgctaaagcaaaaagggcttctgaaaagtaattataaaggcttataagttaataatggctttgtaccttgtactactacagctaattccattatcttagaaactaaaaactaatgttcagtaacttggtgaatgcctcaatctgaagcttctgaaagaacggtgccaacagccttcttggccaccacatcatgttaagtaattctctcctccaggaagccatcccagaatatctctcaccaagtctgagtcatccattcactctaaacaccacccaccccactcccccgacacacacactgccttaatgttcctctacttcttccggaagaatcttaaattaacacaagagtgcattattttagcacctataaaaggatcagctgagtgatattagccaaaaggaatgaatgaactgtttaaggtgtcaaagcactacaagggtcagagaggttctgagcaggaggcacttttgtagcatccttcaaatcacaccaattctgtcttctccagagatgacccttaataaatgtttagttatttaaatataaaataatttgctgattctccccacccccagaatgttcaagggaaaaaaaaaaaacactgtttttcttttccataaaagaaattcctagtatagacccctagctcagggcagcaggtcaacaaaatacacttgaccacacaccagccagtccccccttctctccctctgagctgatgcagatcaraaggaagcctgcaaggtctgaaatctgaccttccatctgccacttgatcttccatctgccacttccccaattcaaaaggggctaggggctggaggatacagcaagaaagatctccagggatccacttggtggtgagcagatgttaatttggactccaaataggatagagtaactctgcttcaaagcaagaggcctaaggtcacagtcaaagacactttggtggacaaaggagattccaagatgttactgaacartccaacatctgactctgcctccaggaatctacagtataggtacagtagtctctccttatgcgtggttttattttccacagtttcagttacctgtgatgcaatataataagatattttgagaaagagtgataccacagtcacataacttccattatattgttataattgtcctatttattattagttattgctgttaatctcttactgttcctaatttataaattacagtttattgtaggtatgaacatacagggaaaaaacatagtatatttaggattcagtactatctgtggtttcaggcatccactggggatcttggaacgtatccccctcagataagggggaactactatattctcatcatcatttctggacagaagagaggaaaggatacaagacttaagataagaaaagctagattagaacctaattatgcataccattatccaggctgaatgactttgtcaagtcacttaacttatttcagcctcagtttcctgatctgtaarataggatctatactattttgaaggttgagataagcacttaggacagttcctggcacataggaagtacttaatcaatataaaaaaaattacttagtgataatacaaccattatcaacaggccacattctccaagttctttttccagtacaaggactagatttttactatctgtctatgctatttttgctggcccttgcatgactaataaaatgctactaaaagactaccagctggaacagaagatgtagtctctagccatgaccaaagagaagatatctggccaccagagggaagagagctgggctgcagccttggcctcatgaatataacatccaggccaactaagccagcagtaccatacggatattctaaaacatcactgtcactgtaagataaatatgcaccatacccttcatttgagtacagaagttttaagtcaccaaatttgattctttgtggaccatacactgataaatagatcttatctttaaaaatgcatccccatttttgttgacaatcctgtctcccacagtgagaaatgttcctggaaccagggtctgtttcaggaaaccaatttaaattcatgaagcttctggtatttatgataaaatgaaagtaaatctagttgaagcaaagacctacattcccaagacaactgaccattcatttattagttgctgcccctagctaacacccaaaccacaagctgccgttgctygacctccctgcaggaaccctggtcattcagaagtaccagggtgaagctgaaaaagaagggggaacaaatagctttaaatcaagggacacaccctctacagccaaggtcaacacccaggaagggcagcagggctcggacagtggcagaaagactccacccatacagcactttgaacagaagctctcttccaactggaggcatagagctagytgctaatctgacggacgcccaaaacagagaagtgggtaaaaataaaattacgactgctcccgtgagaaggccaggaagagaacatatcgaaacaatcatggcctgcagccctgcctaacaccagtgctgctaagtgacctcagccaaaggcaggaaatgattgatcaagttacttttcttgctcaaaatatcccaatggctgcccatagactactgaataaaatcctagcatgggaccgaaagcccacccaaccaacctttccagctttctctctcaatattcctaatctccttcatacacattcacaatgtgtataaacacacatccaccacataaagactatttcccaaattctcccttcttctctaggcctcctctatctccacaagcccaacttttacccatcctttaaggccctttcaagatcaaatccacagctgaaattctcctcctcattttctctgctcccatggcactttctaactgggtaatgtcttcccttcactgtcattctcatgaagacaaagattctgcctctcttgttcacactcataatagtgcctgcacagggtaggcattcaatacatatttgttaaattggggaatactacctcactgacgggaagtttcttctgtgacttgagtttcctagccttcaccagacaagacatcccattaacagaggcaatccaaattccactggctttggcctgatcttcttcctcatgttgyacctcagcccctgaaaagtttcatctcactatgtccaggagccccactcatatctccccatgctcattcctgctcacaaagcattgtcagccgtacctgccatgtccttcctctgctgctctggctgcccgctgttgctggaggatgcctggggtgccctctgtgaggacaccagtgtcggatccagagtgcttgctccagggttctcaaatccccaatattccaagtgccaagtagcctgagttcccgaagtcttcactatgccaggatcaagccttgatggaagctaagtccatcttccccactgtgttcacaagatcagcatcatctgtccccatatgtcacacagagccctcatgaaaacagcagacagctccttcaacttttgcacagggttcctctcctcagggctcagatgtgagcccacggcattggctaaagaagaacccctgggaaaaagagctcatggtatccccaaatcccatttctctcttcctcccatccaaatccatcatacaaacaggtaccaaggggtgcttkcctctctgatgaaatggccagaacatatccaaatgccgataatggccactttgaagactgaagttacacttctacctctacataactgttcttccaacctgctccctcaagcctggtccctcatccagctgcctgaggtggtgacaaaaggctgccttttaaccctttctcttacctttctccttttaaaaatatttccacccagggcctactctctacccttccagcactaccaaagaccctgttgcctcagctccttcctttctgggttgagacagatattcaccatggcccttggatccttctctcctkaagtggttgataagaacgggtttctgaagatactgcccagaatatgatgatttatcgatgctgacgccttctaatgcctgccagttcatgtatttattattctgggctgggccactcaagctcttaatcttaggagaaggaactccagtgaggcaggatgtaccttgagcctcgcaggctgagccagcaggagatagcagggcacctgccccctctgaggcagcccagctcagccacctggccagtagtctccaggtgaggaggcggggccttaaaagaaactaccaatggcttcactcctgcaggaaacatatcccagtcacaagcaggtacacaggtacagcctgaagctgaagtttcccccagggccttgggccacacttcaagagaaatggaagttagtcrtcgactctcttccaattcaacttttgattatcctctttcaaagcccagatcctcacatgcatattctatctccgtaccctttcaaaacctgccttcctaagccttcagtccccagagcaccttataaccactccaccatccccttctcatccaaaagttagattttaggcaatacaggttaagaattaataactaacacttattgagsctttaacatgcgtaacatcacctaatccttacaataacactataaggtaaacataggatattattggcatcttacagatgaggaaaccaaggcctagagaggctgtgacatgcccagtgtcacacaatagtaagtggtagagctatgagctaaaccaggctgtttttatttcaaagcctcctcccacttaactactcagcatactgcctgaaaagcaagccaatcagctaaacaaacctcgtcactgggcttgacacatccgaatttattaactatttttcctttggtttttttaaaggagtctggtacataaatcaacagctttaactggtgggattgaagaatgaaacggcatggaggtaatcaaaggagacatgcagttatgtagtacatgaaagtatatctacaagtacatgtagatacactttcaattcacttttaccctacttgtccccaccctcccccaaaacccagctgtactcagctgctcgtgaccaaaaatatcaccccatgcctactttcaacctgcttggcacacttcctttgggtatcttctttgagggactttcaagagctagcaacctgtggcaaatgacaaactaggaagggggacttctaagatgagatcaagccatagatataggatatggaaaacagaaggtggaaagatggaccccaaacctgtggaaggctagtgttcaggaattggacctctgctcattagatactccagtggtgcagttggggacaggcaggataaattcctatctctctctggggcytcttgtccaaacaggaggatctggtttctgaacttctgggagcaagccagaacttggaaaagatcatctttgtaccttcatacctcgccttctgtggtctcctgctcccaggtaacaaaggcaggtatattagatcaagaaaaaccttctgccctgctagggaagggatgctcatgtttccaagtttttggaggattcttttttttttttttttttgtgagatggagtctcactctgtagcccaggctagagtgcagtggcatgatctaggctcactgcagtctctgcctcccgggttcaagcgattctcatacctcagcctctcaagtagctgggactacaggtgtgcaccactgcacctgactaatttttgtgtttttggtagaggcaaggtttcaccatgttggccagtctggtctcgaaatcctgacctcaaatgatctgcccgcctcagcctcccaaatgctgagattacaggcatgtgccaccgtgcccggccaggattcttaagccttaatattttctttcttctgcaaactgcagcccacctctaccaggagcacttggaaggacccagctcattcagtggaatcatgactgcatcagatctattcctattttgtacaatatgcatttatagaagtaatttgtaatatgattaagtttggggagtgaatttccaataaagccattcttcctgctatatatctttttaatatttttgattaaataaatttattatattttgaacacagagtatcccaaatttttccagtttttaagttacaaagtgtgttttcaatgaacatgccccctatatttatgaatcctttctgtattacgtttggctctatattttcttgcaccattcagagcacgtaggtctcaaagtagaacaagaaccatgactatgcttcttaatctttaatcctgagcacagactgtgatagacacagttggttgcctacccagtggccattaacccccttcttccttgcttacagacccacattttgttaagaaatcaagcatccatgtgcttcaggggacgcaaagacaacttcagtcccacagggtaaatgctgactacattacaccaatcacggaaattgcatccccttccagtgacttgttttggaattggtggcaaaataatggcctttgagacatgaggaaacatctcctggaggacatctgggaaaggttttcttgctttaaaatatatgcatgaagaaacaggctctttcagttgttatcggttctgcatgtaacatatggagttacggcagccatcttgggactatcaggatggtagaatggaaagatgtaaggtattggggttctaagatggtcttttcttgtagtggcaggctgggtgattaggaccaaccttcccactgaggacaatcatttatatttgtttttattttctcaaaagcattaaagagctaacaagataaagaatttctaggtcaaaacctaggagaagtttaaaatccaaagaggaaggcccaaaacacacaaaaaaagcttttgccttgagagcatttgccaatctgcaagaaacaatagtatttagtttagtagcaaaactaagctgtgcttttggcaaccaggaggagtaggaaagcagaaagcaacatccagggcctctgccccagaagactttgataaacaacattcactctaagctaggcttcctctcagaggggaagcttcaccctcaagataaaggtagcctagaataaactagctgttaatgcaaacctgaaacccagttgactgcaacctaggtcgaaggaatcttaagcattttgttaaggtagaactggactggtggtatcccaggggctgtcaaaagaaaataaaaatcattgcagaagaatgttatcattcttggcttcaaggccagtgatcaagatacaaagataaaaaacacaaggaaaaagtataccatgaagaaggatcatcaggaatagcagaatacagaaagagacccacatttgtggtaatcatttcacaatgtgtgtgtgtgtgtgtgtgtgtgtgtgtgygcgcgcgtgtgtatatatgaaatatatacatatatacatacataaaaatggaatatatttaccatgtaccacatggtatatatatcaaagtatgayatatatgtcatatatatatcaaagtatgayatatatgtcatatatatatcaaagtatgacatatatgtcatatatatatcaaagtatgacatatatgtcatatatatcaaagtatgacatatatgtcatatatatatcaaagtatgatatatatgtcatatatatatcaaagtatgatatatatatgatatgtatatcaaagtatcatgtggtacatggtaaatatattccatttttatttgtccattttatctcaataaagccaggaaaaaaaatcaacccataaagacttcagataatggaattatcaaacaaaaaactataaaacaaataggcttactatgctcaatgctcaaagaaacaaaagataagcttgaaagtatttttcataaaattggaaaccaaaagaaaggtgatttgggaaataattaaatagggaagggattttagcactaaaaaatacaataattgaaattaagaagttagtgaacacatttaattgcagattagacacagctaaaaagagaataaactggaggatatgtcagaggaaattatctagaatgcatcaaagggagataaaaatatctagaataataagaaatatagactatacaacgagaaattgcaacatacaatcagttgagatctcaaatggaaagaagaaaaagaacagagataataactgacaatcttccaaaaatgacgaactacaacattttatagatttaagaaatctaattaacctaggcagactaaataagaaagaagctagtgatgatgttgagcctctaattcaattgcccaaattctaaacttcttgttaagagaagcaggagaaggagaagcaggaggagaagtgaaggcaagaggagaaatgcatttattgcttatgcattttgagtttgggttgaattacctgcagccaaaagcatcccaaattatattcatggtgagaataaagtagccaccaattattgagtgctgactatgtgtacatacgcattttgtgtaatcccctgcaaagccttatgaggtagtatattatcagccaaggcaggctaggtaagctacagatacaaaccaccccccaaatcttagtaacttcacagaaaataagattaatatttgctcatactacatgttcaacttggttcagtagagagctgtgatcatcatagtcactcacagtcccaggctgatgaaggatttatcccaacagagctacaatcaattaaacaatggaaggaagtaaacagtatattggcttttaaagcttccacttggaaatgaaatacctgacttctgctcacgtttcattggccaaagcaggtcacatgaccaaggatgtagagaagtacaatctaactgtgtgcccaaacatgtaggcagctagaagtacttaatgaatggtactaatgactaccacagrtagatattatcctaattctctgaataaagaaactgagactcagaaaagtatttagtcactagttaaatgagtcaagaatatastaattaatacattttcctggaggagatattaacatgactatctgccttttggtggctggagtagtgagaagagaaatgtaccagtgatatgatctctaaggagccaagcagagtacccagttgggtcttatccttggctatcccagaatcactacccccagggcagagtatggaaccaaggtagcaaggggcaaatatcctaatccttcctttgttccttgtgctaagtggagccttccctgcaaggataagactggactgcaattggccaaacagacagtatacacatatatgtactgtgggctcccattatcttatatattccaggtgttcaagatgtgattaacagagtgaggggcggagaagccacataatcagattggtcatgccaagcttgttaactctgatctgtgtaggttcagaaagcttgccaaagcaaaggagacccattctgtccaaacacagaaggagctgtcttgctctcttaagtcctcaagaccttcctatgagctggattttccagcctgtaatgtacagaacattccctacctccttccatacctaatgatgacactgtctacctcctccctcccagcaccccacatctgttggcaagctctcttggctgcccttcctgctatgtatgtgctgcctctgccagcgcagtccagcctcctccagacacagcagcatttgtctgggattctctccctgtggcagggaaagagtcaacaccagggttcttacttatttattccttcccaggcatgaggcagcagttaaggagaagggagttaaggacagggaggacaaggcctagaaaagaagctctagggggccaggttggtggggaaaagtctctataatttcaactgcgttccaaccacattgtctctagctgagccccctgggtgaaaggtctgtatattaccgaggatgggagattgtagtcttaattatgtcttgaagcatttggctgtgttcatcctgaaacttccaacaggaaaaaaaaaatgtggtttccattacactatcactgagggacttgtactggggttgggatcattaaaatgaaaacactgatgagtaagccatggcattttgtctctaagacttaacgtccttcctccacccctagccctgtactttattttgagacaagcttaaaatagtctataaaatatggagctcattatcccatctaacagatttcatttagcatgaaagtagattaaaagccccatgccaattattcctcctatcctgggtttataaggaagatactcctctgggttctttagagcacaattctgcaacagcccaggagaaccaagaagtgccacttgcaaccccactcagcttatttttcatagtgataacaaggaaggatagagaaatgcaatcctgcttttggagcttcttagaaattttgcctggagcctttaaaagctgaacccaaaccagataaccctcaaacacatgaattctccattctgtccacatacaatgactacatcaaggctactgagcacagtaaaggggtatatatcggggaatataatggaaagaggtctcaatttggagttttttattctggcttcacatccaggctcagccgataattgtatgactttggggagtaaaatcatttctttgagcctcagtttcctcatcttatctyttccaacttcatctttcttattttccaggtacaggtgtcatctcctctccacagtcttctccaaggcccagcacaaggctttatatagaagggaggaggaactgatgtcttgattgcactgacagtaccctctgagctggcccttggaggtgagtttgatgataagagtatccaggtgaggctcctctcccttgctgctatacttttcagtcatgggtcctctctcagtcccctcagttttctcatgtatacaatgagaataacaccctcccacaacatcacagggtcatcggaggtttgaatgaagcagtaagcacctatccaaggtcttgaactattccacctctccagtctgagctcatgacactgcctgttcttttttaagaatatcaggaccatctgaactgcatttcctcatttttcactttttctacttaaaaatcattttctaagcactctttcttccttccttacaacagaggaagtgttccccctcctccagtctaccacttccatctgcactctttgttcaatccattcctacctcctccaggtcactgcttcactttagagcacttatcacaagctgttattgcaaattcaactgttactttgacttgtgtattgtctgccttagtcactagaatgtaaactccatgaagatttcatgccttattcatgttatattccagcaaatagcactgtccctggaatactgtcagtgctcaatgaatatttattgaatggataaataaattcatttctgtttgtcatctttaaacttctatcactggtcccttaccccagcctcaaacacattcaggccttcctccttgaacaaaatcatcacttgaccctaatgtcccaccaaccaccattctatttttacctttcattttctgacatatttctcaaacaaacaatatgtgcttgctgctacctcatcttcaccacctcctcccactgcaatctggtttcttctcattgaggtgctgaaacaatgctgtaagtagtcaccaatgccttctgtcaccaaagccctcaacattgcctcctctccacgcacatggagctccctaactctccttctcctctattcccacgaaattattatgtcctggctctcctcctacccttaaggaatactcttcgtatctctcttatcctgtctcccttgtcaatactttcgaaaaacagtctacactactctcacttttctctatgctgtcttccttgagctaataccagtttcaccatcacttcttggcaaatgactcaaaatattcatctcctgccctgacttccccctagaaacacaaacctactttaatgcatgaatgaatcaggcatcttgtaatcatctaaaactcaaagtttctaaatccctttaccaacaccccaagtcctactcatcttttcagacttttagtgtaacagttgccactcctcaagtcaaacctaagcatgaaagcttcaatgaccctttaatatgaagagtaagaaatccctgttgctttctctgacattatcttttacatccttctcttccttcctctccataggccaatgcttccttcacatccattytctttttctccagttstctttatgcattcagattcatctttaaagaacatgaccagcaccaggctcttatgctcagaagttccccatgacccttgctccctcttgtgtgccttaccttcctgatacactgacctgcccccttttctttagctatccatccccttcaacccactttgtgcttctgcccatgctttactgtctagaatgtttggccccaccttctccaccaaacaaactcctattaatcctgcaccccaagctgaactatcagatattccgagaagacttacttctccaacccctctaggcaattagctgttctgtcctctgtgatcctatgcaagcctaggtaattgcacttaccagttttgttgtaaggtcctttttacacatctgagtctctccttaaaccatatgaacccagtagtacttagtctactggctggtaccttggtactgctcaataccttttctaattgaatgctacaactctggaaccatttgcccttaacccaacatgccaatgcaagaatcttcacaaggtagccccaatctgtccctccaaccttaactcttatsacacagatgctccaggcagtctgatttagtcttcattccccaagcacaccctgtatttgctgatttccatcctcgtaattcagggctactaaagcttaaccctgttctctcctttttatcctgtcattgcattatctattgtgttatttgttattgtctacttcccccattgaaccataacacttcacgaagacaagaagactgtcttctttagcattgtatttccagagccttgggtagagcaaagcacatagtaggaccttagaagacatttgttgaatacatgaacatttcttctttcattcagacccaattatttctctcttgtaaattcatagcactcatctagcaacttaacatgaaagagtacctgcggcatcacaaagatatattataggtattataggtaaatattttgtaggtattgtccacacagaaccatgaaacattagagctagaagagctcccccttataagtatcacttgaaagagggccaacagagatgcagagatgttactgttgattctttttttttctctctctcttttcttggagatggagtctcgctctgccacccaggctagagtgcagtagcgtgatctcagctcactgcaacctccacctctcaggttcaagyaattctcctgcctcagcctcctgagtagctgggactatagttgtatgccgtcacacccggctaattttttgtattttagtagagatggggttttaccatgttgcccaagctagtctccaactcctgagctcaggcaatctgtccacctcggcctcccaaagtgctaggattacaggtatgagtcactgcgcccagccttactgttgattcttgatctttcaggagtttgaattgtaagctccctaagggcagcgagcttacacctaaccctaatcactccctgctctacctggacccttagtagagtctattactactgctactaataacaacaacgatactaattgctttggtgttttctttgataacaagccacctctgtccacaaggtgaagagcaaacccatcacttatactggggatccaactagycttctgaatatccagggacacagctgtcccactgccccttggttctcagcaaccactgagtatgccaccacagaacaggccctgggaggacatgccatatctgggcaagtgctgctttactgttctcacatcacagtaatctccaccccactggatggaaacaccacaccgggacctcacaaagcagctatcagtgtccttcccctaggacttggcctagatacatcttgcctgggtagttcacaccacagacaagacatcccaatgatacgctctactacctgctgacagggaaggtggctgggctcccagtttaacatgcatgctggagagacagacagatggagctcttcccatctgtatggcagcaggtagagggggcaacccatcctagacaggagtccggggtcctggatcttgacttttcccttagcagctctctgactttaaccaagcacttaatctctacgagcctgtttcctatctgtgaaacgggaagtgatatgatctatctcagaaaggcataatgagaaacaaaggggtaagatatttggaattatcaaataattacatttatctttttcctccttaacaatgctgtgataatcaatggttccctggagagttcagatactctgttagccaaagttatttattaggtttcctattaggatataactttgaattaggtatctaggtgaaaatacaaaggatagtggggacaagggcttgccctcagggaaactccactcttaatggagggaaattatccctgacaagaaactaagattcctaaagctgcaaaaattcagaaaacaagcacatacttactgagtacttactggtaccaaacacgggtcacacatattagctccttcaaggctcacaacaacctcctgaggtatgtattattactacccacaggagcacattgtgaattacagaacactagccatgcacctagtgaccacgagtctctgaacggaaccaggtacagtcaggggatatttttctggaggacatcagggctaagaggttgggagggaaaagaatgtggattaactataagaagaggaggtttggggcatttcaagagaaagcacaagaaaatatgaaggttgctggtgaggctctggtatagaacaacagggaattgttctgtgatggtgtttcaaaygggtgtgtgttcaaactctttattagacaagaggcctggtccctttagtaaagtgatcttgtgccaaaagccaattaaataactctaataggtatatatacatagatgactataaaagccaatttaaagtaacttctttatgtattacctgaatatttggctcaaatgagaaggtgattaaaacaaactcctctaattagaaaaaccctagcacagcagaatcacccaatgtgcttttcatacacatgctgcgtgcttttctcttctttttcccactgaatataagaaagaaggaacaagtcataaaggttggcacaaagaacccacacatcatgctgggcacacatatgcaatagttaacaagaacagggtaagccagaccacagtgggtatccagagtccatggcaggctagggaccagttacaagcagatggcctaagcacagataccaagtctgacctggttaggggccagagctgtgcagatagctgagcagcaggcaagccaatgasagagcaagtcaaagacagggtatctgtcagacatagaagatgaggagccagaaaaaggctgcaggcatggtgaggatgagagcgaggaaaaggaaagcacaaagatcagggtaccctgacaaccaagaccatgaggtccagctgcctcttgacttcttgcacctgagcagaatcaatccttgacttggaatgtttgggagatttgaaagttgagacaacaaagaatggccagacagggagaggtgaactttagtgacaaacccaagtagattcctggtcaaagtagagcccaacaccatgaagccttgaaaacagttattctccttacctcccatttatcctgaaggcagaaaacgatttttctttctctaattctggcagaatatggacaatgcccacctaatgccttcctagtatgagttatactaaccaaggaaggaaaggtttttgacatctacagtgacagaccaccatccctacctccaaacccctcagcagcctgaactgagagcaataaacccaaagcaagctgaggccaaacaacctcctgggacacaggtcaattgcttttctgggaatatgaaggaaagtcaaggtttatctagaaagtcattgaaaatggttgaagtttgtaaagacagttgcatgaggtgtatccaaaagattgcgttcttacacagtttgttccttagcaatgttctatgtgttctcctatgtttactattcccatgtagtgacttgtttttcgttcattttgttattttgcaacagagttccttttgcccttactctctgacatccatgttaaaggatgacaacaagcagttctcaactctggctgccattagaatcacctacagaggtctttaaaatgccagtgtttagccccctttccagctattccaatttaattggctggaggtggaagtgggggtgttgaaacagaggaactggacattacgctttctaagagttcccagatgattctagcatacattgagaggtgagaacagytggtttctggtccagaatccaaaacactttgtggtagctacaggaatgttgacagtcccaagaagataatctcatttgtctacttttgtttttgttgtttgtgcttttgaggtcttagccataaaatatttgcctagactaatatcctgaagggtttccctatgttttcttctagcaatttcatagtttctggtcttacacgtaagtctttaatccattttgagctgatttttgtatagggtgagagataggggtctaatttcattcttctgaatatagatatcccattttcccagcaccacttattgaaaaggatgtccttttcccaatatatgttcttggcacccttgttgaaactaaaaagcttctgcacagcaagggaaacaatcaacagagtgaagagacaacctgtagaatggaagaaaatatttgcaaattgttaatccaacatgggactgatatccagaatatacaaggaattcacgtaacagcaaacaaaacaaaacaaaacaacccaaataatcccactaaaaagtgggcaaatgatctgaatagactttttctttttttttgagactgagtctcgttatatcgcccaggctggagtgcagtggcacaatcttggctcactgaaacctctgcctccctagttcaagcgattctcctgcctcagcctcctgagtagctgggattacaggtgcgcactgccatgcccagctaatttttgtatttttagtagagatggagtttcaccatgttggccaggctggtctcgaactcctgacctcaggtgatccacctgccttggcctcccaaagtgctggaattacaggcatgagccactgcacctggcccgaataggctcttctcaaaagaatacatacaaatggccaacaggtatatttttttaatgctcaaaatcattaatcaccagggaaatgctatcaaaaccacaatgagatatcatcttaccacaattacaatggttattatcaaaaagacaaaaaataaaagatgctggtgaggatgtggagaaaagggaactcttatacactgctggtgggaatgtaaattagtacagttgttatggaaaacagtatggaggtttctcataaaaactaaaaatagaactactatacaatccagcaatcccactactgggtacttatccaaaagaaaagagatcaatcagtatatcaagggatacctgtaccctcatgtttactgcagcactattcacaatagccaggatatggaatcaatctaagtgtctatcaatgggtgaatagataaagaaaatgtgttatatatacacaatggaatactactcacctataaaaaggaaatcctgtcatttgcagcaacatagatggaactgaaggtcattatgttaagtgaaataagccaggtacagaaagacaaatattacatgttctcactcatatgtggaagctaaaaaagttcatcttacggtgtaaacagtacaatgataggttggtgaatgggtacaaacatatagacagaaagagtaagttctagggtttgatagcacagtggggtgacaatcattaataacactatattgtatagttcataatagctagaagagaagatttgaaatgttcctaacataaataagaaacgttcgaggtgatggatagccttagtaccctgaattgatcattacacattgtatgcatgtaacaaaatatcacgtgtacccgtaaatatgtacgattattatgtgtcaatttttaaaagcatcaagaagaaattagaagcctaattcagcatatcacttaagttcaacatgtgagatgctgacataatgacaaacatcagtaatttttgtacttctgtcactattttaaccatatccacatacctcctacactgttgtttccttgatattaagttgactcttttttacttatgcttctttataaaagaaattagtggactgcaaggtgacataaaaaggtaggagaaaaagaaaaaagaagatcatggctgaaagggaaaggcactcaggattagaggcaaggaagacaggtaggcgcaagtccaggattggagacacaggatctgtggggcgaaggtggcccagcacagacataagaagggatggaagctgggcaattagttagaggataatagagaaatgccagggaatggggatacttgtagcaggtagcataaagctgtgccttgaaagaacacaagggacagacaataggcatgagggccagggaggctggagacatactggggccaagaaactaaggcagggcaaagtgtgaggcccaggcagggatgccagaaggagaagagggagaccagaggtaggaacgaagagagagctgaggaatgggtgggattaaggagggcccacagtgaatgggtggggcaggagtggacagcccaacagaagcaggcatcggggaaaacagattgtcttctggactgtgccaagcagtgaccagcaagagaagctcaagaaacatctgtaaatcacctaaaatcatctcatgtactaccagtggtggacattcccacatgctgggaaacactgcctgatgctctgtgaataaagagcagcagtctttcattcttcccattaccaaaaaaaattacatgtaaacaaaggaacgtaaacccctaccttacttgtcaggtccccatgaatacaccaaaactcaacaacaaaaagcaatgtgacttcttttatatacaactcatgcttcttatctctatgagctcttttcttttgatagacagtccccaccatagcaaccatctccttagtcaacgtctataagcacagaatacaatcagcagaattggcaaacgcccagtaacaaacaccacaaaaacagcatctattattaaggagaataaatcatcaaaataatgtctgaacaagctggtagtacactgtcaaataaattcttgcatatagttaagtatagccctagaaacaataccctttatttttyaaatccttacccttagctgaacagtgataggggagacaaaagattagtctgcaatcatcaagcctacgctgttatttctttgtaaagtttatttcagctccatgatgtgttctaatgtttcctgccttttcctaggtgtgtcaaatcacagattcacttatcctccagtcacagccaagtgagtgactcaggccagcatacagctcatccattatttcaatttcctgggataaactcatcagttcccacttctcatttcctatcccctccttactttcttgaggcctgttactttcaagatgacataaggcacgacaatgatgagggcaaaatgatataaaatcttcaaacagatcaaaggagctaaattctgttacacttaagaaagatcaaatctaagggaattctgttcactgcccagaaaggcaggttcatctttcattcatttactcattcattccttcaacaaatatttattgagcatctttcaatgagctagctcagcctaacatgccactttaaagcatgccattttctatgcaatgttaggtaacattcgttacaagaggaaagttgctataactgaaaattctttttgaatatggatgtgggtatgcacacatgtgtaatactttaatactgattaaccagaactgggcaacataatcaacacccaacctccaaacacctggaaatcagacaccctacacagtcaagagctactggtctaaaacttcacattaaggaaaaccctatagatagaaatacacataaactttcaaattacagccatatgtggtgatcaaacgtgcatggaagaccacataattcttgcaaccagcttttgctatccaaggtgacaggttaatctatcaacccataaattcattaacctgacatttccaaaacgcctgacactgtatatgcactaacacaataaatttcccccaaattctatgatgtaggcattattattaatattccaatttttaagattaacaaactgagaatttggttaagtatagccctagaaaacaagaccctttatgttttaagtccttacccttagccatttattcaagggcacttagaaggcaatggagccagaacttgagcctaagtttgtgactcatggattcaagcatttctaaaagataaaaataaattggtagtattatagcttatacattaacatctagtttcttcttataattagcatcatatggtagtgtgaatcttgtttaaattcatgtaagtataaattgtctctaagcctctaaccattcttaattggacttttcttagttcccggttattatataccacctgttcctgtctttcccaggatgtttgttggagagtgagaattaactgccttggtaatgaaaactaccatttaaagagtactttgtttgtgccatgcactgggataagtatttcacttgtagtttctcacttagcccctacggcaaccctctgagttggtactaccattatcatcatcacccctttttacgaatgaaggaaagaagatacagagaggttaagcaacttgcctgaggtcacaaagataaggaggattcacatctagtggtctcttctcccttctcccagtctataatcttcatcagtgtgaagttctgatgcccttcttaacgccctcatctcaagtctgggctcccactggcctgtttctcggtgctagtgagaaactgcttttagtgtgtgctggtttggtttcctccatctttgatttctcccctgataagggccctgtttcacctgctctgtgcagctgtctgcttccacctggtattgatctcccggcacaccaagactattcctcacagagatgaatacaccttgggctgtatagcaaggcttccccagggccatcttttccatcaggagtttgatctcattcttgccaaaacctcttaaagaagccaaagcttttaaaaataatattcaacattttaaaaaatcaattaccaaacaagttcacagtggcttttccttacaaaagaacatctggatttgtgtcacattatcagaagactttaattgcattaatatttgataaaatgtattaaggtcagattaacctgagaaataaaactgattttctcttttctttccactaactgcaaattctgtaccggctgtatctgtagataatcaaaaaagggagctatcctcaggataggtagtaatagttctgtgaagctaagaggtgcatagggaggaactcagtatttactaagcacctactgtgtgcaccatatatgatgttatatattttacatgtatgaattaaataatagctccagagcaacctcagcacataggtcttactgtgcccattttatagatgggtaaacaagctcagaaaagtcacataaatcaggctaaggtcagtggcagagctgagacttgagcctgagtctgtttgcccccagcttcttactgcaggaatcattctccttctgcactgcttctcagagagttctatcaagagccctgcaagacagggcttaacttgtatttgactagagtactgagcttgatgaaaaacccagcaagaaatgagatcctgttatacagatgctccccaaatgaccctgtgctcccgattcccagctgggtcatacatgtccccagaaaaacagcctttctttactttccatgggtttgctacttgcctctgtttcattccttctctctcttcttgacccccctcccctctctgctgtgtctttctgcatgtctctttatgtctctatgtgtatttatctctctcagtctctcatacaagcatacacacactcaggatacctcgatccagcagccggagcaagcggagataccagagataccactggtcccagaagcggtccgtcatcccaccctgaactcatccttcacagccagtcccctcggcagagcctcatcccaccaccgctgactcgaggaggccggaatcacttgacgctgggctcgcacacagcctgctctaagcaaatgcctgcctgcaaagacagccaccagtcctcccacacagaggctgactgtgccgggagccggtttcacagcaacaaaggaacaagtgcagaacaacgccgtgtgcagaccgagcctgcctggacccaaggggaggtcggagatgcgtgggagggagtcaggaagggttttcgcaaagacgcgaggtttgcagtggtcttgagaatgaaaatccacagtcaagtccatgtcttaaattttttccagcatctcctgccatcctggcctccatacctcccacaccagaggccagtggctcctccaatagaatatgggatgggaagccagaagctcggccattttggactttgaggccagtccaggagcctgggagcgttactgcctcactgcctcactgtagggaccactggctctccttgcccaagactgcaggacctgcatgactggtaaaaggccacagatcctttttccctacgtcccttcatggaacctttgttatagtagagacagcatgggctttgaagtcacacagtcatgggtccaaatcctggttgccacttaatacttgcctggcctggatcaagtttttcagctccatgtgcctcagcttcctcctctgtaaaccagagagaacagtatttgtgagcctcaaagcaaaagaagaatataatgtttctggtgttgcacctggtagatactggtagatagaaggttctcccttacctctcagcccctctccctcttgccagactctcagttccccacacattcatacatcccacggttttctatccccaggactttgctcctgcccttcctgccaataggatgctctccccactctccacctcatcatggccaaatccgcctaatttttccaacaaataactcaaatgccacagaatccaggcagacttccctgatcttccttcctttatattttatttttttcattccaccttctcctttgtatatgactcttctcccttacttgcccataaactccatctttgtgtccctcaaagaaccctgaacttcgcagttactcgagtgattactaactagacaaatgaacatgcaagggcatctgagtccctgatacaatgttattttcaaggcaaggagaaaagtaagctgcagagacctcagcccctgggcattgtctaaggcctttggggcatgacggggtgcccagtccttgcccaatcacagcccctcttacagtgggccagcctgtgacccaggtgactgggagtgctattcactgaaatgaaacctgaggagtccccaggtctaggatgaccttgttctccaagcctaaaaactacccaacagccatctgcacattcatcacagctctgtgcagcctaggccatgccagcaatgccttctcactgtcctaacagaatggtggtctcccaggcctcctggtctccatcaggcaactggaggcatgtctccctcagcaccagctcytccttggaacttatacctccaagatgagagagggtgcagatttctgaagaactcagactggggaggaggcacgtccagggggtaggagcaaggagggagagggagaaagcaagcagagtcacaacctccaccgcctgcccctgccccccaactgccttgtggtttcttcttaaacggcagcattgggtctcggcagagacatcaccacccaagaagctacctctcaggctctgttagcattattttcttattaccttaaatggacaagactccagtgtgtagttaacacaagaatgcaaacccctcctcctccctccagagagaagtaacccggtgtttctcccttcacgagtaacaagaatccatcgctcacatgtggccagtactttttcgttcacaaagtactttcataactatcatctcctgtttgccctgcaaggtctgtaggatgggaatcactttctccagtatacagaagagaaaatccatgttccaaaagattaaataacttgtttaaggtcagataactcgtaggtgcccatctgtctcctccctgagagtttctggggcactaagagattctctgggaaattgtgacacgtttcactgagatacgggagccctcacagtagggcaggacctggggaaacactgctgtttcctaacaggaaccctgagggaggcccctccagggcagtgctgacatgccatgggcacaggttgagtggagggtccaaatgtggccacttattaactaagggcttttcatctttttctttggcccctgacttataactgcagagagagtgcatctccaagtaagaatgccaaaaaggctttttctaacacaacttgggagaaatctgaaacgggaggctcgcatcatggcaggagacctagacagagaggggcaggggaagagcatctgactgtgaggcagaaagtcccagagagtgctctaatggtgctagtgctacaagcctcattcttggggctggagaaagaagctggctctgttcccctccctccagtaatcaagggcaaaacattccacacagtctcatttgcagagaaaatgggaataaagactgtcaagaataatatgggtgcaagcacttcccccgcaaacagacctaagaacataagcaatgcccattgggtcagccccagggtgaacccattcagcctggagttttactcaagattggcttcaacccatcaggctgggctccttggagctccccagcccaccactgctcatttctccatctcccacagagcctcataagtcttacttgaaatgcagcccctccagaagttgaataaaatgttccaagagactgtcagcattgccatttaactgcagtgcaattagaaaggatattggccaggacacagccttattagtaggtttttgttgttgtttttgttttgtcttatacaatgcttccmcagtggctccttctttcatcatggtcaaagcaagcacaactattcccattcacgtgtttcctccagcccacccagctggctacagagacatgttttccagggacaggcagtgacaccaggccagcaacagcccatccactccagagggctgatgcccatccggatgttcagcagttayttgatatcacaacatggatgtgttcctttctcttcgatgttccttcttctttccttggcactgttctttctccctctcttcacccaccccaacttgaaaacactgtgttcccaatcagataaagccagcacaagtgtatagagcagaaggcaagcagcacrgagggaggagagatccaaccatatcccaaatctttcccactcatctcctgggacgacaatggccactgtcccctcagcagcactggcccaactcctcagacacatggacctatctggcaagtgaaggcaatacaggaggtagcatagttgctggtatctgcaaaccaaagtgaagaccgtccacagacatactgatctccctcaccctgccccaamaagcgggctccacccggctaccattttgacctgcaagctgtgcttcagttgtaacatgaatcaaacactccagcagacagcatcctcagtcacytcccacaccacttctgtccccttggcgattagcgcccaagtggtggagtggaacccgtggcaacacattcccagggataccatttcaagggtgggttggacccctgccagtctctcccatgacagcttagtgtccccaggtgaacgggcttcttaggtccacacctgaggacagtatctacagcaagtaagtatcatctagacactgaaattcaagtccaccctccmaagaggccctttccagctaacctcacacattctctatctcagaggttctcaaagtttaatgggcagcagaatcaccttagacggttggttatccatacagataacaaggcctcactcccagaggcctgcatttttaacaagctccccagagaattctgcaatggtgatccatccrcttcagtcygtgctctcctctcctaccctcagcaccagcttcgtgtcactatcttgaattctagtgcrtaccccacctcccccaacaccctgagagtccaatagggagggagattctgagtcccccattagagtatgctcacctggaaggcagaggggcctctctcctctcaaggcccagtagagggccccacatggaggggtgagaagctgccacccaggaggctgagaaatcagcctcatctctccacaggctccagaaagccttcgttctgccacagttccactgcacatctgtacaatggctttaaatgtcacctcaaatatcaggccaggcagcaggagggaaaggcagaagctaattattcctccttgcctcagcttttgtgtagctttcatcttgctcacctccgacctctgctgaggatctttaactctgccttggctgaggcatgcccagctcatggaagacaacctttcactgccctgggctctaaaccaccttgttaagtggtgaaaacctgatccctccctaccccttctctgggggcttctagttcccccagcagtcaatagaacccccatgttgcactgaatctctaacacagcatgtcaccccagtaccccccactgcccacacaagagccagtcccctctcctccttcaggaccttataaagctcgtctaccctgggccccatgccctctccactaggtcctgtgaaaagtaccatgacaacctcatcccatccaaggtatttatgatgagagcttaatatttaggccctcaggaaatattcctatcttggcaaaagataaagcctaggtcaaaggaaggcatagaggagggcaggccttaggtaagcagtggtgggggtggatatctgcagtcagggagcagagtccatgactcccttccctaggtcttcacaggcatgtccctgtgaggccatcctgatgaagtcaatcacagaagctggtgcaccttccatcctccctcactgccctgacctcccatttcctactcagcatgaacacctggttggctgccttccccaaggcacctacattgcaaaggaattcttcctgaaaaaaaaaaaagctggaaatatttggagagaccctctcagaactgatccatgaggcctctgcaatccagagttcactgttacctcctctgtttccctcgcagccagtcatgcagttcctccatctcatttccaccaagagccatttctctgcctatcaaaggagatggtgttacttcatggccaacaggaggccgttcaccccccaggaggtttggcttctcttaaatgttcctcacatctctcagtccctgaggtcaccatcagagaatcaggaagctaagttgccagttaccacagctgaagcctcactcctcagcccaggcagagccctcctgtgaacctctacctgctctctccatcccatgcccttctccatcccctccaggaacttttccagatagcccccctcagcaggtctgcccagtaaaatcaggcaccataccataggactaggattgataataatgaatgtgaagttcaaccatatcaaaaggaaacccctgtattgtcaaataaatgctaaattttggttagcacatatctagagctcaacatttttttttctacttagtcccttttttgctttagtccctcgggtatttttttttctttttatggaaagtatacaatctgtgtgtgttccacagggccacccactgttaaatcagaatatctgactcacctgaatgccctggctccctacatacacatcaagctggataatgaaattacttgcacactagccaatttgaatattctcttccttggctcttattttcaaaaagaaaaaaaaaactagttgcgaagatcactttacttttcaacaaatgaatgctgcttatggttcttaaaaataattgagtctcataaattctataaacctttttataccttttgtaccattaatttgcaagccttcgaggtactgggaaagggctgaggctttagaataacttcccacatctcagtttcttcatcttttggatggagataagactaatcccataaaacttgaacttttcatgaggaaaaaacaaaatagcatataaaatccaaagcactacacttaatacatagtggatacttcataaaggttagtgcattctcctgcaacaaaaacaagctcaggtcacattgaaattctcaattcatgggaccagagttaaagtcaagtcactactccaagtttcccaggcttctctacctgcccttcaggagggggcagattcttagagcttatgattcctctaattcctgtgacactctccttccctcactagggaaatgaaaatgtccagctgccccaactcatctgatctcctctttctgacacaggttggaaagttccactggagattcaattatgaaaactgttttgactataccttgtgacacatgtggatgaccctcggcactgaggaaaaaagaaactacgaagttcctgatggaccatccgcatagtgaacaacaattatttggcatcccraaaagtccaccaatcctggcctcacatcatgatacccatggggaaaaaaaaaactataaaacttcaagaagaaaaatttttatagtcttagggtgggatggttttcctaagcaagacacaaaactcagtatattggcttatatacatatttttaaaatttttttgaaggatatacaaatcaccaaaggagaacaggagtctgagcaacagtagtagaaggacaacattttactgtaactcatcttacacattttgaattttgactcttgaactgtatcacctaactctttaaaagacgtttcaaaataatggagtcaataatagatacaactgttcttggcatctagctgctttgttgtgagaaggctaagctacatggaaaggccatgtggaagagaactacagatgctggttgagacccccagctagtcccagccccctcccagccaccagaggaagcctaccctggagctgccagctatcccagcaccccaaaagacaccacatggagcagaagaactgcctggtaagccccacaattatgagaatgataaattgatgttctaagtcactaagatttagggtggtttgttacagtgtaacaggtaacaaaacagagtcattggtgcatgcagagcaaggtaaagccccatgattcgatgagatcgccaaggagatgttgaaaatgattgtgccttctttcatctagaagacaaaaagcatggttagtctcagaaccacatctatttattaatagcttcctctctactcttagaattctgaagatggggttgtcacagagggtgcctaattaacatgcttgcttgaattataaaaagaaattagactttctctgacaggaagtaagtatgtctaatttggctacttgctttgacaatcagatttgcctttcccaattcatataaatctgtagctccaagattttgaagaaaatacgtttaaagcctattataatatgcaacatgctagaaaatttattatttgcaaccatttagactcatggtaaaaaaatgtttaggtrtccactaaaatgcatgaaggggcataaaggtttcaatattcttttagagcatacagaagcaaaaaaaatctgatgcccactgaatgacagtatactttcacaaagaaacactatgcagctatgaataaagaatgatgaggctttctgtgaattgatatgaaaagatcttcaagacatactgttgggttaaaaacgcaaggcatagagcaggatagttagtattcacctgctgttgatcagaaagggataacttaggtatgaattctgatttgcttatatttacaaaaagagatactgggagggttcccgagaaactaatactgatggttacctatgggaaaagtggcttggtagacaggtataggggtcatataaagacctatttattttgtactaatttttgaacactgtgagtacattatattttcatatattttaagtcctcagagaataaaatagtagataaagttgcaaaaacatgaatgttaaaagataatgcaggaagtaaatatttgccatgtttgcaacaataaattatacaaagggttaatatctctaatttacaaaaagttcctagaaaccattaagaaaaagttaacaacatggtataaaaataagtaaagattatgaacaggcaacccacagataaggaaatataaatgactgataaaaagtaaaaagatgctgaccattactaatgatcagggaaatgttaagtaagcaataacagcatgccacattttacctacaagatttcccccagcaaaaacacmcacacacacacacacacacacacacacacacacacacacaacaaaacaaccaacctagtaggagactaaattgatataatattcttataagtcaatttggcagtacaatcaacatttctaaagcatgtagccttcaacctagcaattcttctaagattctcacctactgaaatatctgtacttatacacacattgcagtgtattctataacagaaaaaaaaaggaaagaaaaaacctaaatgtcccacaataaggaactaataagataaactatgacacagcctacattatacttagaaaccattaacaagagcaagcagttttatatgtagtaacatgaaagggttccatgatctattattgaatgaaaggatatgatttgcgaaataattggaaacaatttgtattatcccactttttgtgaaaatagacatataaatatatacatacacactatcaatatgtatttcactatgcctagaagagttctagtaggatatacatataccaaactattaacagtagttatccctgaagaatgaagaaaggtagagaattgtgttttgtaaaattttatgttgttataatttttttactataagcacttgttactctggtaattttcaaagcatttaaatattgaagctgctactaaagtagtggctcaaatcttttctgaaaaaggaggtgctccctcaggaccatggcagcaatttccttctctaccccctactcataaggtctagaatgtgaaatggtcttcagagaacccacaggtcacagtaaaaaattcacccgacttatccacctgttcaagtggctggcagatggagttctatcactatatcatgagaaaatgctattcattccccactttgttccacatcccttatttaccacaagagtcaggatgggttctccataacaagcattcaggaagaamctcaactcctctcagatcattcatttgtcagccacttagacaccttatgggactttggtcagcaatggaaactatgtttcatctcaagttccagctctaaccaaggggcagtgactgtccagagctttgtgttgaagattatgcggctacttacaggatggatggggaaagaatggtgccatcaattagtgatgtctgccaaggacaaggcaggaagaactgtgatacactagctttcaagtcagccatccctgcccttgtacaatgggctctgactccccaaacctcaagctttaaaacctgccatctctacttaagagttttatgcatcaggtgggggaagctgaaggtggtgggaggtggcacagggtaaagtaaggtgaaagctgactgtgactgtgtcgttacatggtacgtctatcagaagactgtgaagatgtggggtgtctgagggaggggaagggggccctcacaggtggagctgtggctccaaacagctgcatatggaagactctgaacatctggttgcactgctggtctgaggtaagccctgagcctggattccatctgtcatgtctaatggagttccttatcccaaagactcagcaattgtgcccatgtaagaaacatgcctttcacaattttgaaacctccaagtgccctgttaattggcaatccactcatattcccataaccaaaaacagaaaaaagaagccaaagccaaaaaaatcccagaacttcacgtgttgtaactaaaaacactcaataaacaaagctagtacttgggctcccttggggagtaattgtctaaacatgcttccttctttcagctggtgaaagagacagatgtgctaaaactgtatggagctcatcttgaaagcattaatttttccaaacactgatgtgcagctcatgtgcttttcctgagcaagtggcaacaggcagtgaggaggctgctgaggatacccctccgtgctggatctgactgtagcagcaacagggattcagaggaagtggtcatactgaagcttggggcaaagttgggaattyggaaggcagaggccaaggcccagccaccatgacctgtcacagggaggggctgcacaacacctgtgcactaaagacgtggggttggattaccatttacaaactggaaggaaagaaagcagaaccaatgccttaaccccctttcaggcctactccctcggggccaagttggcaatcaaccaaactattcttcctcacagcctgtagctccaacaaccacacacagtggcggagcaccagcagaggtcggccatttctgggtattgatctttaaaccattttcctttctccttctccccatttagggatgggaatctactgtggaaaatgtgatttggtcatccacagttaaactgttgtttgagtcccaagtcccttctcgctaggaggtcagggacaacctccctgcagcctgttcacataggatgagacataacaaaaccatccactgaggcaaggaatctcatcgtctgcctgacaaagacagagtcaacaattaggatatgccagaagttctgtcagtcttaacaagacaatttccaagttgattgttaccacaaggcccatgcacgtctaacagcatgccaggattctcactgggaatcagtgctacacacacaggcatagtaattgttttgtcaccactaaggctccgcagccaactcccttcaaatgccaattctaacagttgtgtaagatcgggcaaattactaaacttctttgtgcctccgttttctgtaaaatggggatgataatagtatttaaataacttcataaatgtaaggggcttagaataatatctggcacacagaaagcattatatatgtgtttatgattatcattatgttgtcagccttcacgtttccatgctaagctatctcttccctttggatccctgcatatgctcttcctaggcttggaacactgtttcccatcctgccttcatctagctatctgtgttaattcttcaggtctccaggaagccttcctggccaactcagctggaccagccatccctgcatctgcacccaccacatcttgtactttttcaacaccatattaatgtccccatattatcatctgtcttcccacccaggtcctgttcattggtgtatccctagcgcctggcacacagaagtcactcaataaatatgtgctgaataaatgaaaggggaatagatgaagggcagctttcattcactcaacaagcatttactaagtgcctacaagatgtcacaccctagactatacctggaaatacatgaaggaacagaacaccaaggctgctctccaagagctcacagagtttctcccttctagcagtaactcaagaaaaaagtggaggtgggtgtaaccctgcccaaggcaggaggtcaaccaagtaccagaaggaaggggtgctctcagagaggaatacaggtttacctaggataggtctgtttaactggaaacaagcagcagaagctttgattctgtttatcatgcctgcatgtgaagaattaatgtagctttgcactgatgaaaaataaaaggtggactcttctttataagggtggtttatttacccaagcatcagtctaactctttcaagagaaacactggttagttcattgcgttcatgttgtctgcatactatttttaccacactgtaaactcctctgaaccgaagtcattgtttgtcatgatcatatagtttatatcccaccccactgctgccttccataagcaccgagcacctaacatagtgcccagagtaaagggacactgcagattgcaaaaggggcacaattcactcatttggtatcacttcccttctgcattcctcactatgttttttaggtttgttagaggagtatttgttgtttcttctaattttctgaagcagaactggcaccaccaccacctcaccccccaaataaagccagctgtgggattctggagaagaattacttggttgtagctttgccagagccttccatagctcaggcccattgaaggaaaaaataggaaacagaatttctacttacagtaagaaaaagttggagcaacttttcccttggagattacatcaaagatacttgaggttatgttttccatactagttgccctaaaaatgaggaaacacaagaacttttcctcaatgaagaatctaagcctggctacctacagaagggcaatggtgctgccaaaccccagcccgggaagccatgcagcctgatgcaattgcagctgggcatccagggacagctacactgcctccatgctccaccacctacccagaacccctggaccacagtctcatcttcactaccattttgagggtcatctgtggcatgtcttataacaaatttctaagctagataaaagtaagttagaaattaacctgcttatcatttctattctttttatgatgatgcaaagtaagccagtaaggctgtgactcagggaaagtcctttaaccatgtttacagagacaactttgtgaggatgactacatgtcaatgcacacatacatgcactaagcctgtggatgtctgtgtgagtataccgctgttttttgtttgtttgtttttgaagttgttttttgtttgcttgttttttctgagacagggcctcattctgtcacccaggctggagtgcagtggcttgatcttggctcactttcaggctcaagggatcctcccacctcggcctcctgagtagctggactacaggtgtgtgccaccacatccagctaatttttgtatttttagtagaaacaacatctccctatgttgcccagcctggtcttgaactcctaggttcaagcgatctgcctgtttcagcctcccaaagagctgggattacaggcgtgagccactgtgcccggcccctttacctcttttatgttttgatagggtgggacaaattagcctgaataacattagaaatataacccatgagcttttcactaaagcagctatgtctcagccatcagacagtttccctgggagaccaactagactgagaacatacaggtaagacaggcaactgggagtggacagcttattttttcttgatatctttgagactgaatacactcttgcatggaggtacataaacacattgctcattaaagtgttaccaggatctattttaaataacagatgcccgggagcaacgtgtgccgttctcatttccctccatgacagtcccgctacagtagacaggagaatgtcatagaaggtgagtctggatttctgctaagccttttacaaatgtcctccatgaaactcttgtatatgagatggtaaaaaatgaatgggatgagcgtatagttgggtagaattgctgtagataaactgcatggaccaaagtgtttgttaggagcatacagtgagctttaggtggaatgcaggtctctggtaatggccacagagctcctcccttaattgttgtgtttgacttttaaaacaatcgtttccttagatcaggagatcaaagatatgcttatactatgggcaaaactggtatagtgggcttaatattataatagatgatcaaaatcaagacataaaattatctgggcagattcgaacactaggtcaaaattaacaagggcaaatttcatgtctgagatctacattttaaaataaacatatatgtatcactcacccagtcttttgtatctaccctagagaagcacttgtacatgtgtacaaggagacgctgtttatgatgattttaaacaccagaaataatcgaaraattgctaagaaaactatggaatatccacactgtgaaatacactatgcagaagatttccaggacatgctgcatgcagaaaacttgcaaaatgatatgttaacctcaaacacacatacacaatttacacatttctgatgatatctatctatctatctatgtaaatgcacagaaagatctggaaggacccctaataactaataccaggatctacctccaaagagaaactgagttggtatggagttcaaaaaggctttggctttacgagtaacctctgaaatttagaatgtatttgtgttaaacttgtgtcattaagctttctttctaaagtacagccttgcttttagctttttaaaaaaaagttttacagtgtgggaaaggatacaaattcttgggctttcagttaccacaaacctaagaggagtcagcattgtggaaaggctacagaaagctaactcatactatacagaaggtgttagaagtttcgtgttcagacagcctgcaagtactagagttcactaacctgatcttgtctggaacaatgggttggatccaattctggcagcaggaacactggcaacatagaatgcaactagaggaaagaaatgctatggggattctgagaagcatgacatcagaataataaatatggaactatgactgtttaacctgaagacaaaaagattatggggaaacaaacacgttcctgcaaatatttgaaagcttattatatagatgaatcactaaacttgtgagttttttccagaggtaaacatgaagacaaataaatacaagtgacttttctatttaaaaataaataaaaagaaaaaacattctaactaacaagaatgaaagacaaaatagcctgtcaggccagatcatgagctctctgtcattggaggcattcaactaaaatacttatataaaaagacgttgggttttattagaagaaaaactatgtaatctttaatatctccaacaactctatgttctatgattccatattttgactgcagaatcaattttcaatcaatgtagtctcatcaattccaaatcccacaggtggtatactctaccaccaggtggcagtagatgtcttgggctctgggtcctaaatgttaggtgtggttaaaaagcagcacagtttaatacctttaaaaataaaataataaaataagagaacagagtacaagcattaagccaaaaaagtaatcccttttaaggaaacatgtaagtatcattcataatctttctgattatccatcacaatgattcttaatccatttgtcttcctcttgtacatttcttttgtacagggtctacggagaccccttatcttctgtggcctcctctctctggtatcaagtttcctgacttgtatacagttcctcatccccacgtctgtccttgatgcaaaaatcccctctgcttcctctgcagctgcagatcatgtttgctactacagtctctcttcccgacccaagaagaactatctgtagggtcagaaaaacaccccagcctcttcctgcttctagccttcctgctctgtatccacacagctgaagccacaaaacaagcaagcaacaaacaaaaacagaataggccccaccctgacagcatgaaagtatatgattatcttttcccagatagaagagaataatcttccacccagctcttaaaagagaaaactttctgtctccagccacagctgttggcttggtaaaagttgaatacaatcaacaacccttgtcccagtccctagaaaccttcaaatgttaacaactgccttggttgagagtgagagatcacttcagaaaacctagtactaaggaagtatttctgtaagtgcttgcgagtaaatgcaaataaaacaagattttttaaactgagacttaaagcaattttactatgtacctgagtcaaggttctactcatctttctagtctcaggtggaagacctcttcttccagcaagccctcgagatgttaggactatgtttgttgtctctgctatgtgctcccatatcctcctcagtgtctcccgtcacagccctgtacctccccagccacagccctgtacctgccctgtcaccatccttaccacatgcattatggccactctaccagcctgtttccccattacacgacagggcctagactgtacctgatgcatttaccactgagcccctaaacacagtaggacccaataaatatccatgaggctattataaatacattatcaattaactaattcatatggaacccaagtctaggcagctgtttcactgaggtaaatatccattccacaaacactttgtgtctcttatgctagtatagtacagaatgagtcagacccaggtcctgccctcaaacaacatacagttgagtaaggaagtcaagacaagtacacaaatacctacagcacaaaatatataaaggagcaccacaaaaagatgaatattagaggatggaaaaacaggagcaaaggcacagagatcaccaagtagttcaagtcactggagctaagcctatgggacaggtaataccggggccagagcgtagaggtccttgaataatacctttgagtagtcggtatatgccaggctaactgctttacattcatgatctcatttattcgttgaaacaattctatgtaaaaccccctatcacaaagaagcaaacgggtccacagaagtcaagaaaattgcccatgatgtcacagttgataagtggcagagctgggatgcacacccaggccagccttatgaccatggcagcaatgctgtggtgctctggagcctgggatgccaagttaaggagttgctactttatccaatgggagctactttgagcaggagcatgccaaggttcaaagactgtgcttgggaagacgtatcagacggtaatggggagaatagattgggagtcaggtttgaagcctattgcaatagtaccaatgttgtatcattaaacttctgaactggagagtggcggtagaactggcaaggggattcagagctgagaagttccagaggaagagcggggacaattaaggatgatcccaagctatgcacctgaatgactggaaggatgcggatttggaagtggccctgcatatgtgcatgccatgggaaagagtaggaatgaatgagtggccctgcatatgtgcatggcatgggaaagagtaggaatgaagagtaggaatgaatggccttaagtcctcaggagccccaaaccagggggcagcctaaatcctctccactcttttcctctccctaagcattgctgctacctgcaaaagcttcctgacttccctgagccttcccacccatctggggcatctgagctcagcaactcacaaaagcagagggataataatgcgacatgagacatcacacaaccatgtccacccaggtctactctcctctggccagcctgacccagcgcagacaatgtctggtcccaaaccagcaccaagaagtggaatagcagcagacaggagttagaggccacaggtagtgattctgactccttcactgactccctgtaaccttggaccagaagcttaacttctctggatctgtttcctaatctgtaaaccgaggagtttgaaccagaatcagaagctgcaaactaggggcacacaggacaaactcatcttgtgaatggactctgaccaacacaatgtcttttaattagcttcaacatttaaaaactgggccacttcacaaagaaagtgcatatttgccgctgttcttgaagcaggaaggtctggcaacatggagcccacattcctacatggcatcaatcagctggggctgagtggctgctgggacaccaccctccagtttgccacagtccccaccacccctactgtccctgattgctgccactcatcatctatacatgggtcattatgatcttttatgctaatggtctggcccctgtagggaactgagttcacaacctctagagaaaatgatctaaaatatcatcattgcaagactcaggagttggggacattaaacagaagcacagaggagttgggagtgattttccctcaatggaagatgcgggctcctccgaggagcaagggcttgctacagcggatgaaggttcattaacacgtgtgtcaggcctgcccaccgccccacaccacaccctcaacaaggcacaaggccagatgacatcagccttggacacagtcagagaagccccatcatgaagcaatttgcttccccagccactctaatttaacaattagcttaacaactctggtcaggcacttgctgctggagtggagaaatgatcctgatcagcagaagcttcagcctagaagctttaggaactcccttcctatccccccaccctagctgcccttgcttcccttgggtctgcatctcctgctcacacagatagatattctaaatatctccaaagaggtttcaccttctccttgagcttcccaattgggctccttagaaactttccagcaaaattagtttctcctgctgccacttcagcccattctcttagtctgtcctgcagagattctggcctcatcgcaggaagcacgtcaggccagtagcgagatggcgtgtggaaggaagcctgcacataggccacacgcagagacaggggtatactcacaaggctggcgaccttgggccgtccttggtgcagatcctgactcagagcacaagcctcagaaacagagtttgccctgactcagacagcatgctcagctccgcatctgcattgccaaaaggcctcttggtaagaatgcacaatactccctctctacagcttgtgctgctcctgcctcaagctgcaccccaaacccgaatgccaaatttcagagaaagagagcgagattattaaggggacgtcaaaaggaaaactttataaagtcacagtctattatttttaaatacagtattagaattccaggatagatggggtgaagccagcacctaaaatagcagaccctcaagaaagcaaacatccctgcatgaccagatagagatttcacagagaacctggagaaagaaatggctcataaaaatggaacaacaaccaggaaactaatcagaccaaaaataaacctgagagatgccaatgccaaggtcaaccccaaaggttattttgttccaatggggccaaatcagtggaaccagttgatgatactcttagtacaagtggtgtcctcaagaatgaaaatccttcccaacttgccctccttgatggacaggagcgaggtcagggttgaaactgcagtgagggcatgagaacccgactgacaaatgaagtgtaaataaatcaccagaaccatatggcacccacctgggagtcctaaaggaattcaagggtgaaattgtggcgaggctgcccaaaatgtgtaacctctgattacaaagtcactcatgctctagaactggcagagtgcccatgtagcctccattcatatgaaaggatccagggagaattctaattttcataccaggaaagtaggcaggacatagcttaagaataggactactgagcatgcaagcaagcatgatctatcaaagaaaaagacagtatggctcttacaaaagcaaagcttgtttgtaatagtttttcagagagtaaatatgaatgcgaactaataaaaatctgtccatttacataaatttaatttacataaaatttccaagatactatagtaaaaagctttttaaaattgaataacaatgcaacaggaaaaacactttttcagtaaactacttggaggccagaaacaaaatgaaaaaatatactgacatgtctccaaattaaagaaagtttaaaagtggggttcataagccatcatgacactagaacttgtcttatataacattcttataatctgtaggagggagctaacgtgaggtactctatggagctacacttttccaggcaggagaaagaaacgctgatcaagagaaatgataggacagtctttccaggttctaagagttgatgtagaagaggtgactgagtttcagtgtgagggatggatctacttcataatagttccttagtctcctctctccagataagataaattctgggctccattctctggaccttgtgattgtgggctccaaaacttacgtatgcctggaaaacagcaacaaatgcagatttaactcacagaaaatgcttctgactagactatcatagagattgtccactgaatttggttaaaccctgaccagtcaggcctgccatggccctgcccttccttcttcatgacagtgcccattcaatgcatggaactccagctttagaaattcagggcacacattcatagaaaagtcattctgaagctatgaactgagaattctaaaacaaacaatagagtatgattggatttacccattccttctatttttgttactgcatctctgtcttgggcatatagcagggagctgactgtagaaatgcaaacctgagtaagctcagcaccccctgcctagccccactgttcccttgtaacctatcccatccatctagtctgcttgtcctactacctccaacctggtaagaggcattgcaacactttctttgctct

SEQ ID NO: 97236 - DNA, 21886 bp, Homo sapiens
gaaattgtcttttcatgtagtataaaaggaatttgattttttgagcagtgtatcaactcatttttagtaaatcagtattgtatttagcaacttcagaccattatgatagagcctgctcatacattttcatgctctggataaggtactatttgtaaaatttatcagccgggagggttagcatggaaaacagaaagatagtattttgttttattttattttgaatgtttgttcctctgtttcctcaccctaaccctaaaccaggaaaggtgtatcatccaacacatcttggttcggccactctttcttcttcactttctccagctgatactttagatatttttgctgacctgcaaagagcaatgaagggctttgttttagagaatgatcttcatattctctatctggtaagttctgttttaacaattatgtttgtgaaaatagggagaaaaaaatagatatataatcctgaacatcaaagataccctaacagaacatctcgtctgttttccatgcctaggttagtactggtgggaatagagaagaggtaagaagataattgttttaaagtaataatctaaatgttctagttacctttaaatttattttctccaacctcctttcaaaaaagatttgagttgttttataaaaaatatatatttttacaacgtataaaagaacagcaaagaaaaatgggatatcagaaaattaaagatcggatcatgatgtaaaactcaagcaaaggtcagtacacaaacatgcgtgccattaagtcatgtccaatgctgttgtcaactttgattctgggttttctagcaactaaaagaaagaggaaagcttgattagtgttaatattcataagataaaaaacaaaacaagtttaggaaaaacattgcatttccctgcctaagagaaatttagtcctaaaaggatactttggaacttaacattgtttgataaaaatctctataataaatgcaataaggaattttaagtttgtttatattagacaatgctctgtgaatattattttgtataacaaagatattaataagaattggatagtgtttaaggtcatgttctctggcaagaacctgatcagaaataattaattttgtcagttaagagcagatgcatgcattttgataagcaagtgataaggggaggtgagtaaaattgaaattctcattagaatgaagggggcttatcaggaaatgtgtttcaataaaaatcgctatgtagtgagcagaggggaaatgtctagacagtaccaattttcttttattacaaactcgcataatacatgggtgataataggctcaaaggtctgtgcccaagaatgtggctgggaggaatctcaaagcaggtttcaccggtcatctatcatggccttaaaaataagtcatttattatacagtggctgagattgtgggctctaggatcagactgccttagttcaacttttggcctcatcacttagtaatcatataaccttgggtaagtatttaacctctcttacgattccatttcctcatttgtaaaatggagataataatacccacctcagggctgatagtctttgatgaatgtttggtatctgaataaatgtttaataacatctattatttctagtaaattctcccataaacattatgtaagtcatttgccaaattacctaactactcctactcctgttccctctctaaaacgtgaagactgttggcagtgttagtatgctgaatgcttgtggttagtggtcttgtatacttctctcaccattcgagttgtatgcccttcaagagttagttgtgttcccaaacttgttcatgtcagtttgcttctgagaaaattaggctgaggcagaaggatcacctgagtccaggaatttgagaccagcatgggaaacagagcaagaatctgtcgctaccaaacaaaaaaaaaaaaaaaaaaaattgtgtatggtggtgcatgccggtaatcccagctacttggaaggctgagacagaagaatcacttgagcccaggagttctaggttatagtgagctatgatcgtgccaccatgctccagccttggtgacagcaagagacctcgtgtcttaaaaacaagcaaaaaaatataagtgagataactgaaagctctgagaaaaagttataggaatttagacagggaggaaactaaaaggacactgctcaaagtttattttgcagttatctttaatttttatttatttatttattttttgagtagagtctcactctgttgcccaggctggagtgcagtggcacagtcttggctcattgcaacctctgcctcccaggttcaagcgattcttctgccttagcctcctgagtagctgggactacaggtgcatgccaccacacctggctaatttttgtatttttagtagagacagagttttaccatgttggccaggctggtcttgaagtcctgacctcaagtgatccaccctcctcggcctcccaaagtgctgggattacaggtgtgagccattgcacccagccaatgattatctttaatatctaacttcacattacaaaacagaaactggatttcttagacaatatattgtggttatggtttaagaaagccatggtaaattctaatcaacagactcatgctcaaaaggccttgacccctagctcaaagcattggcaattaaaatacatttatgttttaagttagacaaaacatttagtgtttgcatgtactattttatattttgaatatataaaacatttctgtgattcaaaagtcagaactatataaacaggaatagtcagagaagtctgactcctatatccatcccttccatgccttttccacctacctttcatagatgactgttttcattcattttttaatgtatctcttctcttttttaattttacagaaattatcagacatacatatccttcaccttttttatacagagggtagcatgctgtatacattatacctttttttttcttaacagtgtatcttggaaatcacttcatatcaattcattttttattcttttttataacctataattctgtcgtgtaggtggatgtaccgttgtttattctatcagttccctattgatggacatttggatcattttcaatattttcttgtggcaaattatgcttcagtaagtaacatggtacacacagtgtttagtttttatggaggtgtatctttaggaaagactgaaatgtaaaaccataagtgattttggtaaaatgtaaaaccaaagagtgaaatgtaaaaccataagtgattttggttttgcaaagttgacctctgtagagtttgtatcactttcctgttttaccagagatatattagagtagttgttttttcacagcttcacaagtagagagtatatggtcaaacttttgtatttttgagtgtagttttagtttacatttttttacattatgagtaaatttgaacattttccccatttatataaaatgtccagaatggcagtctatagaaacaaaaagtacctttagtgcattagtagttacccagggctgggggaatgtgaggaggttggatgaaaatggagagtgattgctaatgggtacagggctccccacctccctccccagtgaattgtccatgtcttttgctcattgttctgttgtgtgtgtgtttttttgtttttgtttttgtttttgttttgttttgtttttagttttaaaggtttttttatatattagggagattggtgctttgtggtataagtagaatgattttcctcttgatttttcacttgtcttttgactttgcttattgtatgttttgtctagtagttgaatatatggacttttgaattagtgagaaattttttttgctctgaaattattaaggaattcacccacattttcttcaagtaattgtatagttgtgatccccctattttttttttttttttttttgagatggagtttcgctcttgtcacccaggctggagtgcaatggtgcaatctcggctcactgcaacctccgcctcctgggttcaagcgattctcctgcctcagcctcctgagtagctgggattacagacatgcgccatcacacctggctaattttgtatttttttttttttttttttagtagagatggggtttctccatattggtcaggctggtcttgaacttctaacctcaggtgatccacctgccttggcctcccaaagtgctgggattacaggcatgagccactgtgcctggcctgcccctattttgagctctgcttcatttggagtgtattctagtacatggttcttcagtttcatgtttttttcataatggctatctgtaatctcagcatcatttattaaaaaattcatttatacaatgactcaagatggcaacttttatcttctgtatttccatttgtatttgggtacatttctaattccatttgtcattgtgtatattcctgtttcacttgttagtctgacaaaagaccagtttgactgatttttgtgccagtgcctctgttttaattaaaaactttctggtagggcaagtttcccttcattgctctgcttttcagtgttcatagctattctttttggcttactgtattagtccattctcacactgctataaagaaattatggagactgggatatttataaagaaaagaggtttaattggctcatgattctgcaggctgtacaggaagcacagtggcttctgcttctggggaggcctcagaaagcttccaatcatggcagaaagtgaaggggaagcaggcacatcttatatggccagagcaagaggaagagagtgagagagaggcgggaagtgccacttacttttaaacaaccagatctcacgagaactctccattgcaacgacagcaccaagtggggtggtgttaaaccataagaaacggtcttcatgatccagtcacctgccaccaggcactatctccagcattggagattatatttcaacatgaaattcggtggggacacatatctatactatataaatctacacttgggcccctaaatctcatgaccttctcacattccaaaatacaatcatcccttcccaacagtcccccggagtcttaactcattgcatcattaactcagaagtccaaagtctcatctgagagaaggctagtgctttccactgatgagcctgtgaaataaaaaaactaagttagttactcccaagatgcaatggggttacaggcattggataaatacttccattccaaaagggagtatctgacttggttaggttgtataatcctttttatgttgctggatttggtttgctggtattttattgctagtattttatttggtttgctagtatttttgtcataagatatattgacctgtagttctgttttctcgtgatgtctttgtgtggttttggagtaatactaactgcacagtatgatttaggatatatttcttcctcttctgtttcttttgaagaatttgttaaagattgctattaattgttatttaaatgtttagtagatttcaccagtcaagccacttgggcctgggctttactttggagtaaatgttttgatgatgaatttaatctttttactttttataactattcagagtttcgattttttcttcaatcggttttggtagtttgtgtatttccagaaaatagtccacgtagattatctaatttgttggcatttacttgttcatagtattcccttataatcctttttatttatgtgaggatggtggggttggttcctctttcattcctgattttagtaatttgaatcttcctgcatcatttcttgatcagtccagctaaatatttttcaattttgttttcttttcattctttcagcggatcatctgaggtcaggtgttcgagaccagcctggccaacatggtgaaaccctgtctgtactaaaaatacaaaattacaaaatacaaaaattagctgggcatggtggcactcgcctgtaatcccagctactcaggaggctgaggcagaagaatcacctgaacctgggaggcagaggttgcagtgagccgagattatgccactgcactccagcctgggtgacagagtgagactccatctcaaaaaaatttttttctgtactgaacatacagtttattttgtcattattccctaaacaatacagtatatcagctatttacgtagtatttatgtggtattaggtattataattacgctagatgattactctgtatatggcaggatgtgcataggttatatacagacactatcattttatatcagagacttgagcatccatggattttgttatctgcaggaggtcctggaaccagtcccccacagataacaagagacagctatacattttgctatggtttggtggagttctatagatgtctcttaggtctaattgacttagaatgttattttagtcttctatttccttttgattttcttagtagttctattcattgttgaaagtcgggtattgaagttttcaactacagtcggtattctcagggaatttgttcccctgtacctcttttactgctcttttttgaatgaagggaatatattctagtatagtcattattgcttaaggacagtgatacattctgagaattgcatctttagctaatttcattgttgtgtgaatattacagagtgtgcttacacaaatgtagatggtatagcctgctacacacctaggatatatggtataaccttactgcttctaggctacaaacttgtttggcatgttactctactgagtactgtaggcagttgtaatacaatggtaagtatttgtgtatctagacatttctaaacatagaaaaggtaatgcaacatgctagatatttgatgaytatgatgtcactaggcaatattaatttttcagctccattataatcttatgggactgctgtcatatatgcagtttgtcattgaccaaaaatgtcattatgcagcacaaaacactataacattttaattttgtacatttttctctatattttttgccatttttttttttagtgtttactcaagggtttatcaggtacagcttaaaatttatactaacttaattgcagtgaaataaagaagtattcttaaataactctattttgattcctttttttgtgccattgttatacttattacatcattatgtgttgcaaacctaacagtacgttgttatacttagtattttatgtaatttaatgtttttagagaagctgagagaagaaaggagagcaaatatacatttacagagtttgcttcattaacattcttatttatgattgtgttttttttcttcatttatttctatggatttgggacaccatctcttgtcatttccttagtccagtacagctttgcttccacctscctcctgtgggctgatactgtcaaatatattgtgaattttatatgttatggacccaacaattcaattatatgcatattggcaggttgtagtggctcatgcctgtaatctcagcacttcggtaggctgaggcgggtggaccacttgaggtcaggagttcaagaccagcctggtcatcatggtgaggccccatctttactaaaaatacaaaaatgagctgggtgtggtggtgcatacctgtaattctagctactcaggaggctgaagcacaagaatcacttgaacctgggaggtagaggttgcagtgagctgagattgtgtccagcctgggcaactgagtgagaccctgtctcaaacaaactaacaaacaaacccaatacagtacaaaaatatgcatattgttttataagttgccttttaaatcagtcaggagaagaaaagagaaatatgtaatgatactgtttttatatgtacccacataatttcctttgttgactttctttttttggtttggaattgaaatatggttttggtgagtttctttcaacctgaagagctttctttagtatttctttgcttttttttttttttttggagacagagtctcattctgttgcccaggctggagtgcggtggtgcagtctctgctcactgcaacctccgcctcccaggttcaagcaattctcatgcctcagcctcccgagtccctgggattacaggcatgcgccaccactcctgggtaatttttttttgtatttttagtagagacagggtttcgccatgttgaccaggctagtcttgaactcctgacctcaagtgatccaaaccccgcccacccagcctcccaaagttctgggattacaggcatgagccgctgcgcctggctagcatttcttttttttttttttttttttttttttttgagacggagtctcgctctgtcgcccaggctggagtgcagtggcgggatctcggctcactgcaagctccgcctcccgggttcacgccattctcctcctgcctcagcctcccaagtagctgggactacaggcgcccgccactacgcccagctaattttttgtatttttagtagagacggggtttcaccgttttagccgggatggtctcgatctcctgacctcgtgatccgcccgcctcggcctcccaaagtgctgggattacaggcgtgagccaccgcgcccggcctagcatttcttataaaatggatttgctagcaaaattttctcgggttttgtttatctggaaatgtttgttatttttatttttgaaaaataactctcctttatataatattcttagttgaggctgggcgtggtagctcatgcctgtaatcccagcactttgggaggctgaggcaggtagatggcttgagcctagaagtttgagaccagcaacatggtgaaactctgtctttaccagaaaaatacaaaaattagccaggtgtggtggtatgcatctgtagtcccagctacctgggaggctgaggtgggaggatggcttccgcccaggaggtggaggttgcagtgagctgagatcgtgccactgcactccagccagggtgacagagccagaccctgtttcaaaagaaaaaacaatgtttagttgacagatttttttttctttgagcagtttgaatatgtcatctcactgcatttagaatatgtcatctcactggccttcttgttgctggtgagaagttagctcttaaccttatcaggtttctcttacataggatgactttttcttgctgttttcaagattttttttcttcagttttaatgttttgactgtgatgcgtctttgtatggatgcctttgtatgtatcctgcttggagttcactgagtttcttggatatgtaggttaatgttgtccatcaaatttggaatacttttagccataatttcttcagatgattttccttttcctttctatcttctcctggtactcattatgcatatgttggtacacttaatgtttcccatattcctttaagactctgttcattttttctgctttctcctctccctctttcagattgcatagtctttattaatctattcatgtttgctgattctttcttatgccagcttggatatactgttgatctctctagtaaattatccattttaggtccaggtttggtggctcacgcctttaatcctagcactttggaaggccaaggccaaggcwggagtgttatttgagttcaagaattcaagaccaacctgggcaacataataaaccccattttagttactgcactttttttttttttttttttttgagacatattcttgctctgttgcccaaacaagagtacagtggcacaattacggctcactgcagccttgacctgggctcaagcagtcttcccacttcagcctcccaagtagctgggaccacaggcatgtgccatcatccctggctaatttttgtatttttttgtagagacagtgtttcaccatgttgcccatgctgatctcaaactcctgagctcaagtggtcctcccctctcagcctcccaaagtgctggctttataggcatgagccactgtgcctggccagttattgtacttttaactccagaattttcatttggttcttttaaaaataattttgtctttattgtattctctacttaatgagacattggcatcatgccttttacttcaagcatggtttttgtttttgtttttaccatatttataatatttgctttgaagtctttacttatttcaatagctggaccctctcaaaggtatttctttttatttcttttgcctgcttttccccctgtgtttgagacatactttcctatttcttatatgtttcataatttttgttgaatcttgacattttgggtaatatatcaactctgaatattgattcttcccttatctcctctatgttattgattctttcttgaaaattactcagaatacttaagattgtacctacagttagaatattgatattagaagtgtctataattaaaaacttaggttctggccgggcgcagtggctgatgcctgtaatcccagcattttgagagtctgaggcaggagaattgcttgaggccaggagtctgagaccaacctgggcaacagaataaaacccagtttcaccaaaaaaatttaaaaattaggcagacgtggtggcactcaccttgtagccccagctacttgggaggctgacttgggaggattgcttgagcacaggaggttgaagcttcagtgaactagatcccagcctggatgatagaacaagaccttgtctcaaaaaaaaaaaaaaaaagacttgggttctataaaatccagtttgtatgcttagtgatctctttccatttgtcctggcagtgcattgtttgtgaataaatgatgtttccatatgaatgaggtattatcacagttagacatttttgtaaatcctgaggcctttgtctttttattttaagtaattttattttattgtaattttttttgagatggagtcttgctctgttgcccaggctggagtgatgtggcacagtcatagcttactgcagcctcaaactcctgggctcaagcgatcctcctgccttggcctcctacagcattgggattacaggcatgaaccaccacagtcagccattttatttattttattttatttcatttttttagagacagagtctcacctggtcagttgagctagagtgcagtggcacagtcatagctcactgtggcctcaaacttttgggttcaagcaatctttccatctcagccttctgagtagctaggactacaggcacataccatcatgcctggcttttgtctttaatatgaaggttgtatataatggttttttgtaatataatagttttagttaatgaataatacttcttccttttaggttacacctatgtttgaggattggactactattgattggtatcgatttttctgtttatgggagaagttgccaacttcaatgaaaagggtggcagagctagtgggagttgaagaggggttcttggcccgttgtgtgaaaggaaaagtagtagccagaactgagagacagcatcgacaaatggccatccataaaaggtaaacgtcaaggtctctgggctctccggtatttaacacagtgtcttgcatgtagtagacgcccagtttattgtagtcactttcattgtcaataaaatcaaaattttggcagagtataagatttttcagttttcttttttttcattttctttttttttttaattttgaaatggagttttgttcttgttgcccaggctggagtgcaatagcgcgatctcagctcaccgcaacctccgcctcccaggttcaagcgattctgctgcctcagcctcctgagtagctgggattacaggcatgtgccaccatgcctggctcattttatatttttaatagagatggggtttctccatgttggtcaggctggtcttaaactcctgacctcaggtgatccacccgcctccgcctcccaaagtgctgggattacaggcgtgagccaccacacccaacaagttttctgtatttactaaatttattggtattttagtttctttctgcagctcacagtttagcagccattatatataaagaccttatcttttaaggtagaatatttaattacctctcttttgtaaagaaggtgttgatcagaagaaccaccaacttactgtgacttcacctggggttatgctttatatcatacttaaaagtgattcattaccaatagaggagaagagctaattaaaagattcaggtggaaaaattggtacaggctgttagcttctttgaaatataatgaaattggctgggtgcagtggctcatgcctgtaatcccagcactttgggaggccaaagtgggcggatcacttgaggtcaggagttygagaccagcctggccaatgtggtaaaaccctgtctctagtaaaaatacaaaaattagccgtttgtggtggtgtgcacctgtaatcccagctacttgggaggctgaggtgggggaattgcttgaacccaggagatggaggttgcagtgagccaagattgcgccactgcactccagcctgggcaacacagtgagactccgtctcaaaaaaaaagaaataataatgaaatgatttttcttaaaaaacagtctctaatatattatttataatatggttaagtataaattttatatacttggatttatatacttggattacttttgctaccgttgcctttcaaatcaaaattggatgctatatttatattgtcattttattggagtaatgatatacatgtagctgtatatcaagttatctttttaatttttgtgtcatcacatttcttgaaccaagtctcatttcttgttagcagcagttttgaatatgggcaggtttttgttatacagacattagttctttactatagtactaatgcatgtcaaaacttgctttgcaagcattgatctcagcctttgtccagtaatcctattttctattaagaatctcaccacaatgtattatataagccctctgttgcctttccagttcttagtcatttttcaacacactgtatcgcytagtagacgtgaaggatctcttaccacgcttttgatgatttattcccaggtttttcaccagtcttgtgctattagatttaatcagtgaagttcccttaagggaaataaatcagaaatatggatgcaatcgtgggcagattcaatctttgcaacagtcagctgctgtttatgcaggtcagttaaacaaagggtttcacatttatttaatactgtgatttgaggtcgagttaagattactttttttttcaaattccattttattgtaggcttctttaaaagtgctaaaactttgtacagttcttgtcatcatcagaaaattcaaaactatggctcctcagggctcagtaccrtgttacagaggattggtaactagctgaatgtcttggcctctattccttagcaacctgctgactatcctcctttctgttttccttttctttttcctgttgcaagaagaaacagaaacaaagttctctgtggtctcccctttctcattaaggtactgattgccgggcgcggtggctcatgcctgtaatcccagcactttgggaggccgagtcgggtggatcacgaggtcaggagttcaagaccagcctggccaagatggtgaaaccccatctctactgaaaatacaaaaaattagccaggtgtggcggtgggcgcttataatcccagctactggggaggctgaggcagagaattgcttgaacccgggaggcagaggttgcagtgagctgagatcgcaccactgcactctagcctgggtgacagagcgagactctgtctcaaaaaaaaaaaaaggtactgattaatccatattgttgaggagaaggacggaagatggagagggatttctgaactcctgtctgactgttataaaaatgatctaaggaaccactggtctgccttaatgtattaaaccctaagcaaacgagaaattctgggtctgattttactaaggaatccttacaagcccttaagaaggaaactatgggctacaagagggtgtgttatatgtataataggtttcatcgtgaagatatgtgcttatgagggagtactgcggggaagatgagaagagatagtggtaggaagggaggcactcactcttttttttttttttttttttttttgagacagagtcttgctctgtctcccaggctggagtgcagtggcgccatctcggctcactgaaagctctgcctcccaggttaatgccattctgctgcctcagcctcccgagtagctgggactacaggtgcccggcaccacgcccggctaattttttttttgtatttttagtggagatggggttccactgtgttagccaggatggtctcgatctcctgacctcgtggaccacccgcctcggcctcctaaagtactgggattacaggtataagccacccgcgcccggccgggagggactcactcttagactcactggtatcaaagatgaaagactgcctctaggggtttatgttcttgtagggaagtgtaacaaaattttaattcaacaaatgtctttatgacatggcacttgttttggtttctttattccaagacagtgcagctattgagctcagcaacctttctttgaagaaaatgcaggtgggaacttcactctttctagttctctcagcacttgaatatttaaaccaactcttgttttcctctaggtggaaagagtcccttacttttttttttttgagatggagtttctctcttgttgcccaggctggagtgcaatggcacgatctcggctcaccacaacccccgcctcccaagttcaagtggttctcctgcctcagcctcccgaggaactgggattacaggcatgcaccgccatgcctggctaattttgtatttttagtagagatggggtttctccatgttggtcaggctggtctcaaagtcctgacctcagatgatctgctcgacttggccttccaaagtgctgggattacaggcgtgagccactgcgcccagcatctttacatgctttttttttttttttgaaaatttgtattattttaattatttttatatacagaaaactcaacagtgtacatttaacccagtttagtggcaagttctttagcctttgccttttcgagcttggtgatacgagccacagacttaggacccaggacgttgccgccccagtgacggtgggtctcatcctatctgtcgttgtaattggtcctgataacttccaccagcttagccaaagtgcctttgtcttccgagttcacctgtgtgaaggcgacagtggtgcaggtcttcctgtggactagacgtcccagtcttgccttccccttggtaatgcagtaagggacccccattttacgacacagggcaggcaagaagacagccagcttgatgggatccgcgttgtgtgcaatcaccaccagctgagctttcttgttctccaccaaggtggtgacggtgttaactcctgttcgaaggacaggtggtctcttggtggggacgtcccctctgccagcagctttcttcttggcccaggccaacagcctctgcttcttctcttgccttgactctggtctgtacttgtgggccagcttaagcagctgagtagctgtttggcggtccagggcctgggtgaactggttaatcgcaggaggcactttcagccgcttatagaggatggctctctgccgctgcaacctgatatagcggggccgtttcacaaagcgggtgaggtctcttttgggctggatgtcctgtccagtgccaaaattcttaggccttttcacaaacgggattcaccactttcttagcctcctgcttcttcacgacagcaggggccggagccaccttcgttcccttggccttctttcctttcggcatcttgggtggcgggaagagagagacctttacatgtttttaagagttctcttttgcttaagaaagagagagagagaggaatgaattagggtgagggcttcttgtttgttttgtgtttatgtgctctgcctcagttttcatgtattaacttgaggattaagaataaataagatgacatttaatgtcatctcataaaacttagcacatttattgtccaattagttaaggctcttaatatatatctgctcccttgttaacttacaccttgggccttgttaaatcttacaattttgcagggaaaaaacaaaagaaaatataaatacatctaaagaaatggagaattcgtctgtaaaaaaaattgaattcaacaaatattctatgaatgttctagggatgattacagtattttccaaccgtctgggctggcacaacatggaactactactttcccaatttcagaagcgtcttacgtttggcatccagagggagctgtgtgacctggttcgggtatccttactaaatgctcagagagccagggttctctatgcttctggctttcatactgtggcagaccttgctagagcaaatattgtggaggtggaggtgattctgaaaaatgctgtgcctttcaaaaggtaagaaaatacctttacctacatgggcttatgaaataaaaaaaaaatgtcaattttaaaataatagataatgtattaaagttatttttctcttaaataatcttattatatacttggtgtaagtggaagaaaatatggctactttttccccattgcagattacttttttttttttgagatgaagtctcactcttgttacccaggctggagtgcaatggtgcgatctcggctcactgcgacctccacctcctgggttcaagcgattctcctgcctcagcctcctgagtagctgggattataggcacccaccaccaggcccagctaatttttgtatttttagtagagacagggtttcaccatgttggccaggctggtcttgaactcctgacctcagccaatccccctgcctcagcctcccaaagtgctgggattataggcgtgagccaaagtgcccggctgcagattactttttattttgtatatttaaaaaataatacatgacttaaaaacattcctgctagaacgtctgagtggggctgggcacagtgactcactcctgtaatcccagtactttgggaggctgaggctgattgtttgagcttaggagttcaagactagcctgagcaacatagcaagatctcatcgctactaaaactgaaaaaaaaaaaaaaaaaaatagctgggcatggtggcatgtgcctatagtcccagctacttggggatgtgaggctggagagttggttgagcccgggaggtcgaggctgcagtgagccctgatagtgccactgaactccagcctgggtgacagagtaagatcgtgtctcaaaaaaaaaaaaaaaagtactgagcaaaagtttggtatcaatgctttctgctttgctaaattttgattttgatctgctttgatggattttgataattttgatgtgatttcattatatatctcaggctcatcttacactttaggcaagagcattttaaaatacattcctctgaaatgttctttggaatgctagtgtccctcaaaacaatttgtgagaagattccttgattatttttttgtgtgtatgtctgaataaccaatttattgaatgggctagactcagtatataaatcaaggaatagcttaattattttttctaccactgttttttgaactcagtcttatatgaaatctcaggcagattctataggtatttagttactttcaggtactaacaaccagttttattttcaggtattaaacaatttgttttagatggaagcatcaatctcatttccaattagtgtttcttccctcccactcactttaaacctgactcccagctctgagaccttaacctgtgtgggaagggatggggtatagtattttactatcctctttgctcttgcatatctcttgcccatggaagacaatttttccacagaccgggggtggaggtgggggtaggggggtggtggagatggtttggttttaggatgaaacaaaacaattagattctcataaggagcacgcaacctagattccttgcatgtacaattcacagtagggtttcctgcagctgatctgacaggaggcggagctcaggcagcaatgctcccttgcctgtagctcacctcctgctgtgcggcccagttcctaacaggccatggactggtactggtctgcatctcgggggttgaggacccctggtttagacttttaactggccacttggaatctgtccacacttgcacggtttagaggtcagtcagagatttgggcagagtttatatgaagaattacgagttgttcctctctagttatctgttctagactgccttaaatttccaactaatgtagttactcttaactctcttctgacttctgtcaatcagtgaactccaggttgttatctaagtttttagccaacctacagggtgctgactgggccctgccttcaggtaaaaagtgaaaattaacccactgccattttctttcttccaagtctcaaccccactccaatttctgctttcttttgttcattttctagtcccttcatatattttgcccagagtttatattgtgtattgtacagaagcattcgttttctttcttgtcttgtctttttttttttttttttttttttttgtgacagtctcgctctgtcgccctggagtgcaatggcgtaatctcggctcactgcaacctctgcgtcctgggttcaagcaattcttctgtcttagcctcccaagtagctgggactacaggcacatgtcaccacacccggccaatttttgtatttttagtagagaaagagttttaccatattggtcaggctggtcttgaactcctgacctcaggtgatctacccaccttggcctcccaaagtgctgggattacaggcatgagccactgcgcacagccttttaaaaaatttttttaatgagacagggtcctgttctgtcaccctggctggagtgcagtggtgtgatcttgtctcactgtaacgcctcctgggttcgagtgattctcatgcctcagcctcccaagcagctgtaattacaggtacctgctaccatgcctggctgattttttgtatttttagtagagacagtgtttcaccatgttggccaggctggtctcgaactcgttgcctcaagtgattcgccttccttggtctcccaaagtgctgggtttacaagtgtgagctaccgcgcccggccggatgtttttcaatgaaagttttatggctttcacttttttaaaggcttctacttaaagaatctgtcttagtgaagccttcctttattatgccatttaaaaactacagaaccacccaccacccctttctggtgccttatttttgtatacaactcttatcaccaggtaatatagaatgcattttaaactttttgtttattttctgaattccccagctagaatgtgccatgagagcagatacatttctctctcttcttcattgttattttttcagttcctggtaacagctcagattgcatgtttaataaatacttgccttacgaatgaatgaattcatttctgtcttttcccatctccttgtgtagtgcccggaaggcagtggatgaggaagaggaagcagttgaagaacgtcgcaatatgcgaactatctgggtgactggcagaaaaggtttaactgaaagggaagcagcagcccttatagtggaagaagccagaatgattctgcagcaggacttagttgaaatgggagtgcaatggaatccatgtgccctgttacattctagtacatgctcattgactcatagtgagtccgaagtaaaggaacacacatttatatcccaaactaagagttcttataaaaaattaacatcaaagaacaaaagtaacacaatatttagtgattcttatattaagcattcaccaaatatagtgcaagacttaaataaaagtagagagcatacaagttcctttaattgtaatttccagaatgggaatcaagaacatcagacatgttccattttcagagcaagaaaacgggcctctttagatataaataaagagaagccaggagcctctcagaatgaggggaaaacaagtgataagaaagttgttcagactttttcacagaaaacaaaaaaggcacctttgaatttcaattcagaaaagatgagcagaagttttcgatcttggaaacgtagaaagcatctaaagcgatctagggacagcagccccctgaaagactctggagcgtgtagaatccatttacaaggacagactctgtctaatcctagtctttgtgaagacccgtttaccttagatgagaagaaaacggaatttagaaattcagggccatttgctaaaaatgtatctttgagtggtaaggaaaaagataataaaacatcattcccattacaaataaagcaaaattgttcatggaacataacactaactaatgataattttgtggagcatattgtcacaggatctcagagtaaaaatgtgacttgtcaggccactagtgtggttagtgaaaagggcagaggagtagctgttgaggcagaaaaaataaatgaagtgctgatacaaaatggttcaaaaaaccagaatgtttatatgaaacaccatgacatccatccaattaaccagtacctgcgaaagcaatctcatgaacagacaagcactattaccaaacagaaaaatataatagagagacaaatgccctgtgaagcagtcagtagttacataaatagagactcaaatgttactatcaattgtgaaaggataaagcttaatacagaggaaaataaaccaagtcattttcaggcattaggagatgatataagcagaactgtgatacccagtgaagtacttccatcagctggagcatttagcaaatcagaaggccagcatgagaattttctaaatatttctagactacaagaaaaaacaggtacttatacaacaaacaaaactaaaaataatcatgtttctgacttaggtttagtcctctgtgattttgaagatagtttctatctggatactcagtcagagaaaataatacaacagatggcaactgaaaatgccaaactaggagcaaaggacaccaacctggcagcagggataatgcagaagagcttagtccaacagaactcaatgaactcttttcagaaggagtgtcacattccttttcctgctgaacagcaccctctaggagcgactaagatagatcatttggaccttaagactgtaggtactatgaaacaaagcagtgattcacatggggttgatatcctgactccagaaagcccgattttccattctccaatactattggaggaaaatggtctttttttaaaaaagaatgaagtttctgttactgattcacaattaaatagttttcttcaaggttatcaaacacaagaaactgtgaaaccagttatacttctgattcctcaaaagagaactcccactggtgtagaaggagaatgtcttccagttcctgaaacaagtttgaatatgagtgatagtttactatttgatagcttcagtgatgactatctagtaaaagaacaattacctgatatgcaaatgaaagaaccccttccttcagaagtaacatcaaaccattttagtgattctctgtgtctacaagaagacctaattaaaaaatcaaatgtaaatgagaatcaagatacccaccagcagttgacttgttccaatgatgaatctattatattttcagaaatggattctgttcagatggttgaagctttggacaatgtggatatatttcctgtccaagagaagaatcatactgtagtatctcctagagcattagaactaagtgatccagtacttgatgagcaccaccaaggtgatcaagatggaggagatcaagatgaaagggctg
